United States Patent Application Publication US 2022/0102000 A1 - sequence listing, part 4

SEQ ID NO: 612 - DNA, 14985 bp, Unknown
  16S sequences of unknown bacteria
tctcagtcagctacgctgacagctctctttaccaaagagagccttgcaattcgttcggtttgaagtgctgatttgcaaccgaatatcgtatataaacaaaatatttttcaatctctcagtcagctacgctgacagttctttttaccaaagagagccttgcaattcgttttgtttgaaatgctgatttacaaccaaacaagtgtaccaaagagagctgagtttgcggtttgtttgggttgttgattcatagaggaaaaaagtttaaataatttgaaaagaggcgaccaatggtcgcccctacgggctatttgtgatttactgtcgtcggttgcagaataatatttcaaaaaagttaagtgccttgccggtcataaacagtaattataaagttaaatcgtaggggcgttcattgaacgcctatgcaaaccgtaggtttgcacattgacagcctttttataccgagagtttattaaacaaccggcaaaatctttttctccaaataaaaatacaaaggcaggacaagcccacctttgtactctatgatttattatgtataacaagaaatcaaattatttgaaaattgtcggtgcaacgatacctgcaaaagcaacagatgcgattgtaactgttgtaaagccggcaacaagcattttaggaagaagataatttctgattttatccttttcttcatcggaacattcaagagccttgcaaacgtcgtctgtaacaatctgtgttgacggatagccaagcatagcgcaagcgccgatagcaaagccgagaggccgttcatagccgaagatcttacctacaatagcaccgccgatacccaatgaaatgataccgaaaataagcattgcggcaatcggcaaaagcatttctttcaatgagtcaggtgtaagtgcgcccattgagttagctgtaagtgagaacaatgtaaccataacaaagccgtaagcgttagcctttgtaaggtgctgtttgtcaaggaagccaagttccgtaaacaagataccaacgataaggtatgcgatattaacattcagcttaccgcctgttacgccggaaagcacgttaccaacaacggcaactgcggcaattctcataagaccaaagaagtatgactggaattttgcaggccatgtcttgataacccgaatgttgatattaacctttgattcgccgccaaggtggtcaaggtctgctttttctttgataagctttgaaccaaccattctaaggcaagctgccgcacaaggcatagcaacaagaccttgaagtgaaaccaaaagcatagcataagcgccaagttccggtctgcctgcggcttcacaggtttcctgtgcgataacgcctgcgatcgtgccgcctgaaatcgggcaagcaccgacaagagcgtactctctgcccaagagcatgatgcccaaggtgtaagcgaacagggcaagtgttacaaagcctgccaaagccgtgagaattgttttccattctttaagcatgtcgttaagggaaatcattgtgcccaagttaacgataagcataggaataaacaattttgaaagcattgcaacaagacctgtgtttgcaactgcgtcggtaggcataatgcctgtccaatagagggcaatgaagagaatagctccaacaaagcccgttccgaaaatacctttagtaaggtttgaaacctgctcacctacaaagaaaacaccacagaaaaccatgaatgtgaagatggcagatccccatgataaatatgctgacatatttaatctcctctcaaaaaaatttatagatacaagtaggaatatacagcaaatttaatacaaagtcaacaaaaaacggcgcaaaaccttaaagtcactatcaggttttgtgaaaaatcggcaatataaaaaaaatatatgtaacatatcacaatatataagaaaaataatcccactttttgtgggattaactatacgataaaaaattatttttttaggctttttaaaaaaattcaaataaaaaatccccacagaaatttaaaaaaaacctatgtaaaataaaaaaagtatcataaaaagatacttttatttaaaaacaaataacatggaatatgggtattttaccgtgcataataaaatatcaccaagggaaaaataaggctacttatgtgttatctaataacatttttaaccgtttgtacttattttattttaggtatataatataaccgttaaatgattttgtagggagataatctctcctattaaaatttggtttatagtgcgattgaaaacagcccttaccggagggctgtttttattttgcaaaaatgtgttttacagccggcttataaacaaattataaaatttgccgccctgttacgacaaggggcggcctgtacccccaaaagggcaggcggcctgccccggggcaataacacggagaaaatatcccacaaaaataagaaaaccctgtttccttttaccgaaacagggttttctgtgttacgaaccgtcggcaaagccgatattcgtttttattaaagttttaagtcaaacttactttgcggcttcttcaagacactttgaaacagcgtccataattctgcctgatgtcaatgttgcgcctgcgcaagcgtcaatgttgcagctgttgttttcaacaatcttagcaggaatttcttccaatgctttgcttgcaactgactgtgtttcgtggttttctacaacttcaacagctgtgatagcgccgtttgcgattgtaaccttaactgtcatttcgccttcctggccgtcaactgttgctgtgtattcgccgtccttagctgctgctacatcgttgtaacgatctgttgcaggagcttccggctcgtctttttcaaacatatctgctgtaattgtagtgccgggtgtctgcatcttgtagttgtctgcaagttcggatgtcatagctgttcttgctgcaattctgccgaatacaacaggacccataacacctgtaccgcctgatacgtatttaccccagataccgccaacacattcgccggctgcataaagaccagggataactgtgccgttagcatccaaaacctgtgctgatgtgtttgtcttaacaccgcccaatgtcataacacaaagagccttcaaaggaattgcatagtacttgtcgccttcaaccttgttagctgaaactgagtatgtaccgtcaaatgaatcctctgtgaattctctgccaaactcgtcagcttcgcctgattcaacgtgtgcgttgtagtcggcgattgtcttttcaagtgtctcagcaggcatatcaagcttttcagccaattcttcgatagaatctgctgttactacaaatgagttgtatggcttgccaggagcatagtagaagttccagaatactgaagcgtttttagcctcaacatcagcgatgatgttatctgtgaagatatcatactggatagcgttaggctgtacttcaagagctgtttctcttgtaacaacgttgtcttctgtttcgtcaacaaatctttcgccgttctggtttacgctgatagcgccgcacttccacatgtatgaagaagcgattttaccagggcccttgcctgtgtcaagacccattgggaatgtaggaatgtagctcattgcaacagggtcaatgtaagcgccaacctgctgcatcatgtagatgccgtagccgtctgcaccgtctgaaccgccaaggaggtagttagaaccgttttctgcaaatgcgcccatgagcttagagttgcctgagtatccgcctgttgccatgataacgcccttgttagcgtcatagcgaactgtcttgccgtctgctgttttagcgataacggaaagaacctgacccttttcgttgttcaaaagttctgtagctgttgttgcatagtcaacagtaacattttcttttgttgccaaaacagtgtctaagatttcgtgaactgctgatttgtacttagttgggtctgaagctgccggcttgtagcttctctttacagagtagagctggtgttccggagcaaatactgacattgtacctgtctgtctgtctactgagaacttcttgtctttaagaccgttgtcccaaagccactggatagcgtcaacgtcttcgttaacataagcagtgatcatatcaatatcacctttgttgtcgccgtttgacataatatcgtcaatgtagctctgttttgtgtcctcgataccgtcgatctgctgaataattgtttcagcaccggacattgtaccgcctgtaaagttgagtgaaccgcctgttgtgtttgtcttttcaacaaggataacactctctgcgccgttttctacagcttcgatagcagctgaaaggcctgcgccgcctgcgccgacaataacaacgtcggctgatttagtttcgtcaacttctactgtctttacagggttctttgatgaacaacctgccaaagaagcaagcattgcagctgacaaaacaagtgtcaaaaattttttcattgctgttctcctttattttacacagaatttaacagatataatcatatcaataaaactgtgattacagttaaagtatagcagaatatttgatgattggcaaccgaaattaagaacctgtaacatttttttaatttttatatctcttattttatatcatttatactaaaaatataaaaaataccgaaatgtcaatttaaaattgttacaacccgaataaaaaattcacttattattcaaggaataataagtgaaaaaatataagtttaaattatattaaatttgcaaaaaatgatgccaatacaacggttaaaatacctgaaaccgcaatggataaactgctcattgcaccttcgatttcgcccatttccatggcttttgcggtgcctatggcgtgggcggcggtgccgattgcaagccccttggccatagggtcggtaattttaaaaattttgcaaagtgtctcggcaaaaatattgcccaaaacgccggtaattataataaccgcaacggctatggtaacatggccccccagctcttgaacaacacccataccgatggctgtggttatggatttaggcaacaaagttacatactctgtgtggcctaaggccataattttgctaaggataaaaacagttgttaaacttgttaaaactccgcttgtaatgctgatggcaatggccttaaaataacgctttaaaagagttatttcttcatacaaaggaatggccaggcaaacggtggcaggggtcaaaaaccagcttaaatattttgccccgtcgttgtaaacttcataatccacaccggtcagcagcaaaaagccgatagtcaacacaaggcttacaagcaaagggttaaaaagccctattttaaacttgtttttgagaaagctgccgatttcgtaaaacacaaggcttaaaacaaccccggcaaaagatgatgaaacaaaaaattcactcatttttcttcctcctttttaattattttctgtgcaacggtgcctgttacacccattaccgttattattgtaaccacagtaattacggcaaccggcaacagaataggctttaaaaccgaccgtgaatttacaagccccactccggcggggataaacataaccggcatgatttctattaaaaatttacctgcgtcttttacttgttcaagtttgattgcccctgttaaaagacagaggaataaaatgaccattccgtaaatgctggccggcaccgaaagaggaataagatattttaaaacctcccctataagggaaattataagtatcaccaaaaattgtctaagatatttcacttttcttctcctaaaaataaattaccacagtattttacacttattgaagaagatgtcaagtaaaaaagaaaaatttgtaaaaatatagttgagattatttaatttttatccccttttgccaaaacctatttttttgccgtttatgcctatttcatccccggtttttaattttaaaaagtttgccctgtgttttgacaaaatcacaaaggaggcaaggcacaccgtccggcaagaaatcggcgggtacaggccggaaattatcataaatgccgggaagcccagggtttgtatcaccgttgccactacgatatagtttaaaatcagcgacaacacaagccccgcaactaaaattatcagtgcatatttaaaatttatgtagagggaaaggccgataaaagaagcaaatccttttccccctttaaattgcaggtaaaaggggaaacaatggcccaaaaccgccgaaacccctgccaaaacagggagatataagttgtttgggaaaattttgcttataacaaaccgtgaaatataggcttttgatatatcgtaaattacggttacgataaaatatccccagccaaggcaaatttttgcattgctggcaccggcgtttttactgccacgctgccttatatcaaagcctttcagcctgccgaaaatatacgccgggtttacactgcctaaaagatagcccagaaaaattgaaaatacatattccaaataaaacacctcgtttcaaattattttattacatattatataatgcaggttacagagaaaataaaggggtaaaattacccaaaagacagtttgttataaatatctgcctgttacgctgttcgggtttttctttatttcttccggtgtgccggcggcgactatttgtccaccggcctcaccgccgccgggacccatatctattatatagtctgcgttgcggataacatcaaggtcatgttcgattacaattaccgttgcgccgctgtccaaaagagatgcgaaaaccctgagcaaaacttgcacgtctgccgggtgcaaaccgattgaaggctcgtcaaacacaaacaccgaatcattctgtgttttacctatttcgcttgccaatttcaaacgctgtgcctcgccgccggaaagccccggggtttcctcccccaaggtaaggtagccaagccccagttgttttaaaacatttaatttttggcttacggctttcatatccttgcaaaaatccgccgccgtattcacatctgcgtccataagttccggcatggacatactttccccggccttatttgtaagctttacatctccggcggctttcccatagcgagagccacggcagtccgggcaggggacatttacatcaggcaaaaattgtacatcaaggcttacaatcccggtgccgtcacagccgcagcagcggagtgaccctgtgttgtatgaaaaatcgcttgccttgtaaccggcggcttttgcggcttcggtttttgcaaacatttttctcaattcgtcgtgtaccccggcataggtggctactgtggagcgaatgtttataccgataggggttgcgtcaatcagctttatatgccctattccccgggcagatatggatttaatatgtgccggcagggggttgccgtcgatttttgcctgtaaggcgggaataagactttccaaaaccattgtggttttgcctgagccggacacacctgttacaaccgtaagcctgcccttaggtatggccacttccaagggctttacagtgtgaatttgagaagtggaaaggtgaatttcccctttttcaaagagcttttctctctcaactgtgtccctcacctttgtatttgttttgccggagagaaaaccgccgatttttgaaagccggtttgcctctatatccggcacagttccctgtgccataatgtaaccgccttttgcgccggcctcaggccccatttccacaatccaatctgcctgttttaaaatttgtgtgtcgtgatccactaaaattaccgagttgccgtcggctatcaaatctttcatcacgccggtgagccccactatatttgccgggtgcaggccgattgagggctcatcaaggacatacagcacccctgttgtgcggttgcgcaccgcacgggcaagctgcattctctgtcgctccccggtggacagggtagaggcagagcgatccaatgtaaggtacccaaggcctaaatccataagcctttttgcggtgctttcaaaggcatcgcaaatgctgtttgccatagggcgcatttcttccggcaaggttgccggcacgcccctaacccatttgacaaggtcggtcaaagtcatttggcaggcttggtctatggaaataccccttaatttccgccggcgggcggcaggggaaagtcggctgccgccgcagtccgggcaggtgtcctcttttaaaaatttttccacccttttcatacctttttcgtccttgactttcccaagggcgttttccacggtgtaaattgcgttgtaataggtgaagtccaattctcccgcctgatttgaatttttggccttgtaaaaaatgcgttttttcaccgcagggccgtgatacacaatatctttttcccggtctgtcaattcacggaaaggcacatcggtgcgcacccccatttcacggcagacatcggtcatcaaagaccacatcaagctgttccagggggcaactgcgcccccgtctattgtaaggctgtcgtccggtacaagggtggaaatatcaacactgcggactctgcctgtgccgccgcaggttttgcaggcaccctgtgaattgaatgaaagttcttctgccgatggggcgtaaaaatgctcaccgcacacagggcatacaagttctttgccggcggccactgccaaagtaggctgtaaatagtggccatttgggcagcggtggcttgccaggcgagagtacataaggcgcagactgtttaaaagctccgtgccggtgccgaatgtactgcggatacccggcacacccggcctttggtgcagggcaagagccgccggcacatacaaaacctcatcaacggcggccttagaggcctgggtcagcctgcggcgtgtgtaggcagagagagcctccaaatatcggcgtgagccctcggcgtacaaaacccccaaggccaaagaggacttaccggagccggacaccccggcaatccccactattttacccaggggaatgtccacatcaatattttttaaattgtggactttcgccccacgaataagcattttatctatcattttaagttctccaaaggcaaattacagcctaaaatttttaaagattatttataacccgggcaaatgcctttgcggtgcgtatatccgtatctttaaaatggttgccggggttgtattcaagggcgcagggaacaccttgttttacaagtttttctttttgcatttcaattctctcccggactttgcacatggttttgttttttgttttccgttctctatccccaaggcttaaatacacataatcggcgtttatgtttttgtcggtaaatttgtcccaattcgggaaccaaaccgagggtgaagccgcccgaataccgctgaaaatatcgctttcatatccccgccaaaggctgaacaatccggcaagggaataaccccctaaaataaattttgtattttcgcccaagttaaattccgattttaaatatggtataagtttttctatgtattcaagtgtggcttttgcccccccttgaaaatcctcatccccaaataccgccggggcaggccatggggacatttcaccgttccaatcgggaatattcacccgccggtagcaaaatgtcctgtctgtaaaagccgataaattatccaatagagaggaaagtttttcctcatcggaggcgtcggtaggctgtatcaggcaaaagtcccgattttgctctccgtaaagaatgatttttctgccgtctttttccgttattttaaacataaggttataaacctcctttaattctacatattattatatatgatgccgcaaaaaaatcaacaaaatccacggtaaatttgacaaggacagattattgctttataattaaaaaaaatccttaggcgccgccaaacaggcaggttgcctgcaaatttaatcggagaaaagaattatgggtaaatatttcggtacagacggcttccgtggtgaggccaataaaaatttaacggcagaccacgcctataaggttggtcgttttttgggctggtattacggtgaattaaagagaagaaataacgacgaaacccctgcaaaggttgtaatcggcaaggacacaaggcgttcaagctatatgtttgaatacagcctggttgccggtttggttgcctccggggcagacgcatatatgttgcacgtaaccacaaccccatcggtggcatatatcacaagggtggacgattttgactgcggtattatgatttccgcaagccacaacccctactatgacaacggcataaagctgattaacggcaagggcgaaaaaatggaagaagaaaccatcgcattggttgaagcctaccttgacggggagcttgaacttttcggcgaaaaatggcaggaagttccctttgcccacagggagaaaatcggcagaaccgtggactatgttcggggcagaaacagatatatcggttatcttatctctcttggtatgtacagctttaagggtgtaaaggtgggcttggactgtgcaaacggttcaagctggaatatcgcaaaggcggtatttgacgccttgggggcaaaaacttatgttatcaacgcagagccggacggctacaatataaatatgaacgcaggttcaactcatattgagggattgcagaaatttgttgttgaaaacggccttgatgtgggctttgcctatgacggcgacgccgacagatgccttgcagttgacgaaaagggcaatgttataacaggggatcacattttgtacatctacggcaagtatatgaaggagagaggcaagctccttacaaacaccgttgtaacaacggttatgtcaaacttcggtttgtataaggcatttgacgaactgggtatcggctacgccaaaacagccgtaggggataagtatgtgtacgaatatatgacgaaaaacggttgccgcataggcggcgagcagtccggacacattatcttttcaaaatacgccaaaaccggcgacggtatccttacaagccttaaacttatgcaggttatgatggatagagaaaagaagatgagcgagctttaccgggggcttacaatttaccctcaggttttggagaatgtaaaggtaaaagacaaggccgccgcacaggcagaccgggacgttcaggccgcagttaaaaaagttagcgatgagcttggggatacaggcagaattttagtccgtgaatccggcaccgagcctcttatccgtgtaatggttgaagcacccacccacgaaatttgccaaaaatatgttgatgatgttgtggctgtaatcaaagccaaaggtcaccggataaactgatttttgcgccattgaaaataaaatattatttttgcctcttgggtttgcccaaggggcttttttgctgtaaaagagccgaaatttccacagacaaaatgccaaaaaaacattgtataaaaattgacaaatttcgccacgaatgttaatatataaaggagtgtgtaagtgtattccgctcagatttcaccccacctggaggacttgtttttggatttagtatcacagattaaaccgggcacaaaaatgcacatggcatttgcggcggcggtaggcgtagaaccgaattttaatatggtgtgtacctttcaccggcccattgacgaaacgctgtttcttgtatctgttcccattgtggagggcaagccccttatccccgatgaaaaacagaagtttctgtttaaattccggcagggcggcgaagaatttatccttggcggttatgtggacgacataatcaaagaaggtataagaagatatttaaaaatttacaaagtgtccgaagaacgcaagctctataagcgtgcggacgtccgtttaaaagtggctttgccggtggaatattacgatgaaacctggccacttaacgaacatggcaggatcaccccggaaaagggcgaaactttggatatttcaagcggcggtgtggccttgtattcaaatcgtgtttttgatgtgggtacggtgttcacatttgtactgccacgcataggcacagcccaagacggcattgccaaattgccggttgtaggggttgtctgctgggacagagaggccccaaaaggccttggttacaggtatattttcggcgtgcagtttcgcttttccggcacagaggacaaacaggctttggcggactatgttacctttgtaaaagaaaaatataaactttaacaggggcgtgtttccatgaatgatgacaagttaaatcgggaacaaacccggcaggatgttccgcctgagccggagggcaaaagccccaaaaagagaaaaaccccctttggccgcaagaaaaaagacacggaacagataatccgcatcaaagagcttgaagaaataatgggtgatgagggggaagaaattgacgaggacaaaatcgtcagcatgtatatgcctcaccgcaaacgccgcagtttggcggcggcacttttgcgactggactttatgcaaaaattgcttttgtctgcgctatttttggtgtgtattcttttcatattggccttttcccaggaaaaaatgggtaatttcactataaacttaaaccgtttggagctgtaccgcaagggcatagcaatatccgaaaacggcgatttcaacggcgcaaccgcaaggcttaccgccgccacggtaaaagacgcaaccaatatttccgttgactctctgcccacaaaccttgacagtgtagacggggggcacaacggtgataattacatggcttacacctactatgtccgcaatgccggcaaggaggatgtgggctacatagcaagggtgactttggattctgcctcaaaaggggcggaggatgccgttcgtgtcaaggtttaccgcaacggcgagcccacggtctatgccaaggccgcccgggacggcaatcgggaaccaggcacaaccgcctttgaatccgacagcgtggtttgttcatatcacgaggaaaatttccttgtgggcaatgtggataagtacaccgttgtaatttggatggagggtgacgacccggagtgtgttgataagataatcggcggcagtgtgcagttcagcatgactattgacgccgactatgaagatgaaaccaacttgctgtataagtttgttaaagatattaaggacacccttacaggtgacaaacctatcgacgccgccggtaacgaagccggtaacaagggctactacggctacggcgacgtaacttgggatacaagaagaaataaggatgattacagtacacagtaaggggttatgcttcctatatgttttttaatgcagtggcaagtgacacgccaaaggcgtgaggaaaagattatttaaagcaatcgaaataatttattgctatcaaataaattacaaacttgccctccctgtgcaagggagggtggtgtgagcgtttagcgaacaccgggagggttgattgaaataattttccgctgtaaaactgtctccggttcaaaattggaagacaaccccacagacggctaacgccgccagctccccttgcacaagggagccaagatgttgctaacctttgtgaatgttattttgtattcgacatttatttatgaattatattgtttaaaatggtttcccgctataaataacaagccgagcagacaacaaactcgccctccttatcccaacaaacagtaaacttgccctccttgtgtaagggagggtggtgtgagcgtttagcgaacaccgggagggttgttcaaaataacttgtcggctccccctgcatgttatgccctgtgggtacagtggagcctaaggtattgaacttggatgtcactgattttatttccataacggagaattttattatgcagggtaagtataataaaaaaatggctcatgtagcacaaagcctacgcaagcgaatgacaaaagaggaaagacatctttggtatgattttctgcgttcgtattttgtaaagttttataggcaaagagctatctcaaactacattgtcgatttctactgtccgacggcaaagctggtagtcgaacttgatggctcccaacattttgaagataaaaatattcgggaagataatcggcgaacagaagaattaaaaaagtttggattgtttgttcttcgcataccgaataacgaggttaataataatttcgtcggtgtgtgtgaatatatagatttagttgtcaaagcgagaattgatagccttgggcgaattctttgaatttgctatccgctgtaaaacaacaacccaaacaaatcgcaaaactcgttcaccctgttaagggagatgtcacgagtttacgagtgacagagggttgttatagcaatcccacagtacaaacttgcggtttgtataggcgtttgataaacgcacatacggtttgaaattataaatgtatttgtttgtagttgagattagatataaataatttgcaagacaacccttttgtcacgcaaagcgtgacatttccccttaacaggggaaacaagatgttgttttctctttcggtcattattttttagcagagggttgttatagcaatcccacagtacagacctgcttttacataagcgttcaatgaacggttgtcaggtttacatttataaattatcgccccggcggcggggcgttaaaaatggccgcaagttaagttcggtttagtcgggcgccacaaccccgattaaatatatatccgttaaaattgtatctgctttgcaggcacagttaaaaacaaataacatcaccgtaaaacaaactcaaaaacacctccaaagggcttgcggcttttgccgaaagtatccgcttttatgggggcatatactgccaaaggccatgtgccccggcaaaagcgggtatgttaattgtaaattgacattgcgtgtaggcaaacggcgaaaatttaacggaaaaaggcgaaaagcctaaa

SEQ ID NO: 613 - DNA, 25561 bp, Unknown
  16S sequences of unknown bacteria
tatataatacgtcgccgcgaatctgtttttgaaaacattccgtacggttacaggtctgagcagtatattattcgatttcaatatcatttttcgacagtctcttcatttttcccgacatgatgggaaatacactgttttcccgtcatttccttctttatcgaatacagaactttctttcaatgaggaaaagtaacgactttccacaattttcaaaagcgcattttcagccgtcattttcgacaaacttttcattgccgtttcagggactttcacttttccccgtttttcggcttttctcacatctttcgccgtgcgtgataaataatgtgaacaatcaaaaatcatgtaaatatcaagtaaaatctttgtcaatatgtttttgaacactttttttatcgtaatgttaaaaactgcaaacgctatcaattttataatattgaacttttattcattttgaacaatagaagaaatcattaaaaaagacttgacagcgtggttatgggattttcaaaacatcaaaaattgttgataactgtctttgaaaaaccgaaacgcattaaaatcatcgactttttcacactttcaacagggttttccaccaaatcggagcatactatcaaatttattcattttttgttttgggaaaggtttttattcatttttttgtatttatgaaaacattgggatttttttcgcttattaacaggcggattactgacaatacacattttcgtaacaaaacgtttgaaattcacagcaagttttcaacaatgaattattgctgatataatcgaataatttgcggttatcaaacacttatcaaaatttttgtataaaacatcaatgccttatccgaaaagaatttatacatttttgttgaattcggttttttgttgtcaaactgcacaaaaaaacaaatcggaaaaacacggagcaatacagcgcaaaccttgcctattccgaaaaatgttaacattcataacagagtttttacgttgttgggtattgtaaattcttgtaatatatgctattatataatatattgaataaccgcgtatgcggaaggaggttttcggatgttcggaaaacccgacagaagaaaatacggagcaaaaccgttctgggcttggaacggaaaactcgacaaagaagaattgataaggcagaccgaagttatgaaggaaatgggcttcggaggcttttttatgcattcgagaaccggacttgcgacggaatatttgtccgatgaatggttcgacgatataaacgcctgcgccgacgcggcggaaaaagaagatatggaatcgtggctttacgacgaggacagatggccgagcggttccgcaggcggcatcgcgacaaaagaagaaaaatacagaatgcagtacctgcgctgcaatatcgtgatgaaagacctgtttgaatggtcggacgatattatatgcgcatttgcggcggacgttgacggaataaatttttcgggcgaagtgcaaatatcaaaacatacggacatcgcttccctgccgacaaaagacattatatatttcacacaggaatatatggttccgacgccaacctataacgagagttcatatctcgatacattgagccgtgaagcgacggaacattttatagaaacgacgcatgaactgtatgcgaaaaagtgcggaaagcgcataggcaaaagcatacagggaatttttacggacgaacctcacagaggtgcgctgatgacgggattttccgttccgaacagagaacccgcaatgcttgcgccgtatacggacgatctgtttgactgcttcaaaaaaacgttcggatatgatttgaaagataaactccccgaactgtttttaagaaaagacgggaaatattacgcaaaagtcaaatggcagtatacagaattgcttacggaacttttcataaagaattttatgaaaccgtatcataactggtgcaaagaccacgacctgcttttcacggggcatatgcttcatgaggacaggctttcgtatcaggtcagcacaaacggttcggtcatgcgctgttacgaacacatggacgttcccggagttgacactctctgtaatcacaactacgcatattgcatagtcaagcaacttgcgtccgttgcaaggcagacgggcaaaaaacacctgatgtccgaactgaacggatgcacaggttggcagatgcgcttttccgattataaaggtataggcgattggcaggcgataatgggaatcaatctgcgttgtccccacctttcatggtataccatgcagggagaagcgaaaagagactaccccgccagcattctgcatcagtccgcatggtataaagcatattcgtatcttgaagaccattatacccgaatcggtgaaattacgggaacgacggacagagtttgcaggacagccgttataatgcccgttgaaagcctttgggcgcagatatatgcgggctgggcagacggcatgatgaacgtatcggaaggaatcaagccgtatgacgacgatttcgacaaactttacaataccctgcttaaagcgcatgtcgattttgatttcgcggacgaagaaatgctttcgagactcggaagcgttgaagacggaaaattggtaataggaaaagccgattacaagagagttatcgttccgagcatgctcacgatacgcagttccacgctcgaagtgttgaagcagttcaaggcaagcggcggcgaaataatctttgcgggaataacgccgatacttgtcgacgcggaggaatccgacgccgcaaaaacttttgccgatgtatgcgaaaagaccgaaatagaaaacctcgcagaactgcacgacaaaatccttgtttcgtccgataaaataatcattcagacttacaaggacgaagaaaacaaatactgtttcctgctcaacaccgaccccgataattcggttaaaggagtaacgacagatttcggaaaagatgtttcactgcaactttgggacaccgtttccggggaaatattcagcgttgactgcaataacgggaaatatacaacggattttgaagcgggacagcttatactgcttgtaataccgtatgaagaaacacttgacgttaaacctctgccgcaaagaaaagtgattgaaaaagtttctgcggacgatgaaacggaaatttcgacagatgagccgaatgtacttgttcttgattacgcaaagttcagaataaacgacggagaattttccgaaaagaaagagatactgcttatagaccgttgtctgcgtgcggagttcggacttgaaccgcgcggcggcatgatggatcagccgtggtatacggcacagcgcaaattgcagacaaaagccgagatcgaaacggtatttgaattcgaaaacgacggatataacgaaaaagtcgttctctgctgtgaagagcccgagaaattcgacatcaaaataaacggcaaggctattgacaaaaagcctattgacggaatttatatcgataagtgcttcaacagattcaatatttccgatctgatacaaaacggaaagaacgaaatatctttcagaacgcagttcagagaagattcaaacctcgaagcgatatatctgcttggaaactttgccgccgacatttcgggaaaaatctcaaaaagagaaaaactcggtttcggcaatgccgcggtgcaggggcttccgttctacggcggttcaatgaagtacaaacttcattttgcaaagtttccgaaagacggacaaagagcgatactgcatcttgcagatgaagaaaatgttgcctgctgcaccgtcgggaacaaaacggttgcgttccctccgtacacctgcgacgtgacggacgaacttaaaaacgacggaacgcttgacctgacggtttatctgacacgccgcaatatgttcggtcccctgcacgggatagcgagaaaagtcgatgttgtaggtcccgacgatttcctgcgcggagacagcggagaatatgtcttgcttaatgcgggattgacgaacaaaccttatataacgatagaagaataggaggacgccgatgttcagaaaaaatatgggaatagatctcggcacgtcttctgtgctgatatacgtcagaggaaaaggcattgtgctgcgtgagcctgcggtcgtcgcaatagacaaaaagacgatgaagatattgaaagtcggctttgaagcgcaggagatgctcggcagaacgccgaaaaatattgcggctgttcacccgatgcgcgacggcataatctcggattacgacagcaccgaacaaatgctgcgatactttatccgaaaagcaaacggaaattcaatttttccgccgaacgcggtcgtatgtgttccgtcaagaataaacgaggttgaggaacgtgcggtaagacaagccgttacgaatgcgggcgcgaaaaatatcgaactgatagaagaaccgatggcggcggcgctcggcgcggggcttgacataggcagaccgcgaggaataatggttatagacatcggcggcggcaccgttgacattgcggttatatgcttaaacgacatcgttgtttccgaatccgtaaaatgcggcggcaacaagttcgatgaagagatagtcaaatacgtccgcaaggagttttcctgcataataggagaacgaactgcggaagatataaaaatcaaaataggctgcgtttccccgcgtgcggagcggctgacaatgaccgtcagaggacgcaatatggcaacggggcttccgaaagaattcaccatatcttcggacaatgtcatgcaggcgttgacccctgcggcgaatacggtggtagaagcggttcacgacgtgctttcaaagacgccgccggaactcattgcggatatatcaacggacggaatacttatgacgggcggcggaagcctgctctacggatttgacagactgctctcgtcaaagataggcattcacgtctataccgcggaagacgcgctttcttgcgttgtcagaggtgcgggcatcgcgtccgaccacgttgaaaatctttctgaaacaaaaatcaattcacccagacgaaaactctggaactgataaaacggaggaataaaaaaatgatttcaaaccttaccgcccttgcgggttccggatttctgtcgcaactcttccagagttcttcggcaatttccatttccgacatcatcatcagacttctcatcgctcttgcggtttcgctgttcatctacttcatctacaagtttacgttcaacggtgtaacattcaaccgcaatttcggcggaacgatagttataacaacggtcgttaccgcagtcatcatgatgataatcaactcaaaccttgcgctttccctcggaatggtcggcgcgctttccataatccgtttcagaaatgcggtcaaagattcgagagatatttctttcatcttctggagcgttgcttcggggcttgccgcaggcacgggtctttatcttgtcgcacttatctccacggtgtttataggtctttgcgttgttgtattcaatcttacgggattctcttcaaagagttatcttctcgttgtcagatacaacacctctttcaacagcgacattatggcaaaagcgcttaactattattgcaaaaagtaccgtctgcgcatgaaaaacacatccgacgacacggttgaagcgatatatgaattaaatctccgcaacggcgctgacaatgttatggttgaaaaaatagcagaccttgacggaatcctttccgtaaacttggtatcgagcaatgaagagatctgaaaacgggttttcgaaacttctcgataatctgacaggacctataccgaagccgaaaacgaccaagacgttccgacacgagttcaaatatctgataaaccgttacgactatctcaaatgccgtaatctctgcgaaagatatatgaattacgataagttcgcgggtgcggacgggacgtattttatcaacagtctttattttgactccgtaggctgcaaggacttttttgacaaagacctcggcgcatacgaccgcaagaaaatgcgtatcagaaactacggttacgaccttgattgggcgcatttcgagatgaagagaaaacttgacatttgggaatacaaggataaggtcaagatttcgaaagacgagttttaccgcattgcggcgggcgacttttcctgtctgctgaataaagacgataccgcagtcagatttttctcgatactttcggagggactttaccgcccgtcgtgcataatcgagtatgaccgcgttgcgttcgtgcttccctttgaggacgttcgaataacgttcgatcttgacgttcggtattcgacaagcgactttgatattttcagaaaaaaggtaacaacgcctctcttccccgaaaaatctgtcgtattcgagataaaatacaacgaatttcttcccggctgggcgcgcggaatgctcggcatagcgggcaaacagacggaagcggtaagcaaatactgctttgcgcgtgaaaaaatattataatgtctataaatcaaataatatacagcggatatattccgagaaaggcattcagtatgttggaatctcttatttccatgtctcaccgttacggtgcggacgcagactacgttcttgccggaggcggaaacacctctttcaagacagatgaatttctttatatcaaaggctcgggttcttctcttgcgacgatcagagaagaccagttcgtaaaaatggacagagcggcgcttgaagcgatgtggacgaagaaatattcttcggacgtcaaagagcgtgaggcgcaggttctttccgatatgatgaacagccgttgcaagggcgaagaaaacaaacgcccgagcgttgaaacgctgctccacgaccttttcccgcaaaaactcattcttcacgttcaccccgctcttatcaacggtcttacctgttcaaagggcgcggaagctgaaatgaagaaactctttcccgaagcaatatgggttccctcttccaaccccggttttgttcttgctcttctttgcaaagaacttatggacaggtatgaaaaggaaaacggcaagcccgcttccctgctcttcctgcaaaatcacggcgtattcttcgcggctgatacggaagaagaacttgacaaactcgttgcggatgttatgaacgctctcagagaaaaggcaacaaccgttccctgctttgacgaggttgagttcgaagaggacaaagcggtaagcattgcgcccgttctccgtatgctttacggcaagaacgaagcagcatccgtcaaattcgtcgctaataaagaaactgcaaaatttgcggcttcaaaagacgctttcgcggcaatcgaaaacagttttacacccgaccatatagtatactgcaaagcaaatccgctttggattcccgcagatgcggatgaagagaaaattgttgcgctgttcaacgctttcaccgcagaaaaaggctttatgccgaaaatcgtattcgttgaatgtctcggcatgtttgcctgcggcaaaaacaaaaaagaggctgacaccgcagcggttgtattcaccgacgcgctcaaaatcgccgaatattcgcagtctttcggcggcgaacttccgatgacgcaggacaaagttgatttcatcgttaactgggaagttgaatcttacagagcaaaggtttcccttgctgcgggcgcaggtcagcgcctttcaggcaagatttcgatagttacgggctctgcgcagggcttcggcaaaggtattgcgcaggaaatgctcaaagagggcgcaataatcgttgttgccgacatgaaccttcaaggagcgcaggcatttgcggatgaaatcacggctgaatacggcgcgggacgttcgcttgccgttgccgttaatgttgcggacgaagcgtccgtcaagaaccttgtaaacaagacagttcttgaatacggcggacttgacctgtttgtttcaaacgcaggtatcgcaaaagcaggttcgcttgaagaaatgacgcagaagacattcgaacttgttaccgccgtaaactacacgggcttcttcctctgcacaaaatacgcaagcaacataatgaagatccagcacagaatctcccccgactacatgatggatatagttcaggtcaactccaaatcgggacttgaaggttcgaacaagaactttgcgtatgcgggcagcaaattcggaggcataggtcttacccagagttatgcgcttgaactttgcccctacaacatcaaagtcaatgcggtttgccccggcaactacctcgacggtccgctttggagcgaccccgaaaaaggacttttcgttcagtatctgcacgcaggcaaagttcccggcgcgacttgtgttgaagatgtaagaaaattctatatggcgaaagttccgatgaacagaggctgtctgcccgtagacgttgcgagagcgattttctacattgttgagcagacttatgaaataggtcaggccatccccgtaacaggcggacaggtaatgcttaaataaggagaggttttataatggataaaaagaccgaacttatcgaaagactcaatgcggaaacgaaagaagaacgtttggaagcgcttcgcgagatcaagaaacttcacgatgacggcattcttcccgctcccccgaaaacgcagtatgtaaacaaccatattcatacaatttattcgttttctccgtactccccgaccaaagcgctttatatggcttggataaacgggcttaaaaccgcaggcatcatggatcacgactcgtcctcgggcgcaaaagaattcattgaagcgggtaaaatcctgaatatgcccgtaacgtgcggcattgagtgcagagttgatgcgtccgcaacgccgctgaacggcaaaaaaataaacaaccccgaccagatttctgttgcgtatgttgccatgcacggcattcctcatcagaacattgatgccgtaaatgcttggcttgcgccttacagagcacacagggacgaacgcaacaaaaagatgtgcgcaaacataaccgaacttgttaagggcgcgggacttttgcttgactacgaaaaggacgtattgcccatttcgagacacagcgagggcggttccgtaaccgaaagacacatcctttttgctcttgcgaagaagataacggcacgtttccccgactgcaaggatgtgctgaatttcctcatgaacgacctgcatatccccgtaagcgaaaaggcacagggacagatcctttcaggcaaagagaaccccgacttttatgaatacgacattctcggcgttctgaaaagtgatatggttgagaagttctacattcccgcaacaaacgaatgcccgaaaatggctgactttattgcgatgacaaagaagttcggaggtatctccgcttacgcatatctcggcgatgtgggttcttccgtaacgggagacaagaaagcgcagaagtttgaagacgactatcttccgttactttttgaagttattcacgagcagaagtttgacgcggtaacgtatatgccgacaagaaacactcgcgaacagcttgacagaataatgaaaaactgtcacgattacgaccttttcgaaatcagcggagaggacatcaactctcccagacagtctttcatctgcaaggcgcttgacgatcccgcatttgcacaccttatcgacgcaacttatgcgctcataggtcacgaacttgcggcgaccgaaaacatcgacgacgcgatgttctccgataaaacaaagaaagaacatcccgacctcggtgaaagaatcgctttctacaaaaaaaaggttctcggttaacttgaatataaaaaagaaacggcggttttcccgccgtttcttttttgcagagtttttaattcgtaacatttttcaacatacccaataaaatacttgatttcggaacaattattatatatactgtattagtaacaatcaaacagattaaagggagtagtcggcgaacaatgttcgtttccccagcgtcaatacacggcaatattttgcccgctcgggaattaaacggcaagactttatcggatattcacgcaacctctgcgagcgttttccgataaagtctttttattttgtaattttttttaaggagcgaatatatggcagaacttttcggaaacgtgctgaacgtaacatggcagcaatgcgttatgtacgtcatcggtgcggttctcatctttttggcaatcaagaaaaagatggaacccacgcttttgttgccgctcggattcggagcaatacttgtaaatttgccgttatcgggagcgattacgcagggagatgaggtcggcgcgcttgatgtgcttttcaatgcaggcatagcaaacgaactttttccgttgctgctgtttatcggcataggtgctatgatagacttcggaccgctgttatccaacccaaaactgatgattttcggcgcggcggcacaattcggaatattcttcacgctgagtcttgcttccctgctcggttttgagttgaaagacgctgcatcaatagcgataatcggagcagcggacggtcccacatcaattttcgttgcccaatatttcaattcgaaatatctcggagcgataatggttgcggcatattcatacatggctcttgttcccattgtgcagccgcccgtaataaagttgcttacgacaaaaaaagaacggcttataagaatgccctacaagcctcattccgtttcaaaactcgcaaaaatattgtttccgataatcataacggcaataacaggctttgtatctccgaaaagcgtagtactcatcggttttcttatgttcggcaaccttatccgcgaatgcggcgttcttgattctctttccgaaaccgcgcaaaaagtgcttgcaaatctcgtaacgatatttctcggcattaccatcgcgtcacgcatgaaagcggaagacttcttaacgcttgacacgttaatgataatcgggctcggacttatagcgttcatctttgataccgcaggcggagttatttttgcaaagatactcaatcttttcctaccgaaagggaaaaagatcaacccgatgataggcgcggcgggaatttccgctttcccgatgtctgcaagagtcgttcaccaaatgggcttgaaagaagacaatcagaacttcctgctcatgcattcaattggcgtaaatgtctcgggacagatagcgtccgtaatcgcgggcggtatgattctgaaccttattgcaagataaaggggatatacaaatgacttttgatataaatgcaatgcttcaaacgcttcccataatgggaaaaggaatggcgggaatattcgttgttgcggcggttattgtgctttttatgtacctgatcgcaaaaatcccctccaaaaaagataaagaaaacaagtaatacaaaaagcgaaaagccgcgtaatttaagacgcggcttttcgctttttgtataaaactcatattgaatttaaccaccgagatattcttcaaggcaaagccccgaatctttgattttttccgcctcacctattccgacatagcgataatgccacggctcgtactcaatacccgttatgctttcctttcctgacggatagcgcagtataaagccgtatttataggcattcttggcaagccacgcatacgcggtataagaacttgttccacccgttgcgtttatgtcaacggcaagccccgactgatgttcgctgcacccgggcaatgacgccgtttgcaatgcaagccgtcttgcttcctcgtatgaatatccgcggtttctgtatttgtttataaaactgttcagaacagattcctgcgacgcgtaacttctgtaaccggagcgaataaacatatatacgccctcgctgcgtgcgtcgtcaagcatttcttttaaatgcggatatatcaccctgtcgacatactgtccgtccatctttgctgtctgcggaacaaaattgctcggaagaggatgggtagaatttatcaacctaagaagagaaatttccgaaataacaggttctttctccgttgttcgaggctgagtgtttgacgaaccgtcctcagcggatgatgaacccgaagaagttttcgagggcttttcggttcgagatgtttcttctcccgccgtcggttcgggctctgttgccgaaccttttgaaaatgcctcatagtacggcttttctctcgacggaagagaaatatcggaaaacgccgaatatgcagatatccttgaatatgcagagttctctactgtaccgtcgtcaagttctatgagtgcggatgtattggtaggctcgccctctgtcttgttgttgccgcgcaacataacagggagcaaaaccgccccaacaacggcgacagaagcaaccgcagaggtcactatcgttcttattttcatcttttttgcaggcggcattgttcccccttacaatgacacccgttacctccgatatatcagataatcaacatatatattcatcttaaatgccacaggcattttttccctttacgtttccgccgaaactttacagtgttcatgccgcagagcatcaaaacggcgaatcgaatgcgtctgaaacagaagaacggcgtttaccgttttccccattaccgtcaatttgaagacgaaccgtttgcggcgggaacatctttccatatctcggatatctcttttgtttccgagcctgatttttcgataagattgcttatctccgttctgcaatattcggacagcaacgcctgatttgcaagataatcgcgataaagttgtccgtaagaatcgaaatagatataagcgatgcccgatgatgtttcaaaggtctcgcactccccgggagttcttttttcgccaaaaagccactcgtttatttcggaaaacaatgtgtatcccttatacacatttgtgtgatatccctcttcattggtcttgttggggtctattgaatattccttttcaagagcaataaacgcctctttgctcttgtcgctctcttcccatttggttgcgacctcgcttgcggaatcgctttttacgagcatttcatagaaattgacaagattataatctcgcgtgtctttttctatataataaataacaaacgttgcgcccgatgaagatgcatcgacaagatatacatctcccttttctctttcggaggaacttatccagccgtagaaattcttatcataagcgtcaaaatatgttccgttgaagtcataagtccttgtaacgtcagccgtgccgtatgacacaagcatattcgttgtcatgaaattatttgcgtaaccgtccgcaaaagcagtttcggaggacgtataatgttctttgaaatattccgctatttcaagcaaagacatatccgaaagtccatcaatctcatcaagattgagtccctcgtttttcgaatcctcgttgaaaaacgcaagacgaattatataagcatcgaaactgtccttatacttttcatagcaatcgtgcttttcgtcatccgtaaaagtcttgccgtcttgcaatttatcgatatactgattgtataccgacaaaatctcaaaataattttttatatcgtcaacaatgacacccgccccgaaaacagatgttatatactcgctttcggattcggctttgcctccgctgacagcggaagacgccgttgagttgaaatttgtaagttgagtcgtaacatactcgttatcgggagaaagcccctgtgccgtcgccgccgcataaacggaataaatttctttgcagtatgtttccgtataatcggtaaaatactgtgcccaggtcttgtccgtgcttccgtcaacggtgcaagactgctcaccgaaactctttgttgtatcaggaacatttttcgatgacgaattgctcgacaaatacgtctgaacagatgccgaatacaatatctggaactcaagttccgtaatatctctgcccgaaacggtcataacaacattttcggacttattctttcttgcacgctcgttcttatccgcacaggcggaaagcgaaaagagcgaaagaactatcagcgcgcaaagcaacagcgctactgcggaattttttttcattttacctccgattcaatcaaaaatccatcaaatatacatctagatcgactgttccgtcatcacggaatacaacgccttcttcttccagaagttttcgttgcatatcctcgccgccgaatgcaaaagcggaggaagtttttccctctcggttaacaactcgatggcacgggataacacccggttcgggattgacatggagtgcataccccacaacacgggcaagtcgggggttgcccgacatcgcggcgatcataccgtaagtcgcgaccttcccccgaggtatccgttttacattttcatatatgcgttcaaatgtgttcatatcaaatactctcctctcattcatattctttctttgaactgagaagaaatacagataagaattacgcccaagtcataacgccttttccgctgaaagtcataacctctttaagcgttttgacggctttttcaagtccttcgcgctgggacatcaggctgtcctcgtgttcgattgacataacgtaatcataatcaatcgtgcgaagagcggaaactatctcacgccaagcgtcttcgccgctgccgtagcctatcgttctgaacacccaagagcggttcataacgtcactgtaatgtttgtagtcaagtacgccgtttactgcggtattcgccttgtctatgcgggtatcttttgcgtggaaatgccacatacaatctttgagagcctttatcgcctgtgcgggctctatgccctgccaaacaaggtgtgacgggtcaaagtttgcgcctatctcggatccgaccgccgcgcggagattgagcagcgtctcgggattgtatacgcaaaaaccggggtgcatctcaaacgcgattctcgtaacgccgtggtcgcgtgcaaatgccgccatttcggtccaatacggaataaggcactcgttccactgataatcctttattgcaaggaaatcttcgggccatgcgcaggtcacccagttcgggtactgcgaattcgggctgtcgccgggacaaccggagaaaccgactatcgtattgacgcccattttttcgcaaagcagaatcgcttttctgaactgttcgtcataagattttgcaatatccttattcgggtgaacggggttgccgtgacaactgaacgcagaaatcatcaggtcattctttttgagcacatcgcgaaaatcattaagagccttttcatcgttaagaagaacgtcgggatcggcgtgtgcttttccgggataaccgccgcaacctatttcaacagcctgaatgccgagagatgcgaagtatttcgcggcttccgcaaacggaacatccgcaagaagatttgtaagaactccgagtttcatatcagaaaacctccgtaattacgctttcgaggggtcgtatccttcgattttttcagcgggaacaacctgctgccagcagtccataacgactttgttcggattgtatgcccaatgaaccgcattctttataacttgaagaatgtttttgtcgtaatagttcggatatgcttcatgtccgttctggaaatagaagatttttcctgcgccgcgatgatacgtcacgccgctgcggaatacgttaccgccctcataccagctgatgaacactgtctcgtcgggctcgggaataacgaacggttcgccgtacatttcctcatgctcaacaaggaagttatgcggaacgtctttgcatatcgggtgattgggattaaccgcccatacacggcacttttcgcctacttctctccattgaagattgcaggtgcagcccgtgagacgagtgaaaggaagagagtgatgcgcggagtgaagtgcgataaagcccataccgtcgtttactctctgaacaacgcggttaacaacttcgggaagaacggcaccgtgtgcaacgtgtccccaccaaataagaacatcggtatcgttcaaaacctcctcggaaagtccgttttcgggcatatcgagagtagcggtacgaatctcgaaatcatcgcacgcaagaccgtttttcagcgcggtatgtataccctcgggatatattttcgcgatagacggttcttttttctcgtgaacatattcgttgtaaatagtaactttgatagccattttttacacctcaaaattttaagtatattttcttttattttagcctataatgttgccgcattgaggacaggaaagagatttttcgcagtctgcgattttgtgaacgatatcaagacccgaagtaactttgccgaatgcggcatactgtccgtcaagatgagacgatgtatcgtcgcagataaagaactgactgcttgcgctgttgttctccgatgttctcgccatggaaacaacaccagcttcatgtgcaagtttgttttcaaaaccgttttcggaaaactcaccgtaaatgctgttctctgaaccgcccgtgcctgtacccgcggggtcgccgccctgaatcataaagccgtcgataacgcggtggaagataagtccgtcataaaagccctgttttgcaagataagcaaagttgcgaacagaaacgggggctacgtcgggataaagttcaagttctatatcgccgtaattctcaacggttatttttacttttacattcttcgaaaaatcaacgccgaaatcggaatatatcgttttcagataatcctctttcatcacctttgcggcttcatcggaatacgttgcgtccgatttgttttcaccgagcgactcgggaaggatctcaacctttgtcataactattttttctttcggcgaggactgataacctgcaacaagcgcttcaaggttgtagttgtactgttttgcaaccttttcaaaagaaaagccgcactttgaacatgtataagcggaactttcggcagtagttgtctgcatatcgttattctccttttttgcacaggcgcaaagagccagcaaaactgcggataccataagaatcgaaattatttttttcatttgatacctctttcggcggaacacccgcgctgataatatatattagatatataataatacaaaagtcctctggtttcaatagatgttaccgaaaaaccacacaaaaaaacggcgatttgtcagtttgcacaaatcgccgccataccctttgttaaaaatattgttcgagttcttttttcagtcttttcagtattttcttttcaagcctcgatatataggattgcgaaattccgagaacatccgcgacctgtttttgcgtgtactcttcgccgccgcgaagaccgaaacgaagttccattatctcacgttctctgggagcaagtcggttcacggcatttttcagcacggtaatttccatttcggtttcaaggcttccgcttacgctgtccgtatccgttcccagcacatcgcccaacagcagttcgttaccttcccaatcgatattaagaggttcttcaatggaaatttcgctgtgcgatcggctgttttttcgaagatacatcaatatctcattttcgatacaccttgaagcgtaagtggcaagttttatattcttgtccgcacggaacgtattgacagcctttatcagtcctatcgtcccgattgaaataaggtcctcgatattgataccggtattctcaaactttcgggcaatgtaaaccacaagccgcagattgtgttctatcaattcggagcgggcgttgtcgtcgccctttgcaagtcttgctatcgcttcggtctcttcttccgcggagagcggcggcgggagagactcggaaccgtttatgtaatatatctcatcgctcaaaacttcccttaaagcgtttccggaagcaaggcaagctatcgcttttcgtattccgctgaatttttcaccgaatgttctttccattcttttgttctcctttcaaaaaagcggactgactccgctgtatgcgccgcttttgtcaaaaaccgtgtcacggcaggcaataacaactttcttttcttcaccgttgacggtaaatctgtcgggaagaaaccctcgcattataccggttctcccgtccgcgttcttatacggaacaaggcgcagacggcggtaaagcgcaccgtcccgtacaatcattccgtcacgcaggtcggcaacgggacgtatctttttttcttcaacaaccactacgggcagtcccgatatgctttcaacaagtcggtttcccgtatcggtcaggcagttgaactcaacactcctgccgtcaaattcgaccgagcagcggcaaaacgcctctttcggcatacgttttgtaaaaaacctgtctacaactatttgtataacgcagacaataaccgttaccgcgagtatgtacgtgacaggcaaatcaaaatacacttcgccgttgttgacgtaaatgaaatcacccgtccacggcaaaaacgtcagcagaagcaaacacccgatatatgccgcagacaccgccataaaaacgcagagtgtttttatgaacttacggacatttccgaatccgaaagcaacaaaaactataagtgcgcccgaaatgaattttgcggcgatattcaacaaaaaagaaagttgcggcaaacagattgcaaagccgtaggctacggaaatcgcgaccgcgaatatcagccgcaaaggttttgtgtcaagccgcattatccgagcagtcagccacagaataacggtgtttacaaccacattgacaaatatcagaatatcaacatagacagtcaagcccctcacccgaacatattctatcacggcagcgtcgaaaaacgtgtcggaatatgtaaccgctattgacaaaaagatataaatgatgtaaaattaggaagtaataaatttgttcaaggaagtatacggatttggctgatctcaacgcaaaaacaaaaagattttcaccgttaaaaccggggcaatacattctccgtcttatatgcgcatggctgttcggagcctccgccgcgacatttgtttcgggcgtcaaagcgacggaagaaccgctgctgaacacggtgtccgttgcggcaatgctcataatcgcggcaggagtcttcatcgcaacgtgctttatcaaaagcgataaaaaagcgtacataattcttatcgccgccgcagaaacgttctgtataagcgttccgcttaaagaggcgaacctttcggttcccgtttctgcgggactctgccttattctttgcgccgcaattgcctattcggacttaaaggatataaatgtgaagataagcaaccgcacggtttacataacggttgcggcgttgcttgttgccatgacggtgtatatcggcgcggcgtgcatagtcagatatgacaactatgagataaagggctacgatcacggactttttgaccagatgttctactatatgaaaaacacggggcttgcggatactacgtttgagcgcaataggctgatgagccattttcaggttcattgctcgcctgttttttatctgctgcttccgctttacatgatattcccgtcgtcgcaggcgttgcttgtcatcaacggatttatcctgatttcgggcatagtcccgctgatgttcctctgcaaaaaatataacctttcaaacattgcaacggttcttttctgcgcttgttatgcaatatatcccgcgcttgcgggcaacggactgtggggacttcacgaaaactcttttcttgcgccgtttgtgctttggttcttttacttttcagaaaaagacaaccacattcctgccgttgtttttgctgttctgattctttgcgtcaaagaagacgcacccatatatcttgcaataataaccatatattatatcatctcgggcaaaagcctgaaaaggaacattcccctgctcgcactttcgcttgcctatttctttacggtcacagcgctgatgcagaaatacgggctgggcataatgtcaaaccgatacgaaaactatgtcggggaagacggaagccttatcgggataataaaatcgtttataaccaaccctgcattcactctttcgcaggcgttcaacgaaaaaaagttgttgtttcttgtgcagctcttcgctccgctctgcttcttgccgtttatgacaaaaaaacctgcacgattgatactgcttaccccgatacttctcgttaatctgatgacgaattataaatatatgccgatgataaactatcagtacgtcatagcaaatacggcaatacttttctatatgtccgtcgcggcatattcggaaatgggcaaaaagcgaaaaaaaattcttgtctgcgctcttcttttctcaaccgtttttgcgctgtcaaacaggctgcacccgacatatctgacaagaactgcggaacaaacggcatggaacgaaaaaatgacttccgcactttccgtgattccgtccgacgcaagtgttgccgcaacaaattccccgtcgggacagttgacgcagagaaaagaactttactgtatctacaccgcggatgacctcaaaaatattcccgactttgttgaatactatgtcgttcggctcgacggcagccaaaagaccgaaaaaatactgaaagaaatcaacagctgcgactacaaagaatttttccgcgaagacggtgtcgttgcaatctataaaaaataaatccgacataaaatgtcggacaacgaaaggatataaaaatgggaaaaggatttttccgaaaggaactgacacagacaggcagcccgttcaaattgaaaccggggcagtatattctgcgacttctgaccgcatggtttttcggtgcgttcgcggcggtacttgtcggcgattataatgcatttttatctccgctgctcggaaaaggttcgcttttcgcgctgctcgtcatcggctttgtcgtatttgtcggcacctgctttttgaagcgtgacaaacttgtttttcttctgcttatactcggaacggaatcgctttgtttgagcattacgctcaaaatcgtgaacactacgatatccgtgcctctttccgtcggactttgccttgttttgtgcgcggtcgttgcgtattcggacttgaaagaccttgacctgaaaatcaagaatagaacactttatatcgccgttgcggtcatgcttgttcttatgaccgcgtatatcggcgccgcctgtattgtaaaatacaataattacaatgtttacgggtacgaccacgggatttttgcccagatgttccacaacatgaaagagacggggcagatggtcacgacctacgaaagaaatgaattgatgagccacttcaaagttcatttttccccgattttctatattctgcttcctttttatatgatttttccgtcatcgcaagcgttgctcatcataaacggctttataatcatttcgggtatcgtgccgctgatgttcctttgcaaaagattcaagctgtctgacatatcaacgcttcttttctgtgtttgttatgcgatatatcccacatttatcggcaacggactttggggactgcacgagaacgcatttctcgcaccgctgatactttggctgttttatttttccgaaaaagactgcaccatcggtgccgttatctttgccgtgcttctgctttgcgttaaagaagacgcggcaatgtatcttgcgattatcgccttgtactacatcttttcgggcaaaagtcttgcaaggaactttatactgctggcgctttcgcttctctgcttcggcgcggtgacgatgcttatgcaaaaatacggactcggaattatgtccgcaagccgattcggaaactatatcggcaaggacggaagcctgttcaccttaataaggtcggtcatagaaaatcctgcttttactctttcacaggtatttacccaagaaaagctgcttttcctgctgcaaatgtttgctccgctctgcttccttccgctgatgggcaaaaagcctgcaagacttatacttcttatcccgatgctgctgataaaccttatgacaagatacagttacggctacgatatatattttcagtatacgctcggttctgccgcaattctgttttatctttcagttgcggcgtattccgaaatgggagaaaagagaaaaaagacgcttatctgcgcaactctttgttcaacggttatggcttgttccacatatttgtctgtcggatatctcggcagaacagatgctgtaaagcaacgaaatgatgaaattgcacaggcactttccgtaattcccgaaaacgcaagcgttgccgctacggattcccctgccggaaacctgacagaaagggacaaactctattacataaacagtgcaaacaaaatctattccgatgttccgaaagatgttgaatattatgcaatacgcagaggtcatggatgggaacgaatggaagaggtcattgaaaaactcagagtcacggacgggctgaccgaaatcgttacaacagaaaacattgtcattttcaaaaatgagaatgcgggggcgggcaaatgacgaagaatacaccgacaagaatcgttattctcacccttctccttgcggctggcattttttcggcaatgctgtggagcagaagcgtttggtttcccgtttgcggagtcgcagtatttgcattatttaacgttttcccgtcatttgtaaaaagacccgacaaaaaactccgcataagttcggacggagcagatctgctgacggcatttcttgcgcttgtttgcattgaatgcgtcttattcccattttacgcaaattatgtaacaggttggttttcttcctcattctggatatgttttgcaatcatattcacagccgatttgacagttttttggaacggaataatccaagtatacgcaacgtcttcaataatcggtgcaaaatggcgtattatcggaataatctgcggaatgataccgatagcgcatatatttgtgcttataaaaataatcgggttggttcgttttgacgtaaaaacggaagaagaccgaaaagaacgcaacgacgcaagagccgcagataaagtctgcaaaacaaaatacccgataattcttgttcacggagtgttctttcgagatattcgctttttcaactactggggaagaataccgaaagaattcgaaaagaacggcgcaacaatatactacggcgaacagcaatccgcactcggagtagcagaaagcgccgcggaaatctcggaaagaataaagaaaatcataaacgagacaggctgcgaaaaagtaaacataatcgcccattcaaaaggtgggcttgattcgagatatgcaataacacacctcggacttgacagatacgttgcctcgctgaccactattaatacacctcaccgaggctgtgaatttgcggactggctgttcgcgaaagcctccgaaggatttaagaacaaactttcagccgcttataattcaacgctccgaaaactcggagacaggtctcctgactttctatcatcggtaaaggacctctgcgcgtcggagtgtaaaaagttgaacgaaacaacgcccgacgctccgaacgtattttatcaaagcacggcaagcaagataaacaaacctttaagaaacattcccccgctctgctttacgagtgcatttgtcaaacggttcgacggaccgaacgacggtcttgttagcataacgtccgcaaaatggggcgaaaaagtcaccgtattgcaaagcaattcgcccgagggtatctcgcacgccgacatgatagatatatcgcgccataaccgcaaagacatcgacattctcgagttttatgtcgaactcgtttccgatttgaaaaaacgcggttactgaaaaatacagcaaaaaaatactccgaaaagatttctcttttcggagtgattttattttgttcggattacttcgcgtattcaacggcacggctttctctgataacgtgaactttgatctgaccgggatattcaagttcggcttcgaccttattcgcgatatttcttgcaagaactgtcatgtcgtcgtccgaaatatcttcgggtctgaccataacgcgaatctcacgacctgcctgaatggcataggttctttcaacgcctttgaaactgttcgcaagggattccagtctttcgagacgtttgatataactctcgatatcttcacgtcttgcgccgggtcttgcagcggagattgcgtccgcagcctgaacgataacggcaacaacgcttttcgcttcaacatcgccgtggtgagcttcaatggcgtgaactatcttctcgctttccttatatctgcgggcttcctcaacaccgatactgatatgcgaaccctctttctcctgatcgagagctttgcctatatcgtgaagcaatcccgcacgctttgcggcggtaacgtccgcacctatctcacccgcgataagtcccgcaatgtgcgaaacttctatggagtggacaagcacattctgaccgaaagacgttctgtaatgaagtcgtccgagcaatttgacaagttcggggtgaatgccgtgaacgcctgtaacaaacgttgcgttctcgccctcctttttgatcgtctgctcaacttcttttctggctttttcaaccatgtcaccgattcttgcggggtgaatacgtccgtcctgaatcagtttttcaagcgcgattctcgcaatctctctgcgaaccatatcaaagcatgaaatggttattgtttcgggtgtatcgtcgattataagatcgacacccgtcaactgttcgagagcgcgaatgttgcgtccctctctgccgatgattcgacctttcatctcatcgttcggaagagttacagccgaaattgtcgcttccgcaacgtggtcggcggcacatctctgaatggcaagcgaaattatttctctcgcttttgtttccgcttcctcttttgtacgattttcgtattcctgaattttgattgcctgttcgtgtttcagttcgccttcaagatttgcgataagttcggtctttgcctgttccgcggtcatgccgctgatacgttcgagaacggctctctctccctttttaagttcttcgagttccgcttctttttcttcaacgaccttcattttgcctgcaaggacgttttctttcttctcataagaatctgctcttctgtcaagagactcttctttttgaatgactcttttttcaagcctttggacttcattccgtctttcacggatctctttctcggcttccgtgcgacttctgtgaatatcttctttcgcttcgagcaaagcctctttctgctttgtctccgctgtttttatcgcctcattaacaatatctttcgctttctgttcggcagagcctatcgttgcttctccgacctttttgcggtaaaggttgccgcatacaagtccgactgcaaggcacacaactccgacagcgacaaggataattatttcaacggttcccaaggctaacggtataatatgttctatttctgacacctcccaacttaaaatttatgtagatagaaacataatcctgttatatgaacaaaactatacttt

SEQ ID NO: 614 - DNA, 5484 bp, Unknown
  16S sequences of unknown bacteria
gggttcgcgcacgttctcggcggattctttgacgcgatgtcgagctccggcgcgacgctcacggtcgcactctacttctacgcgaaggagcagggtgagtttgaggtggcgttcgcgatcgcggcgatactcatgatactcacggttctcataaacctcgcggcgtctctcgtcggaaaatatttcagaaagaggaaaagcatatgagcgacattatcacggtaaaggatctctgtctctggtacgggaacactaaggctcttaaaaacgtcaatataaatatccccgaaaaaagcataaccgcgcttatcggtccctccggatgcggaaagtcgacatttctgaaaaccctcgaccggatgaacgaccttgttccgggtgtgaaaatcaccggcgaggtgaaataccgcgaggagaacatcttcaacccgtcggtggacgtgaacgagctgcggcgggaggtcggaatggttttccagaagccgaacccgttcccgatgagcatctacgacaacatcgcctacggtccccgcacgcatggcatcaccaaccgcgcgaagctcgacgagatagtcgagaattccctgaagggcgccgctatatgggacgaggtgaaggacaggctgaaaaagaacgctctcgggctctcgggaggacagcagcagaggctctgcatagcccgcgctctggcggtcgaaccgcaggttctgctgatggacgagccgacgagcgccctcgacccgatctccacatcgaagatagaggagctggcgagcgatctgaaagaaaaatacacgataatcatcgtcacgcacaatatgcagcaggcggtgagaatatccgacaggacggcgttcttccttctcggcgagcttgtcgagtacggggacaccgagaagatgttctcgaagccggacgatcagcgcacagaggattatatcaccggaagatttggttaaaggaaagaaagataaatctttctttccaaagcattttggaaccttcgttgtcttccgacaacgattttgctctgcaaaaccggctccaaaatggacagagatgtaattaatgaaaggaaagacttaaagatgagaagtcatttcgacgagcagctggcggagctcaaccgcgagctcatcgctatgggcgctctctgcgaggaggctatcgccatcgccgccaaggcgctaatgaccggggacacatgtctcgcggcgaaggtctcgccggtcgacagtgagatcgaccacatggagcgcgggatcgagtcgatgtgcctgaagctgctcctccagcagcagccggtcgcgaaagacctgagacagatctccgcggcgctcaagatgataaccgacatggagagaatcggcgaccaggcgtcggatatcgccgagataataacctatctcggacagcaccgcgcggacaagtgcgaatacatcggcgcgatggcgaaatccgcgataaacatggtgacggagagcgtcgacgcttacgtcaagcgcgacatgaagctcgccgagtccgtcatagcccacgacgacattgtcgacgactattttgacagggtgaagaaagagcttataaaaatgatcgcggagagtcccgaggacggcgagtacgcgctcgatcttctgatgatcgcgaagtatttcgagcgcatcggcgaccacgcgacgaacatcgccgagtgggtcgagttctcggtcaccggcgagcacaaggaacttcatgactgatatctccggagacgggacactcccgcctccggacaggtatatctggtcgatctgtaacgatcgtccgaataactgacagaaaggaaagaacatcaatgatctactgtgtggaagacgacgcgagcatccgcgacatagaggtgtacgcgctgacatcaaccggcttcgaggcggagggcttcggcgacggatcggaattttttgccgctgttaagaaaaataagcccgagctcgtgatacttgacgtgatgctgcccggaaccgacggcgtcgaaatactcaagaagctcaaggcgtcgcccgacaccgccgatatagccgtcatcatggcgaccgcgaagggcaccgaatacgacaagataaagagcctcgacatcggcgcggacgactatctcgtgaagccgttcggtatgatggagatggtctcgagggtgaaggcggttctgcgccgctgccgcccgaagagcgaggcgaacgtcctgcgctcaggcggacttgagatcaacctcgacgagcatatcgtgacggcggacggggagagaatcgagctcacgtacaaggagtacgagctcctgaggctctttatgcagcatccgggaatggcgttcacgcgcgaccggctcttttcggacgtctgggggatggactactgcggagagacgcggacggtcgatatgcacataagaactctcaggcagaagctcggaaaatacggcgagcgcatagacaccgtccgcggcgtcggataccgctttgagaaacaacagtaaagacagaacagaaaggacagcccgatgacacacaggatcttccgatcgatacttttcgccgcgacggcggtcatgctgctcgcgctcgccgtcatcttcggcgtcatgtacgagtattcgtccgggatacagaagagacagctctctgacgagctggggcttgccgcctcggcggtgacgatgagcggcaggggatacctcgaatcgctcggtcagtcggacagcaggctcacctggatagcctccgacggttcggtgatctatgacacgaagagcgattccaggtcgatggggaatcactccgaccgcgaggaattcaaagaggcgatttcgaccggctacggcgagtgctcgagatattcgtcgacgctcaccgagacgaccgattacatcgcgaagaagcttgacgacggttcggtgctccgcatatccgagagccgcgcgagcgttctggcgctggcgctcggaatgctccaccctatgatcgtgatattcgttctcgcgttcatcctgtcggcgttcctcgcgtccgggatgtcgaagcggatcgtgaacccgctcgggaagatagatctcgaccatccgctcgacaacgacgcttacgaggagctcgcgccattcctcgcgcggataaacagacagaatcacaagataaacgagcagctgtatgagctcaggcgccgtacggatgagttcgaccagataaccggaagcatgaacgagggacttgttctgctcaacgaccgcgggaccgtcctcagcataaatccggcggcaaggggaattttcggctgcggcgattgctgcgggcaggattttctcacgatcgaccgcggacgcgatatgagcgaggcggtcggaaaagccatgcgcgatggtaaggcgacgacagagaacgaaaaggacggacgtgtaatacgctatgacataaaccgcatagagtcggacaaaaaggtcataggcgcggtaatactcgcgtttgacgtgacagacagcgcgctggcggagagaaaccgacgcgagttcaccgcgaacgtctcgcacgagcttaagacaccgctccagacgataatcggcagcgcggagctcatcgagaacggtttcgtgaagccggaggatatgccgcggttcataggtcacataaggcgcgaggcggcaaggcttgtcacgctcatagaggatattatcaggctctcacagctcgacgagggagttgacctgccgcgcgaggatacggacatccacgcgctcgccgaggaagcggtcggaaccctttccgagtcggcaaaggcgaagaatgtcacgctcgaggtgcatggaggcgggacgacggtctttggcgtgcgcagacttctttatgagatcgtctacaatctctgcgacaacgcgatacgctacaacgaggatggcgggcgggtcgatataatgacgctcaccgacgatgacggagcaaagctcatcgtgaaggacacgggaatcggaatcccgccggagcatcagggacgtatcttcgagcgcttctatcgcgtcgacaagagccactcgaagcaatcaggcgggaccggtctcggactgtcgatcgtgaagcacgccgcgcagtatcacggagctgagattaaacttgagagcgtgccgggggaggggagtacgtttactgtgacgtttccgaaaggcgtgaattctgagagaactgtggcagatgaataaatcggttttagtctgtctgaaagaaaatttacatattgtttgccggatatcgtttacaaacgcgcatggaatgcgtataataaaagtgaggcggtgatttttgagtgaagcggactgacctgataaaactgcttgaaagaaatggctggcgtctgaaacgaaacggcggtagtcatgatatctattccaacggaaaagaagcggaaacgataccgcgtcacagcgagataaatgagaatcttgccaaggcgattatcagaagacgcggactcaagtgaaacgtgaaactgaattggaggataaacacgatgaaaaactcttatccgatagtcctgactcccggtgttgacggttattctgtatatattcctgatttcgataccggaactcagggggaggatctcacagaagctattgagatggcgcgggacgcgatcggtctaatgggaattgatatggaggatgacaggaaggcgctgcctgttccgtccgacatttccgaggtcagaaaaagtgacgctgacatcgtgacgcttgtcgatgtcgacttcacggagtacagacttaaaaatgatatgcgtgccgtcagaaagaattgtactctcccttcatggctgaattacagggcggaggcagctgggatcaatttttcgcaggtgctccagaacgccctgatgaaagagctgcatctgaccgggagatgatcccgtagactcaggaacagactgaataatcaggggttcttcaaagtaatcaggatgaccgtcgtgggaaaaagtaagcggcggtctttttgtgtcacaaatgctctttttccgagcgctacaacctctgatatgataattgcataattatctcagtcaaaaatcggtgagaatgccaattgacttttcggcggatttgatttataatattatcaccgcacccgcaccgacgacactacatatagtgtgcctgtggaaaacgcgacactatatacagtgttttaccatgattggcgaacctgtgttccggacgtgcctgatgagctttgcgcttttcagatcagaggtcaccatatggtattcaacatacatcatcacaaaaggagtacgacgcaatgataacaaagataatcaagcgcgacggaagagaagcgccgttcaatatcgaaaagatcgcgaaggcagtcttcaaggcagccgaagccgccggcggacacgactacaacaccgcgatggacatcgcctgcgaggtcgcgaaccagctcgaaaagaactgcggaatcg

SEQ ID NO: 615 - DNA, 17129 bp, Unknown
  16S sequences of unknown bacteria
ccgcttgtgcacactctacactcatcaatggatctactacaatccatcctgtatcaccttttatgaatgtgacattggacatatcatagccacgcacctgataaattccatcggttacttcaaaaaggccataaatatgattcagctgtgtatttctccaaaggctgggattcgctgtatccggagcgtcctgatccagaaaagcatatgccgtctgactccatacaaccttcccgttttcatcacaaatatccagagtatccggagaagcaatctgcccctttgcagcattctcaaactccgcagtatcctcgaaatccagcaatgcatacactttctgattcgcatcaatcgtatactgggttgccggtttgctttccgccgttaattctgatgctgcaattgcggttgagccggcactgacagtcatggtaagtgtcaatgcggcagtggtcaaagtaattacgttttttcttttcatgctatctgcccccttttcagtgtcatccggcaacggtaaacacttccatcaaatatatgaatcgtacaatgatcatctgacatgatcacataaagaatatccgcacaccgaatcgcgattttagtacgattgaaagttactgtaatgaattcctgctgcatggccactgcctcctccttcttctatctcatcagctaatttcactgtatttattatatcatctcacttctaatagcaactgtacgatttttcatatttgttttcactccagagggagactttgtgctgtacaaagtgctccataccccaccatctcattcggatacacctcaaaccccggaagcggtcttgcgcctctttgaagatatgcccgcactttttctccgtacagaaacggatcgtttcctcttacgatcccccattccatcagaagcgctgcgcttccggtcacaaatggaacagaaaatgacgttccggttaccgttctgtatccgccgcccggtgcagtggttgtaatttcaacacctggtgccaccaaatcaggccggactccatgtgtttttccaggccacccgcgtccggaaaacgctgcatatccatttgtgcgtgaattatatgctccaaccgccagaatacgcgaagctgcggaggggatcgtaagtgtcaccccgggatccggacgcaaaaaacgggtataagatccccgtgcgcggccatcactcatccacaaatcatatctgccatccacaattttttccggtgtcagtacgattttccagatgccactttccaaatattgcccttctgacgcaggaagccattccagaaaaatctcctgctgcccctgataaggcgccggttccccataataggccagcagcaccgtgctgccaaaccgatactgcgccgctcctgtttccctgccaagaggtcccacctgacggttgatagggtcgtatatctcaatccgatacgcatccgcatagtttttccagagctgcaccgcaagtgacgtttcctgctctccgattgtaaactcaatactcttggcaccttctttctccttgagatggccggatgcatgaccgtctgttgctgcctcatttcccatccctgtcacaaagacacttttccagcgatttgccatctgatcaagatacgtctcaagcagtgtgtttccaagatgtgatccgtaaacatttccaaagctcagattcactgccaccggccggctaagctcttctgctttgcgcaccacatattctaccgcctgcatcacttctgccgtacgcggaaaaccatccgcttccggagtgccaagcttcaccacgatcagttctgcctgcggagcgactccccgatattttctgccggatgcctgcccgtttccggctgcaattccaagcacttctgttccatggccgcttaaatcttcttccggaacgagcataaggcccgcctctctgcttcctgctgcaagtgccgcatcaatctctgctttggtgtattcaactccctgcgtaaagccctccggaattctgccaaatgatttttccccgccggatatactttggtcccacaaggtcagaatcctggttgtcccgtcctgctttcgaaaatcaggatgaaaatagtcgactcctgagtcaatcacggcaatcaggactcctcctccctccagtccgtcaactccgctttgcactgctgaaatacaggattcacgacgtccctgctccacagaaaaataaaggcgttttggcttctcaatatattccacctgactcagcccggccagcagctctatatcctgctccgcaagtgtcacgatcgcataacccccggaaagctccgtaatcttccatcgctccccgaatttatccttcgccacttttacaaaatcactgccacagcgcacaatgacctgccaggtgcgtgtatatggctgatatccgctctccagaagctctgatttctcacgctccttttgcggtgtattcagcgcaagattcagcagattttctattttctgatcatttttccgatcgctcattctcatttcccgctaatcttctttgccatatcatatgaagctgcaccagctgctgtacttccctgctgagataacctgtcataaaaagcgagccggtcttcggtataataccgaattccaactcgcttattttttctgttttctattttctgtttttgattttccgttttctgtttttgattttctgtcttcaattttctgttttttactgctgcctcgcacactcctgcttatccgcaatcttcagaaatacaaaaccaagtgcaaagaaaattgccagacaagctaccgctacattaatcgtaccgccggcgagcttgactgcggcaattacagccgagccaaggaaagacgctcccttgcagaagatatcataaagtccgaaatattcacctgaattttcagccggaatgatttttgaatagtatgagcgcgacagagactggatcgagccctgaaagcagcccacaccaaatgccagaattgcgaaatgcaccagcgtgcgcagcgtcagcgcatacagcgccacacaaaaataacctgcgatgcacaccaggatcagtgtcaccgtatcatactttttcgacagcttcgcaaaaatcatagaaccgccaaatgctaccacctgcgtggcaagcagaaatataacctgccctaccgtattcagattcagatccgtgccgatattgatacagttatcgatgattgttcctacaccatcgatatacaggaaaaaggcgatcaggaaaaacagaacctttttgtcatgcagcgcaatatttttcagcgtttttaaaattcttccaaatgcatttcttacggcatgcggctctttttccacgtaatttttctgctggtaactgcggatcagaggaatggttacgatgagccaccaaagtgctgtaacggtaaaaccgatcgcctttgatacgccgccggaaagttttccgagcatgtccggtccaagtacgtacgcaatcagtgcaatcagaaacggaatgcaggaaccgatatacccccaggcaaatccataggaggacacctcatccatacgttcttctgtcgtcacatcattgagcatggaatcgtaaaacatcaaagatgcgttataacagatcctggtcaggatattgataacaataaacacgacccagcccgttacaaatccgttcagaacacagccggtaacgccaagcgctgttactgtcgtaaagaagatcttctttgaatccttgtgatcggcaagtgcgccgcagaccggaccaagcagtgcgaccagtaccgtcacaagcgcaatggaaatagaataatacgcagtcgcgcgatccgcactgatctgcccgggagccgtacctatcgccatgctcttaaaccagatcggaatcagtgaacaggtcagcatggtaaaagcggaatttcccacatcatacagcacccatgcaaactcctgctctgtaaggccacgaaacacctttgtcttattgagaaagcgaaatattcccctcatatcagcaatcccttacaggaggcttgtaaagcgcagacttaagcagcttaagccgccgtcgatcttccggtattcagaagtatccaccagaatcacttcatagccggcatcctttacgatctgtgctacctttggaaaatgatccggcacgatgaccttaccgttcatccagatgcagtttgccgcatatgcctcatcctccggaatcacatatttattgtattttgcaaagtccggtttgtcgacaaattcaccggataccagcatgttgttgttctcgatgtagttgacacccgtctttaagtgaagcaccttctcaagcggtacctcagagccggtcaggccatatttctcaaggattgcgatgaactgacggattccctcttcgttcgtacgcgcggagcgtcccacatagaaatggtctcctaccatcatgacgtctccgccttccagcgtgccaggtgccttgatatactcgatgcagtcctccgggaagaattttttgataaccggaatcatggcctctacctctttatttctggatgcagcgcccggatttgtgatgatcgcacactttctggtcagtactgccgtatcttctacgaagcaggaatccgggaaattctcatcggcatcaagtaccgtcacctctacgccgcagctcttcagcgcttcaatatatgcgtcatgctgcttcagcgccagctcataatccggctttccaagctctggtgcggatgtaattccttccgtaatcttgctgcatggtctttttacgataacatttttaaacataatttttctccattctgcccggccttgctgcgggctgactcttccgtctttgttatctttgctgtctttgttgtctttgctctcttttctgtcttttctgtcttgtcagcttttgctgtctcttcgcgttcttctgtcttcgctttcttttctgccgttttttcgcagagttcacgccggacacacataagacttctttgctacagatctgtaatgctattctataatactatacttcggcaattatttgtactgtttcttcacaaatatccgtatcccttacaacacctttgacaggaattccctgagacgctcatttctcggatgagaaaagaattcctccggcgtattttcctctttgataagtccctcgtctacaaagagtacctttgtgccaacttcccttgcaaaacccatctcgtgagtgacaatcaccattgtcatcccctcgtcggccagttctcggatcaggtcaagcacctcgcctaccatctccgggtcaagtgccgaggtcggctcatcgaacagcattacttccggattcatcgcaagtgcacgcacgatcgcaattcgctgcttctgacctccggaaagcttattcggatactctccggccttatcctccaggccgatcctgcgcagcagacgcagcgcattttcttttgcctcggcttttgtctgcattttcagacggaccggagcaaatgtgatattgtcaagcaccgtcatatgcgggaacaggttgaaatgctgaaacaccatccccatcttctgacgcatcttgttgatatcgttctgcggatcggtgatattggtaccatcaaaccagatctcacctccggtcggctcctccagaagattcaggcagcgcagaaacgtactttttccggagccgctcggtccgatcactacgatcttttcgccctggttgatcgtgtaatcgatgccgtttaagactttcagcccgtcgaattccttttttaatcccttaacctcgatcaccctgcttcagcctcctctccagaatgcttaccccaaaggataaaatcatgacacatgcaaagtaaactgccgcgatgaaaagcagcggcatcatcggtgacattgttctgcttcgcaccagatccgacgcacgggtcaggtcaacaactgcgatatagccgacgatcgacgtctccttcagaacggcaattccctcattgcaaagtgccggaagcgctgatttaaacgcctgcggaagaataatatagagaatcgtatcaaacgcgcctacaccaagagaacggcccgcttccatctgtcctgcatctacagaattgattcctccgcgcacgacctctgatacgtaagccgccgaattcagtcccattgcaatacagcagaccacgatcttattcgggaagcctgccatgataacaaacgccatgatcagcagctgtaccacaagcggcacgcctctgactactgccacatagaacgcaagtattttgtcaatgataaagtacagcacgtagccgattttttttgccggtgtaaccggctttctctttttgatctgcacgaatccataccgcagcatggcgatcgcgataccgaacaccattccgacaacgatcgacacaagtgtgatcagaatcgtgttctcaaaacctgtcaaaaaaactttgtagcggtcatcacggataaatgttttcacaaactccgctttgatctcatccatccagcccataatcctgcctttcttcggaagcggatatccatgatccgctgttttttgcttctgcagctcctgcgcattctccgccgaggccgcaatttctttgccattgtaccacactacagtggtcacgtctacacatatcggaatcattcgacttttctgcagcaaaactgcaaaaacagacaggatactctctctgccggtcagtctgcattcccatgacacacagcgaagcggatacactcgatccgcttcctctgctttgctgctatgtcattttgtcaggtggacatttctgttttcaacgcgctctgcatcgccctcattcagatgaaattttccacgaatcgtgaggcctgtcttacagaaagcatttgtaaagcggacattcgcaatccgcttcgctacttgctcatgaacgcagtcgcttcgcgacctgcgttcaaatacgctttcatatagatacgccagcttctgcctgactgatttactctctataagactgttacctactctgtcactgcttcagtagctgcctctgtgtcagcctcagtacctgcttccgaagatgattcagcttcctcattcagtgcggaagattttgcactctcctctacgatatactggtcgatcgtaccgtcttctttcagcggaacaatgatctcatttacttttgcgatcagatctgtctcgccttttgctgcagctaccgcatactcttcctgagtggaacttccgtctgcgtatacagcctcaaaacatttcaggccatcgtttaccgtgcagagattttctgccagctgcctgtcgcagacaactgcctggacatcgcctgcattcagtcccatcgctgcgatcgtcaggtctttgtactgctgtacagatgcaccgcttcctgccagaacgcccatgtttacttcatcggaaatcaggaagtcaccggttgtgccaagatgaacacctaccgtgtagcctgccagatcgtcaatgctctttacatcatcgttgtcttcttttacaacaatgtactggctggactcacagtacggctctgaaaactccatcgcatctgcacggtcctctgtaacagtgatcgctgccagtgccagatctgcctctccattttccagatacatggaaagagaatcaaaggatacattaatgatctccagatccacgccaagaccgtctgcaatatcttttgcgatatcaaggtcaactccgactacattctcgccctccatgtattcaaacggaggccatgcagcatcagttgccactaccagctttcctttttcaagtacacgctccagagcggtctgatcatctgccaggcttgtgaatcctgcgctcagactaactaccattgccagtgtcatacagattgcggctgcttttttcataatgtattcctcctcgtatttctatgcatgtcgtttcctgatatttctcatgcattcatgaatatttatgcatagtatcctacaccttcgcgcataaaaatgcaagtatttttttaaccggatccagagcatgtttgaaaaatgctttctgcatgatgtattccgcaaagtgaggcgtacaacctcataaggtggaacccgcttgcgggaggcaaacctgaaatatcccctctcattcttccagcatcgtgttgatccttcggaagccgctccggtccttttcttccatgcatgcccagacccgctcggcaagctctgccagcgtgctgtccccgaagctgatctcgcctccgtaaatgctcattccctctgcgatcgcctgctgtgcctcaagatactcgtcataatgttcatccccttctacgaaatcatgctgcacatcgatcccatacttttcctgaaacagctgcctcagttcttccgcatcagccgcctccttctccccgaaaaataccgggccgagaatctcatacagccattccttgcggcgctcccgctcccggtcatcacaagcgatcagataaggacttccctgcacttctgcacaatgatctcttttattttgttcttctgacatttttttacacccgctctccccagtccgaatgtatatccctctctttgttttaaaagataacatatcatttcaataatgtcaattattattgcagcgaaaaacaccggctggcctcctttggcttaccggtgttctcccttatttccatatcctgttttctctgttctgatccgtgctctgcccttacttcttcgttcccggcagcccaccaaaccgtaccttgatgtactcttcgatcgcctccatcgttccctcaaatccgaggcgttcactgttgaggcacaggtcatagttgcgggcatctgtccactcctgtccggtgtagtaacggtagaaatcactgcggtacttgtcggtccgctccacaaatttctcgacgtcttttccgacatacgcgcggcgctcaacggcctgctcgacgcagtattttctcgatgcatggacaaatacgctgactacgttgtcgtaatctttcagtacataatctgctgcacgtccgatgatcacgcaggactcacgctgcgcaagctcgcggatgatcttcgcctgataattgaacaggttgtggtcgctgacaaactcgtcgctgcccggcgcgatcagctttcccttgtactcgccatgtgcttttccaaaaaacagcggagtacgcttcagcttttcgtccgcctgattgaacagctcctctgcgattccgctgtcctcagaggccatttcgatgatctcgtgctcataaaacccaatgccaagatcctcagacaacatttttccgacagtctttccgccgcttccgaaatgtctggcaatcgtaattactacgtttttcatagtctcaccccttttactataagtcagcacaatttcagcgcttagtcaaaatcttcttcactgtgctgcctgttttctttttcttattcacccaggtacgctttcttgatcgactcatcattgagcagcacctgcgcatcgccggactgtacgatccgtccggtctcaagcacatacgcgcggtccgcgatcgagagcgcttttttcgcgttctgctcaacgaggagcacggtcgtgcccgctttgttcaggctctggatgatatcaaaaatttcatttacaagaatcggagaaagtcccatcgacggctcgtcaagcagcacgatcttcggctttgacatcagcgcacggcccatcgcaagcatctgctgctcaccgccggaaagtgtgccggccatctggttctgacgctctttcagacgcgggaaacgcttgtatactgtttccagcatctcatcgatctccgctttgtcttttctcgtgtaagcacccattttcaggttctggtatacagaaagctgtgcgaacacgcggcgtccctccggtacatgtgccattccaaggctcacgatcttatgcgccggaacctttgtaatctcttttccttcaaaaaccacgctgccctttttcggcgagagcaatccggtaatggtatggagggttgttgtttttcctgcgccgttcgctccgatcagcgcaactgtttctccctcgtttacctcgaaggaaattcccttgatcgcctgaatcattccgtagaatacctgcaggtcttttacttcaagcattgccatttgtctgtttcctccttactcacccagatatgccgtgataacctgcgggttatgcagtacatcggacgttctgccctgtgcgagtacttcaccgaagttcagcaccgtcagttcctcacagattccggaaacgaggcgcatatcatgctcgatcagcagaacagtcatattgaaatgatcccgcacgaatcggatcatatccatcagtgcctctgtctcgtttgggttcatgcctgctgccggttcgtccagaagcagaagcttcggctctgtcgccatcgcacgtgcgatctcgagcttacgctgcttaccataagggagattggacgccagcgtatcagcttcctcttccagttcgaacacgcgcagaagctccatcgcctgctcgttcatctgcttttccaccttctgatatgccggtgtgtggaaaataccggccaggaaagagtattcatgtttattgtgcagcccggtctttacattgtcaagcactgacatatccttgaaaaggcggatattctggaacgtacgcgcgattcctgccttgctgatctcaatcgtgctctttccggtgatttccgtgccatccagcacgatgcttcccgtatccggcttgtacacaccggtaagcaggttgaataccgttgtttttccggctccattcggtccgatcaggccgtagagctctcctttttcgatcttaatatcaaatccgtttacggcgcgaaggccgccgaaggaaattccaagattttttacttcgagcattgccattttatgcatcctccttttctgtattctttttgaaaaggcgtttcagcgagtaacgctcgcggaactgtcttgctgccgggctccagctgaacagcatgacagcaatcagcacaatcgcataaatcagcatacgatacttctgcatcgagcgcagcagctctggaaggatatacagaatggtcgctgcgatcacagaaccacggatatttccgatgccgccaagtacaacatatacaaggaacatgatcgacatattataaccaaattttgcacttgtcgctgccagagatgaataattatgcgcatacagtgcgccgcccattccggcaatcgccgcagaaattgtgaatgccatcagtttatattttgtaatatggattccgatcgattctgctgcaatacggttgtcgcggatcgccttaatcgcacggccgtctctggactggatcaggcgcagcacgataaacagtgagatcagaagcagaacaataccgatcgtgaacgttgcatctcttgaggttcctgtaattccctgcggtcccttgatgataactactccatctggttccattccaagtgacatggaatccttaatcgatacgtgaagaccgtgactgtcctttccaacgtacagaatattcaaaaagtttttgataatctcaccaaatgccagcgtaacgattgccagatagtctccgcttaaacgaagtaccggaattgcgatcagaaacccaaatacagcagctactgctgctccgatcagaattgcgagcgtaaaccgaagccacgtcatcggaattgcatcctttgccaggtttgtaaacagtgcgctcgcaaatgctcccacacacataaatcctgcatggccaaggctcaggtcacccaaaataccaaccgtcaggttcagggaaactgccatgatcgaataaatgcagaccggaacgagcaggccggaaatcgagtttgataccattccctgactctgcagcaccatcatcactgcccacgctgcaattactattccataggtcaccgcattgcttttcgctgtcttgtttaatttttttcccatttctgccacctacactttctcctgaatcttctttccgagaagtcctgtcggcttcacgagcagcactacgatcagaactgcaaacacaattgcgtccgccatctgggaagaaatatacgccttggcaaaaatttcaataataccaagcaggattcctccgatcattgcaccaggcacggagccgatgccgccaaatacagccgcaacgaatgccttgataccaggcatagagcctgtatacggattcagggacggatacgcggtgcacagaagaaaaccggcgatcgcagccagagctgaaccgatcgcaaaggtcagcgcaatcgtaccatctacattgattcccatcagctgggcagcgcctttgtcctcagataccgccagcatcgcctggcctgccttcgtcttattgataaagaggatcagacctgccatgatcacgatacaggccacgatcgtgacgatcgtaacggaagagatcacaagatttccgtctgccagagaaagtgccggaagtgtgatccggttcggaaaagatacggtatccgcaccaaagatcagaagcgctatgttctgcagcaggtagctgacaccgatcgctgtgatcagaactgccagcggcgaagaagcatttcgcagcggacggtaagccacacgctcaatcacaacgccgagtaccgtacagccaaccactgccacaaggattgccgggattaccggcaggttcattacatttaatgcattcaatacaacgaatgctccgatcatgataacgtcgccatgtgcaaagttcagcatttttgcgattccgtataccattgtatagccaagggctatgatcgcatagatgcttccaaggctgacgccattgataagataagaaagaaagctcatattggcacctcacatttcaggttttatttcagatcctttttgatccgggccggtatcacctggttccagacctgatagcctttctggttaaaatggagctgatcactccggtaaagctcttttcgcagttttccattctttaaaagatacggtgtgcagtgaatgaatgaaactccggaagttttgctgcagaagctgctcaccgccttattgcagatttgattctccttccacagattccatcgtctgatcgacggcgcaatggaaatatagtagatcggcacacccggaagctttgttttcagccgtttcaaaagcaggcaggcctgagccgccgtagcctttccgctttttcctcctgcaatatcgttggacccaacgtatacgactaccgctgatggtttgtagttcacgatcagcttctcgtacagtgtcatccagtcctgtattgttgaaccgccgattccgttgttgaccgttttcaacggagcaaacgccgtggatgcactggtccagtactcgatgtaagaactgcctgccagaaccacacgtccctggtttttggcaggtacgttttttttctgcagataattcggcatccattctatgccggtgcgatacaccttcaccatacactggtatgcttttccccggtactttgctgtgatcacacagcttcccgcacgccttccggtcacagttcctgtgctgcttaccacagctgtttttgcattagaactgctccatgtcaccttcccggacacattctgaagcttcagtgttctggtatgtcccactgtcacagaaagattctttgcactgagcaccggagctgctgcccgtacctgcagtgcagacagccagaaaacaatacacacacacatcagaagcagaatgtaccggaatttctttgaaattgtagtttccccggtcaagatcctgtttcccctctctttgattttcatgatcctgatcaaagcggatattcccggtccgcctcgccacttgctatgcgccccgttttacagaagaacttctgctctgctgtaaaacggggagtacagactgcagataccggatcatgaacagacacagccgggctggttcacccggggctgcgaaagaaagccgctgcagaaatcctgcagcggctgcatcattgcaacgaattacattgctgcgtaagcgccatctgtgatcttaacagccttcggtgccttgttcggctcgccgtctgctgtccaggtcattccctcaccggtcagaccgtcaatggagatctctgtcattgcaacttccattgcatcacagatatcagaagcactcatatccggagttacgccggatttctcgatcgctgccttgattgcatacattccatcgtatgcatctgctgcgaactggttcggcgtatcaccgtaagcttctttataggctgctacaaacttctgagtcagctcatcgtctgcatctgctgcaaacggtgtcagaagcatgacgccctctgccagagaagtatcaaagccttccacattcagaagtccgtccagaccgtcgcatccaaagaacatcggagcgaatcccatgccgtttgcctgtgtcagaatcaaagaagcctccgtatagtaaatcggaaggaatacgagttctgcaccggcatcctttgctttctgcagctgtactgtgaaatcagtcttgctgtctgcggtaaatgcctctgcagatacgatctcaagaccctgatttgctgcctctgctgcaaatttctcatagatacctgatgaatatacatcagagctgtcatagatcacaccgatcttggttgcaatcttgttctcgccgatatactgagcggatgcagtaccctggttcgggtctgagaagcatacacggaatgcattcggattctgaacacattctacagcagatcctgacggggtcagctggaacatgttgtcatttgctgtctctgctgctaccgcaatacaaggagcagaagtaaccgttccaagcagcatctgcatgccccagtctttcaggctgttatatgcattgactgatttctctgcatcatgctcgtcatcctcaaactgaaattcaaactgaactccaccgagcgcattgatctcatttactgcaagctccgtagcgttctttactgcctgtccgtaaacagctgcaccgccggtcacaggtccgattccgccaactttaaatgcatcgccatccgcaaaagccgttgtggaaagcagcattgctgatgcgcatgccagactgactactttgacaaatttcttcataataatctcctccttgaattttcctgaaataaacaaagagccgcagaaacacggctccttgtgctttcttagggcaatcatacccactttgtatgtgtttgtcaagaattttcgcgaaaaatgttatggcaagcagctacatctgtccgcctgctatagacatttttttataatgtttcagacgtatttacatgtttcgggccggctctgctgctatctgcccaaatattccttattataaaacattttttcattgtattgccatctttttttccggaatctgaacagagacttaactcttctgtctgtttgagaaaaatccttccggcttccttacttacatctgcctgcggaattaatacgctttgccccagtataccatctttgttgccggcctgccgcagtaaatacatttatcggaaagctgctcctgatggaacgggatacagcgggatgtcacgccaaactcttccttgatcgcatcctcgcactcctggcaaccgcaccacattgccttgatgaagcccggtttctcatctgcgatcttcttaaactcttctttttcggttgcctcgtacgtatgcgcgtctctgtgtgctcttgcacgctccagcatatcatgctgctcctgctccagcacctccgctatcttctgcggaagctcctcaatcgccgctgtaatcttttcgcgggtatctctgcgcacgatcactgccacgccattttcgatatccttcggtccaagctcgatacgtaccggaattccgcgcatctcctgttcagagaatttccatcccgggctcttctcggaatcgtcgagcttcacgcgaagtccgctttttgcaagtgcttctttgatctcgtttgctttttccagaacgccctcctgctgctgacggatcggaatgatcatgacctgcgtcggtgcaatatgcggcggaagcaccagtccgctgttgtcgccgtgtaccatgatgatcgctccgatcatacgggtcgtcatcccccaggaagtctgatgaacgtatttgagcttgttatctttgtctgcaaactgaatgccgaatgcctttgcaaatccatcgccaaaattgtggctggtaccggactgcagtgcttttccgtcatgcatcagggactcgatcgtgtatgtcgcctctgcaccggcaaatttctctttgtctgtcttgcgtcccttgataaccggaatagccagcacctgctcacaaaaatcagcatatacattcagcatctgaatcgtacgtgcctctgcctcctcggcagtcgcatgtgcagtgtgtccctcctgccacaggaactctctggaacgcaggaacggtctcgttgtcttttcccatctcataacggagcaccactgattatagactctcggaaggtcacgataggaatggatatcattctgataaaaatcacagaacaatgtctctgaagtcggacgtacgcacatacgctcctgcagctcttccagcccgccgtgtgtcacccatgcaacctccggtgcaaaaccttctacgtggtccttttccttctgaagcaggctttccggaatcagcatcggaagatatacattctctacgcctgtctccttgaaacggcgatccagctcatgctgaatgttctcccagatcgcatagccagccggtttaattaccatgcagccttttacacttgtgtaatcacacagctctgctttttttacaacatccgtataccactgcgcgaaatcctcatccattgaggtgatcgcttctacaagcttcttttcctttgccattttttcttctcctttttccatcatggtagtgtcaaaaactacctgtttttttgttttaaaatcttttaaaaaccttgat

SEQ ID NO: 616 - DNA, 10253 bp, Unknown
  16S sequences of unknown bacteria
ccccaactgatgcctacgaattgctccgctgcgaagcagctcccgcaattctgcatcatcataaaatcgcaaaaaaacagttgggatatttacgcctcatacggtgcaaagtattccaactgtttttttatttgtctattattgcagtgccattttctgcagcttctccttataactctctcgtctttcaggcgcaatctccagcatatccattgcttcgtcagcagtctttccaaacttccgcatcaccacttgaagcatatctaattgcgtctggatttcccctctgattttccctttttcctctgcctcttcctgtagccttctcttatactcttctgccgtcatatagtccgcctccacagtctcgctgttcttcagagtattgatctttctatacatctcctgaatacgcgggtcttcggacagatgtgcttcttccgcagtgctgttctctacaaagcgaagaaacgctatcaattccggctctgccccagtgacatcccttccttttgtgttcaggaatacgacagttaggccattctgcaaaatcagccctggatcctcatcacagtgatagcggaaacgataacggtatctgccttctttgaacaaatcgaaaccgcaaatcacgataatataggtctccggtaacttatcaaactgcctctctcccttttccagaagcggcgcatccagtagtgcggaataatagcgtgtgcgcttgggcaagttcccatcattttgcttttgcatctctacattaaagaccgttccattgatatccctgacatagaaatccagccggatgccacgcttccccggaaggttgtgaatgaccttctggttttctttccattgaatctcctgaatccgaatgttcagagatagctcaataatggatttgcatgtctctaagtccatcgtcgctatgtcaaacatatagtcatcaatcaggttcagatcctgcaatgggcgatatccttccgatgatgtaacaaagtcaatattctgttgtgttgtcttactttcttcggttttctccaatccgtttctcctttcactatagcatgtttgggtaaaatcagcaacggggtgcgcacttgtattggtcttttattggtgtattttcttattttccgaaaagatcttttttgttttagatatatctctttttatagtattactttttattcttgtttgcaactttttgtgttttaatttcacaaatccataatcatttttctatatctgataccgcttcgccagcagatagacggagctgaacacgcgaagcagcccgaactgcttgagcggaagcgcgatcgcctgcccggtctttttctcatagccaagtggaatccgaagctcggtctgaaataccagttgataattatgatacacaccgatttcataaattaaatcctttcgtttgccataggtagttcatccctgcgctttacaagaacgtcaaaaagcctctccgaaaatgaatttttctctcatcttcggaaaggctctctttttcttccgtttttccaaatttttgtgtcaggaagcgcatctttatatagactttctgccgcgtttctgctattctcattataaattttcgaccgccgacagattttaactgacatcctacaggcagtgtacaaaagactatgtaaatacaaaattcatacagcctggacgcatcaggcttccgggccggaagggagaaatcagatgggtgacgtgaaattataccgaaaacgagtgataccagaagaatgtctgcttcttgataaggacgtgatactttaccgggatccggaagtgattattacaaagtgggacacgattcacccgaagaagacgctgcaccacggctactcctgctattttatagaccgcggcttcaaggtcagcaagttttatgaccacgacgggaatctgatcagctggtactgtgacatcatctgccacacctacgatccggagacagagacctatgtctttactgatctgctcgcagatgtcatcgtctacccggacggcttcgtgcgggtcgtggatctggatgagctggcggatgcgttccgggatcggctcatcacagccgagcaaatgcagatggcactgcgcaggctggacaagctgctctccctcatttataaaggtgcattcccgaagctgcaaaaatatatcgaggactatgaagccatggatacgggcaactgatggcttaacggttcttttcttcccactccggatactcgatcttcacgagccgcagcccctgtggcggtgcggtctctccggcacgcccgcggtcctttgctgcaaggatgtccgggatctcttccggtgcgatcatcccgccgccgacccgaagcagggtgccggtgatgatgcggaccatattgtagaggaagccgttgccacggatgcgcaggatgatcatatctccgctcctggtcagatccagctcatagatcgtgcgcacgtggttcgtcacctcttcctttttcgtacagaagctcgtgaaatcatgcgtcccgaccagacaggacgcagccttctgcatcttttcaaggtctaaatcccagtaatagaaaagagaatacaaccgctcgatcggattcggaaagcggcggttgcagatccggtattcgtaggtcttgaccgtctgctggaaacgcggatgaaaatccggcggcacctcgcaggaatcctgtatccggatatctgccgggaggcgtgtattcatcgcataggagatgcggtccgctggcatcctggcattcgtatcaaagaccgccacatttccatccgcgtggacgccagagtccgtccggctcgcaccgatgacatggatctcctcttttaaaagctccgtaagatgacggttgagcatgctctcgatcgtctcgccattcggctgcacctgccacccgcagtagttggtgccatcataggcgacaatcagttttacacgtttcatgacagcttccctttccgtttctaccagtgaagcactgacatcaccagtgtctcaatcacatttacccggctcgctataaacatcacaatcaggtacagcagcagtatgagatacgccatatgatcccggctgacatacacaagcggcttcatttttgtacgtccctcgccgccgtggtatcctcttgcctccattgccatcgccagatcattcgccctgcggaatgcggagatgaacagcggcacgaggagcggaaccatattttttgctttctgcatcagattgccggactcaaaatccgcgccgcgcgccatctgcgccttcatgattttatcggtctcatcgagcagaatcggaatgaaacgcagcgcgatcgacatcatcatcgcgatatcgtgtaccggaacgtgaagccttcccagcgggcgcatcgccttttccagaccgtctgtcagattgttcggcgtggtcgtcagtgtcatgacggacgagccaacaatcaggtaaacgaggcgaaccgccatcgccaccgccgtctcgataccctcccgcgtgaccgtcagcttccagaaatgaacgaccggcgtacccggaatcaggaacagattaaagacgaccgtgatcagaagcagcatgatgatcgacttcaggccgcgcaccataaagcgaaacggcacctttgaaatgcggatcacagctgccagcgcgagtgtcgccacaatatatgcttctatagaatgaaaagcaaacagggagataataaacaccatcgtgcctgcgagctttactcttggatccagtttatgaatgacggaatccgccggataatattggcctaatgtaatatctcttaacataattttctccattcacctttgtgcactgcagcaccttgacccgtctgcggacagaccagtcacctgccaaggcagcggtaaatcgcatccgcagcctcctctaccgtcgtcgcatccacatcgacctcccagcccgcagccgcgaggtcgtgcatgagatacgtcacctgcggcgcagccagtccgatctcctccagctcgcggtaatgccggaacacctctcttggcacgccgtcaaaccgcacctgtcctttattcatgacaatgatccggtcgacgtaccgcgcgacatcctccatactgtgggaaacgaggatgactgtgatatgccgctcctcatgcagacgcttcacctgatccagaatgtcatctcttcccttcggatcaagccccgcggtcggctcatcgagcacgagcacatccggctccatcgcaaggatcccggcgatcgccacacggcgcttctgtccgcccgaaagctcgaacggcgactttttaaaattctcctccttcagtccgaccagccgcagtgcctcatacgcacgccgctcgacctcctcctttggaaggccgagattcttcgggccaaagcagacgtctgtaaatacatcgatctcgaacagctggtgctccggatactggaataccagcccgaccttgctgcgcagctccttcatattgtagccttcgccgtaaatattcgttccattataatagatagctccgctcgttcccttcaaaagcccgttcagatgctggatcagggtcgactttcctgatccggtatgtccgatgacgccgatgaactgtccgtccgggatctcaaggttcacatcctttaatgcatgcttttcaaatgcggtgccctcactgtatacataatttaaatggtcaattttaattgccatgctgttctgtcctttctgcggatgtcgggcgcagcttttccagctcctgctcgagctcccgcatcgataaaatgccatccggaagcggcacaccctttttctgcagctcatatgccaccagcgtcgcctgcggtacatccagccgatagcccttcagctcctccacgtgggagaaaacctccttcggcgtgccctgcatcacgaccctgccctgatccatcacgataatcctgtcggcctcgatgacctcctccatatagtgtgtgatcaggatgaccgtcacgtgctccttccgattcagctcctgcaccgtacgaatgacctcccgtctgccactcggatcgagcatcgctgtcggctcgtcgagtacgatgcatttgggctgcatcgctactacacccgcaattgccacgcgctgcttctgtccgcctgagagcttattcggcgaatggtcgcggtactcccacatgccgaccgccttcaggcttttctctacgcgcttccatatctccgctgacggcacacccatattttccgggccgaatccgacatcctcatcgacgatcgtgccgatgatctggttgtccgggttctggaacaccatgcccgcactctgccggatctcccacagcttcgattcatccctcgtatcctttccgtccacatagagcgtcccctcggtcggaatcaggatcgcattgagatgcttcgccagggtcgatttgccggaaccattgtgtccgaggatcgcgacaaaatcaccggccttcacatccagatccacgtcatccacggccctgatcatctcttcgacatttccctcttcgtccagcttctgatattcatatgacagctttctgcctttaattatattcatattctgtcctctttgatccgccgcgatatcctggggatacagcccggatcattttttctctgcctttttttgcaaacgtcaaccaccgaaccggtgatattgaccgtcaaacggatattcggtcgcttcgcgacctgcgtcaaattatagcaactacatagtgaaaaagcaaggatatatatgattttccgcgccggtaccggctccctgcctgctgctctgtgcaacagaagcaggagactttcctgattcgctcaaagaagtcaaaataacgtagttttgagtcaattttgaggtagatttttctctcttttggaattatactgtaacttagaattatactgtaacagacacaactcagaagtatcagcggctgcctgggcagtcgactatggaggtaagaatgatgaagattggaaatgaaacaaaggcctggtggaaagaggccgtcatttatcagatttatccacgcagctttgcagacagcaacggagacgggatcggcgatctgaacggcatcacggagcacctgccgtatttggaaaagctcggtgtcgacgtactctggctctccccgatttaccagtccccgaacgatgacaatggctatgacatctccgattaccggaatatcatgaccgagttcggtacgatggaggactttgaccgcatgctcgccgaggcgcacaagcatcatctgaagatcgtgatggacctcgtcgtcaatcactcctccgatgaacacgcatggttcatcgagagccgcaagtccaaggataatccataccgtgactattatatatggaaggatccggtcaacggcaaggagccgaacaactggggctcctgctttggcggttccgcatgggagtatgacaaagcgaccgatatgtactatctgcactgcttttccaaaaagcagccggatctgaactgggagaatccaaaggtgcgcgacgctgtcttcgatatgatgacctggtggtgcgacaaggggatcgacggcttccgcatggacgtcatcagcatgatctccaaggatccgtcctatccggacggcccggtcacagacgggctgtacggcagcttttctccgtatgtctgcaacggcccgcacgtacacgaatatctgcaggaaatgaaccgccgcgtgctttccaaatatgacctgctcacggtcggcgaggccggtggcgtcacgatcgaagaagcaaaaaaatacgcaaacaaagagcagaccgagctgaacatggtcttccaatttgagcatgttgactgcgtaccgggaccgatcggaaaatggtccgatgaaaagccgaagctctccgcattccgcccgatcctgaacaaatggcagtatgagctcgagggcaaggcgtggaacagcctgtactgggacaatcacgaccagccgcgtgtcgtttcccgcttcggcaatgattccgagcagttccgcgtcgtctccgcaaagatgctcgcgacctgcctgcatatgatgaaaggcaccccatacatttatcagggcgaagagatcggaatgacgaacgtgtacttcgaccgccttgaggactaccgtgacatcgagagcatcaacgcctatcaccagtatgtcgacagcggtctcgtcgccccggagaaaatgatgagctatctgaaattgatcagccgcgacaacgcacgtacaccgatgcagtggaacagcagcaaaaatgccggattcacgaccggaacgccgtggatcaatgtaaatccaaactacacggccatcaacaccgaggcagccctcgcagatccggattctgttttttactactaccagaagctgatccggctgcgccacagcctgccgatcgtcgtttacggtaccttccacggacttttggaggacagcgagacgatctacgcctacacacggacactggatgaccagacgctgaccgttgcctgcaacttcaccgataccgagcagccgtgcgacttattcgaaaacggctttagcgaggagctgatctccaactacaaggagcacaaggcaggtgtactgcagccgtacgaggcgcgggtggtccttaactaagataatttgacctgatgctaggatcacaagttcaaaagccgttcatgcttgcatgataaggcttttaaacctgggatccaccaaacatgagaaagtagcgatttacgtagtaaatcagcggatttcgaatgtttgtagaattgcggtagctgcttcgcagcggagcaattcgcaggcatccgttagggactctgaagaaactgccccgacatatttatacaggaggaataatataaaatggaacgtaaatggtggcataaaaaagtagcatatcagatttatccgaagagcttctgtgactcaaacggcgacggcatcggcgatctgcgcggcatcatcagcaagctggactatttaaaggagctcggtgtcgacatcatctggctctccccgatctactgctccccgctggccgatcagggctatgacatttcggattactacaacatcgacccgcgcttcggcacgatggaggacatggaggagctgcttgcagaggcaaaaaagcgtgatatgcacatcctcatggacctcgtcgtcaaccactgctccgatgagcatgagtggttcaagaaggcatgcgaggatccggacggaaaatatggcaaatacttttatatcaaagattacaaggacggcaagctgccgtgcaactggcgctcctactttggcgggccggtatgggagccgctgccgggacacccggacaagtgctacctgcatgtcttccataaaaagcagccggatctgaactgggaaaacccggagcttcgtgaagaaatctataccatgatcaactggtggctcgacaaaggccttgcaggcttccgcatcgacgccatcatcaacatcaaaaaggcacttccgtttaaggattatccggcagaccgggacgacggacttgccccgatacagttaatgctcaaggaagcgaccggcgtcggcgagtttctcggagaaatgcgcgaccgcacctttgccaaatacgatgctttcaccgcaggcgaagtcttcgacgaaaagccgggtgaccttccgctctttatcggcgacggcggctacttctctaccatgtttgatttcaatgagacgaccttcggtaaaagtgacctcggctggtatgctgcgacccgcatcacgccggacgactaccggaaccgctgcttcgagagccagagaaagatcggcgacatcggatttctctcgaatatcatcgagaaccacgatgaaccgcgcggcgtttccttctatattccggatggtgaagtgactcctacgagcaaaaagctgctggccacgatgaatgtcatgctccgcggacttccgttcatctatcagggacaggaaatcggcatggaaaatatggaatttacttccatcgaccagatcgacgacatcgccactctggatgagtacgaagtctccataaaggccggactgactccggaggaagcaatgaaggtcgcttccctccacagtcgcgacaacgcccgcacaccgttccagtggaatgacaaggcacatgcaggcttcacgaccggcaccccgtggcttacggagaacccgaactacacacggatcaacctggaaagccagcgaaacgatccggactccgtttaccagtactaccgcaagctgacggcacttcgcaaaaatccggagtacgccgagactgtcgtatacggcgagtgcatcccgatatgggaggaccgtcacaacctgatggcctactaccgtaaatcttccgagaaaacgctgctcgtcatcggcaactatcagaccgagccgcagaccgtcacacttccgcaggagctgaaaaaggtcgtgctcaacaaccttccgacactcgtaaaggatggcaaaacgctcaccctcgccggataccaggcagtcgtgctggaggtatagaaagcgcaggcaagtcccaacccactgcttattgctttgcacaattgaagcaggggacttgcctgatccggttaaaacttgagaaaacaaaggaagtcattattatgaatgagcagcatttttgtcagtctgtcaccggcatcgtcatccgcgaccataaggtactgctggcccgccacacctacggtgtcggcaagaaccgtctgatcgtgccaggcggctatgtggagccgggtgagacaccgcagcaggctctgaagcgcgaatatatggaagagaccggcatcgtcgtcgagccgaaggagctcatcggcatccgtttcaatcagaaggactggtatgtcgccttctctgctgactatgtatccggacacgccgtctccgaccacaatgagaacagtgaggtcctctggctcgacatcgatgaggcccttacccgcgaagacgtcccggatctgaccaaaaagctgatccagtgtgcactccacaaggaaaacggctttgtgcagatcccgtatgacggaacgcggcgctacggagaatattccttttacggaatctctttttgaacgcagataagcattcccccgcttcaagtgcgcggagcactaagcggcgggtgaggggggatgcttatgtc

SEQ ID NO: 617 - DNA, 14554 bp, Unknown
  16S sequences of unknown bacteria
gcccaccataatgacgtcgccatgcgcgaagttgagcatcttcgcgatgccgtaaaccatcgagtagccgagcgccacgagggcgtagacgcttccgaggttcagtccgtctattatcgttgtgaaaagaatctgcattatgtagaccaacctttcagatgacatttgacacttaggggaaaattgtttctgatgctcaggtccccgaaaaactctcagacatctgagcaccagaaacaacgggagaaccgcggcttttttaaccgcggcagaccctgtcctggccgggattatatatcgtctcccgattatgcgggaaagctgttgcgccggagcgcaacagtctcttccctgagatattgctttgagctgacagcctcgactcagtgtttactgtttactgagcgacatactgaccgttcacgatcttcgcgaccttggcgtccttctgcggctcgccgtcggcgtcaaaggtcatgtggccggtaagtccgtcaagctctgccgagtgcatagcctcaacaagctttgcgttgtcaagctcagccgcggaagtgacgccagccttctcaagcgcgagcttcacaaggtaaacagcgtcgtaagcgtcagccgcgaactggtcaggcgcggagccgtacttctgcgtgtacttctcggtgaacgacttcacgttgtcagccgcgtcggtcgagacgaaaggagtgaggtaaacaagtccctcgacgagctttgcgttgtcgccggtgaggtagttcaggataccgtcaagtccgtcgccgccgaacagcgggaggttaacttccttctcgttaagggtgataacgatctgagccgccttctcagcgtagatcggcatgaagaggaaatcagcgtcggacgccttgatcttggttacctgagcgttgaagtcggacgcgtccttcgcgaaggaaacatcctcggagatggttccgccgagctccttgaagcgctcaacgaaagcctgatacataccggtcgagtagtcgtcgtcctgattgtggatgacagccgccttggtgtagccgagaccgtaggtgtactcagccatcgccttgccctgaagcgggtcggtgaagcatacgcggaaggtgttcgggttcacgttagcctcgatagcggaagcggaaggagttatctgaagaattccgtccttcgcgacaaggtcatttatagctatggacgagccggaagtgaccgcgccgacgagtatctgcatacccttgtccataagagtctcatacgcgctcttggtcttcgcgccgtccgcctcgtcatcctcgaagatgagcttcagctttacgccgttaacgccgcccgcctcgttgatctcgtcaaccgcgatctgagccgcgttgcgaaccgactgaccgtaagtcgccgccgtgccggtaagcggacctacgccgccgatgacgatctcattacctgaagaaccgccgcagcccgcgagagccatggcaagcatcatgacaaccatagcggctgccagaaatctgactgcctttttcataaaaatgcctccaatttaaattttggtgtcgggagatgtctcccaagtccgggtattgaactttgtcaaaactcaaactatgagtatattttactaccacttttcccgattgtcaacaggtttcactaaaaaactcccatatgaacaacacggtgtgccggcgtgaacccatgatttgcgcgttttgaacaatttctcaggcgcggataagggcgcaaagacgaatgaatacggcgtttccggaattctcagtaaaaattatcgctctttgctgatttcgcgatattttttacggcttttgccatcaatttcaactttgcagcaagtatccataatttacatcattttctatttatggatacatatgtgccggttttgttgaaactgcatattaacatgataacacggtacaatattatcgttacccgttttcctgttccgggacaaaaaaaggaccgctccgtgtattgaagcgatccatatgtaacgcttatgctttcggcaggctccagcggaacctcgcggcgagaagccttatcgcggtgacgacgatgaatccgatcagcattgccgcgctctgtccgacctgtatccacacgagcatcgccgcgagagcgccgatcagcgacgcgcaggcgtagatatgctttacaaagatataaggtctgtccccggcgaagatatcgcggagcactcccccgccgacaccggtcacgaccgcgacgaacagcacgagaaagtgatttgagatatacccgcactcaatcgccgtcctgacgccgcagaccgtgaagatccccagccccgccgagtcggtgacgagcaggatgaggtcgaacgccttcttccccttcccttcgtgcagcgtcctgtgccgcctgaagacgaagaacacgacgatcgacaccgcgaaggatatgacggcgtaaaccggatccctgaacgccgcgggcggagtgacgccgagcacgacgtcgcgtatcatcccgccccctgtagcggtcgtcagcccgagtatacagacgccgaagatatccatcttcttggcgaccccggtcatcgcgccggagacagcgaacgccgccgtgcctattatctcgaaaatgaagatgaaaagctccaatcttcccctccgcgagtgattatctcacctttacgagctcgtactgttcggttccgacgccgagcttctccgcgtggtcgagcgtcactctccagtttgtcgccggggaggtcgcgtcgaagcgatcctcgtgcgtgtcgatgacgccgtcatgaacgtgcgcgccattcttcaagaggttctcgccgaggacagagtccgcgtaagccggagcggcgttgcaggcgtccgcgcacgccatatcgagggcgaccgggtcgaaggacgcgaacattccgatatccgggatgatcggagcgtcgttctcggggtggcagtcgcagtacggcgagacctgattgacgatgcttatatggaactgtgggcgtccgtcgacgacggccttcgcgtattccgccatcttccggcagagatcctcgttcgcgctccccgcggtctgaccgatggcttctttcttgcaggcgtggatacatcttccgcagcctacgcactttgtctgatcgaccgtggcttttctgtcctcgccgaacgatatcgcgccgtgagcgcactcctttgaacacatacgacatccgacgcaccttgatttatccacctgcgtcttgccgccattgtgctgctccatctttccggctctcgagccgcagcccatgcctatattcttgagcgcgccgccgaagccggtggcctcgtgtcccttgaagtggctcagagagatgaagacgtcggcgtccatgatcgcgcgtccgatcttcgcttccttcacaagctcgccgccctcgaccggaacccagacctcgtccttgccggtgagtccgtcggcgatgatcacctgacatcctgttgtgagaggcgaaaagccgttctcatacgcggcgtcgagatggtcgagcgcgttctttcttctgccgacgtagagagtgttgcagtcggtgaggaacggtttgccgccgttttccttcacgacgtccgcgaccgccttcgcgaagttggggcgcaggaaggagaggttgcccggctcgccgaagtgaatctttatcgcgacgaatctgtccttcatgtcgatgtccatgatccctgccttctttatgagcctctggagcttcattagcagattgtcgccgctgccgacacgcatatcggtgaaataaacctttgacttttccattgtgaatttcctctctttatagtttaattgacgaaaaaaacgagcccggagaaaacgccgggaatcgcatattataatgataccgcagcccgcgccgtttttcaagctcgtgatgtaaacttttttagaagaaaaagaccggacgccctgaagcgcccggcagcatgacaactcacgccgcgtccccgccggagatatcgctgacgctgacgcagactctgtgctcgaccggctcccatccgccgccggtaaacagcgccgagacgcatacaggcaggtaagtcgccatgaagagcgggaaggtgaatacatacatgattttctttttcgccgcacagcggattctcttccattccgccatcgtcgtgaccgcgccgagagcggcgagcccgatatacccggagaccgccggaagcataagcgcgaccacagccccgataacatcccgctcgcacaaacgcacaaccgcagcgccggcgcccatgaacatccccgcgaagcccgcgacggccccggagagcatattcacgatcatgtcatagcaggcgaaatcacgcgggcatccccggagaagccgttttccgtatttcgcgaagacctgaagacttcccctgacccagcggcgcctctgtctgaacgactgaacaaggtcggtcggctgttcgtcatagagcacggcgtccggcgcgtaaccgatccgctccccggcaagaaccgactccgctgtgaactgtatgtcctcggtgagcaggaagcagtcccatcctccgcgccgctcgatgagctctcttgtgaaggcaaatccggtcccggagaccgccgcgctcgtcccaagaatatcccgcgcgtgattgagcagtctcgactcacggaggaaccagagcgagtagcccgccgatatccagttgtctccgaagttcttcgagttcctgtacccggtgacgatatcacaaccgcccgagagagcctcgttcatcgcctttacgtagccggagtcgagcagattgtccgcgtcgaggacgaggaacgcgtcgtaccactttccggtaacttttatcttatcgagcaggaaacgcaggacgtagccctttcctatgtgcgacgtgtcgtttctgacaaaaaccttcgcgccgtgcgatagcgagaccgccgccgtgccgtcggtgcagttgtcagccgcgacgtagacgtctataagcccgtacgggtaatcctgagccttcacgctgtctatcagctgtccgatgaccttctcctcgttcctcgcggctatgaggacggcgaagcggcggtttgtcctgtcatgtgtcttctttctgctcttcccggaaatgagcgacacggcgatataaagagtctggtacgcgcagagcaatccgaaagctatcgcgagaatcgtcccgcagacctcaaaagcgttcattccgacacctccgcggcgccgccggtctcctgtgacgaaacggcattatcgtgggacaaatcggcatcaggttgtgatgaataagcattatcctgtgatgaaacggcgttatcctgtgacgaaacaacatacccgtcatcgaccggaaccacttccttcttcggcgcctcaaccaccgggaatctcagcgtcaccttgaaaagatcaccgtcgacagtcagactgagctttccgttctggagctcggtgaggctcttcgctatcgacaggccgagaccgttgccctcactgtttctcgaggcgtcgccgcgcgtgaagcgctcaagaagctcgtccggcgagatgtcaagcggctcgcgcgagatgttcctgaaggacacgaccgcctgattcccgctctgctcgagggtcagccagacacgcgtcgacggcatcgagtactttattatgttcgagagaagattgtcgaataccctccagagccgccttccgtccgccattatataaacgggcatcgacgggcgtctgacgaccggctcaagcccggcggcgcgcagtctttcctcaaactcgccctccgcctgtatcagtaaaaccccgacctcgagcggcacgagggacacttcaaggtttccggtagccgccttcgacgcctcgacaaggtcgcttatcagccgcttcagccgctccgactgacggcgcaggacttcggaatattcgtgtatcttcgggttgtcgcactcctcgcggtttataaggtccgcgtagtttatgattgacgtgagcggggttttgaggtcgtgcgagacgttggttatcagctcggtcttcatccgttcgctctttattctctcgtcgacggctttggtcattccctctccgacgcggtcaagctcgtttgcctgacgtctgaactcgcctatcaggtatttcttgtcggtcttcgcgtcgaggtgtccgtcggcgatacggcttatgttctttccggtcttcttcacagcgatcgcaacgtataagactacggggaacaggaagaaattcaccgcgaaccagacaaagaggattgtgccgaaatcggttctgtagagagaaccctccatgaacacgagcacaaggagcgaggcaaccgcgtaaatcacaaacgtcctccatacagacggaatcgcccggaagagcgccgcgaaaccgcgcccgatcgcccggagaatgtgccagatgagcctcagaatacgataaatgagcgtgtttttccaccatttcccgagctttatcctgaccgcgaagctcatcatccacccgaggacgagcatgaacccgacgataaccgccgccgccgtgagaaccgcaatcaaccagccggagttcgagtagcagtactcaataatgaatccgatcatcagcatgacagccgaagcgacagcggcggtcagaatgtcgaacgggacagcggttccccacccggcgcggggtttattttcgcccttgtgccgtcctgagctgacaaggaggaagaccaccgtcacgacaagtagtatcgccgatatgatgactatcgggtagaccgcgtatctcagcgagcaggcgagatgaacgaggttcgcgagctggctgaacgtgtcgcccgcggtaaaatccttcgcgaggtagacttcaacactgtaccagttgcccggatagccgaccgtcgtctcgaagcagtaaccgtatgccgacgggttcctgtagagcgtcgtcccggcgacgtcggagtagctgtagagcagttcgccggcggcgtcgcttatggaaacgccgattatgttcgtgctcttcatgacacggcgcatctcgctgacgccgtatctgtagtttgattcgtcctcttcgtttttgaggtacgagtcgtatatccttccgaactcgtactgatagctcgtgaccgcgctctcgagcaccgtctcgacggcggattcctccgggacggtatagaaatcgttctcgagcatgagatacgcgccgagacagccgcccaccgtgatgacgaacagtatcaccgcgaggatgaacgccccgaccttcgcggcgaggtttccggtgaagccataggttttcgttgtttcttccatgatgctttcctttcacaaaattcatccgccgcgtccccggatgaatccgtgaaacgctacggtttgagtctgtagccctgtccccacaccaccgttatataccgcggttcggcggggtttatctcgatcttttctctgagatgccgtatgtgcaccgctaccgtgttctcactcccgagcggtgagtcatgccagacctcgcggtagatgtcgcgcggggagaagacctttcccgggttcttcatgaacagcctcaggatatcgaactctgtcggcgtcaggttaaccttctcgccgtcgaccatgacgcgcttctcgcggtcgtcgagctctatcccgccggttttcagcgtctcgtcgtctctcctgacatttccgccgagctggaggtagcgcctcaggcaggagcggacgcgggctatcacctccgcggggttgaacggctttgtcacatagtcgtcggcgccgacgttgagaccgagaatcttgtcgctgtcctcgctcttcgcggtcagcaggatgaccgggacgttgctcttttcgcggatcttcaccatagccgatatgccgtccatcaccggcatcattatgtccatgaggatcaggtggatctcctcacgctcaaggatatcgagcgcttcccttccgtttcccgcggtgaagattttcatgtccggacttgtgagatagattttcagagcgctgacgatgtccggctcgtcgtcgcagataagaatgctgtacatttccgcctccttgtgatataattatatcataaacgcgattaagaaaaaagatgtgaaaggattaagattttattaaggatatcaggacaaagcgggagcatcgcccccgcccctgtatattatcagaactccacggtcgccatgaccggataatgatcggacagccacagcccgtcctcccgcctgtcacgaaccgcctcgcaggagatacacttaacgctcctgtcagcgaagatgtagtctatctttatcggctcgcagcgcccgtaatcgtggaaggtccctccgacgtccgcggagatgtcgacaagctccccgcccttgtagttcgtcactgtcgttatgcagaggtcgtccggctccgcgttgaagtcgccggtcactatcgcgggcatcgacgagagaaggttgttctcgtcgagcttctgtagcatctgattcgacgccaggactctcgccacttttccgacatggtccgtgtgcatattatagacgcggaacggagccccgtccttcggcttcagcgtcagcacggtacagacgcgcggacagccgctctggtcgcccgtatagcgagaaccgggtgtgtgcggcgtcgccgacagccagaaggtctcaaggtcgcagagcgtgaacctctccttcaggaacgcgacacagaccgcctcgtcccctctgtccctgcctcttccgccgccgactatataatagtccggaaggtcggctataaggcgctcatacatcgccggctgaacctcctgcattccgataacgtccggctttatcgcgtcgaggcgctcctttatatacggcgcgcggaggaaaaactggttgtcgccgtcatttgtggtctgtgtgcgcatattgaatgtcattattttacaggtctgcattttcgtgattcctttcctgatcaatgattatttcggacagcgggcgcttcgggacatagtggattccgttctcgcggtagtactttgtgctttccttcgcctcaacgatctcccgtctctcgtccggttttccgatgcctatgacgagctggggaagaatgttttccgggagacggagtaccttcgccgtgtcctcagccctgaaggcgcctatcatgcaggacgcgagacccttctcgtgaactgccagagatatcgccatcgcgcatatcccgacgtcccgctggaacttcgacgggtcgccgaacttgtctttgtcgatgcagataacgatgaacgcggtcggtctgtgtccctcaggcggcaggtgaagctccgggagcgcacctccccacttcgtcgtcggctggacggcggagacctcctccggcttgtaaacgagcctgtacgagagcggctgaatgttcgccgtcgacggcgtcagcctcgcgcattccacaaacgacacaagctcatccctcgtgaccttacggctctcgtcgaaggcgcggcaggtgcggttgtctgtcagaatatccttcagcatttcatttcctttcctgaaagtccgcggctctaccggtgttttcgataaagccgcgaaaatactgtttactttatgagatcaagctttttgaacgcctcgagatagtgcttgcctatgaatctcgcgcccttctcggtcggatgaacgccgtcggcgcagaaggacgtcggctcgtcgccgacacaagcggcggcaaacagcccgtcaagcggaacgaagacatcggcgtactcccgcgcgagctttctcgttatctggatcttcgggtcgaggtcgacgtggaagaactccttgtccgggaccgggatgaggaactgctcaagcatgatgatcttcgcgctcgtctccttctttatcctctcgagtatcccgcggtagcactcctcgaagtactcgtgcggcatccagttcttctcagccgcgcggtgccatgtgtcgttgattccgatgagtatcgagatgacgtccggctgaatctctatcgcgtccttcgtccagcggtcgcgcaggttctccgcgcggttgccggagattccgaggtctatgaactcgaactcctcatccgggaaagcgtttcttatctcctcggcgctgtagagcggatagccgtatccgaggttgtggatgtcgttgtaatcgcgtccggcatcggtgatgctgtcgccctgaaacagaatcttcatggtggttttctccttgaaatcaaatatcagtcgaggacttttccctcgctgtcacaaaaaacggtctttatcccgtccttgccaaaaatgaatcccgagccggcaaaatagtcatgcccttcccgcttcgggagcgatccggtgacgaccgcgcaggggcttctgaatctctctctctcgtcccccggctccgcggtgtaaagctcgtgcatatgaccggttatcatcagctccggtctgaacctctcgccgagcgtctttgaccatccggaatatatctccggctcaatgtcgaaaataccgccgatcttccatgtgaacggaacgtggcagatcacgacgcggtgcgccgctccctcgccgaagccgccgtcgagcattttttcgagccatcttgtctcgcgcagtctgaacccgtggcaggcgacggtgtgtccgtactcggcgtggtcgtctgtcttgtcctctccgcagtcaagcactatcccggctatgtctccgagtgtgaagctatagaatgtgttgccgttcataaccggcgtgtgctcggcgaagttctcggcaaagaagccgcgcaggtcatgatttccccgcgagaagatcaccggcttcgtccctccggtcagggcgtcgcatatcacgtatatattatggaagttctcgatacgcccgctgtggtcgatcacgtcgccgttcaggatgaggaagtcgatatcgccgaacttcttctcaaactcgcggcaggcggctatcggcgcgtcggtcatgttgtgcgcgtcggctatctggaacgcgatggctttaccttttctcaccggatggaaatcgaaatcctcgcgcacgacgtcctcggtctccgcgaaatacggcttgcggtcgattatctttctgtagcagaccgaatactttcccgccctgtcaagcgcttccatcggtactgtcatcctgtgcgtcgtgacggacgagcggacaatgccgttcgattcgtcgaaatactcatctccgtcaacctcaacccacatgagcgcgggcgcggtcacctcaaccattatctggtaatcttctccgaccgcgaatacggcgggagctgttcttgtcagtctttccatttatatgtaatcctttgttatacaggcgcgaaacggcgtcttttttctctcacgcctattatactacattccgacggaaaaagcaagtcatttgaggaaattttccggacacattatttcgctcacgttgtaaatgtccttctttctcttcacggcgtagtcccaggcgagagccgtgccgctcttccgtttccttccggcgcggtcggcgaccgtgctttcgccgcggtaatagaagacgcagctgtccgcccagtctatcattatccggttgcgctcgacatatctcgccctcccggcgctccgcagctcctccgggaagaaggtgtcgtcatagctttgaagcaggtattcccggtattcctcgctgatgtccgggtactccgcgcggacgtatacgcggcggatatgcgggtattcttctttcaggtcggtcacaaccgagagacagatacggtcgaagccgctcgcgctgccgaagaggaacgtgtcggtgtcgaaaatcgttatgagcgctcttgcggatgcgcggacggcagtgataagatcaggggtcggggcggcgtctcggtgacctatgaaacagcaggtggtgggggaggcagacatagtgcaatacaatctcctttattttgatattatggttcttaaatcaccatatagctataataattataacgcttaaatcgtctgttgtcaagattattttcgatataatcttcactgcatggcatataatatgcgatagaattattatagaaaggagttgttattgttttgatcgacgataatttcatccgcgacagaatcacaaaactccgcatgaaaagaaacatctccgagtacaaaatgagccttgacatgggacacagcgcgagctatatccattcaatagcgtccggcaaggctatgccgtcaatgggcgagtttctttatatgtgcgattacctcggggtcacaccgtccgagtttttcgatgacggagtgtccgcgccattgtcgctgaaagcgctcatagacgccgccgatgggctgccggaagaggacatcgagatactgacgtcggtagccgaccgtctcgcgaagaaaaagaaatgaactacgaaaatctcatccgtgagcggataaccgagctcagggaaaagaataacatctccgaataccggctcagtctcgatatgggtcacagccccggatatatccgcgcgataacgtcaggaaaagccttcccgtcaatgggcgaattcctgtatatgtgcgaatgtctcggcgtaacaccggctgagtttttcggtgaagacacgcaggtcaagccctcactacgcaggcttgcggacaccgcgcgggaactcgatccggaagatctgtcggtcctgacggtgatggctgaacgattcaaggaataaggacgataagaatgatcgatgaaaaattcatccgcaaaagaatcacaaagctcaggatgcagaaagatgtttccgaatacaaaatgagcctcgacatggggcacagcggcagctacatcaactcgatagcgtccggcaaggctatgccgtcgatgggcgagtttctatatatgtgcgattatctcggggtctccccgtccgagtttttcgacgaggaaattgaaacgccgatcaaaattgccgagattgacgaaattctgcggaaactcgacgagagtgatctcgacctgatcctcacaacagcgaaaaggcttgcgaaaaaatgaaacaactgaacgagataatccgcgacctcagagaagaccatgacctgaaacaatcagatatcgccgggatcctcgggacatctcagcaatattattctaaatatgaagcgggaaagttcgagcttcccgtgcgttttctcataaagctcgccgattactacggcgtttccgccgactacctgctcggaagaacagcgtgcccgcgcggcactgatgacaggaacgctctgatcacaccggggtatccggcggataaattggtcgcggacgtaatgtccctgcccccggacgcgagggaggatgtgcggaaatatatcgctctacagaggaaggcggcggaaaaacagaatgatcgacgataatttcatccgcgaccgcataaccgaattacggatgcagaaagatgtttccgaatacaaaatgagcctcgacatggggcacagtacaagctatatccgctcaataacatccggcaaggcgctcccgtctatgggcgagtttctctatatgtgcgaatacttcggcataacccccgccgagttctttgacgagaacatccccgcgccattacagctgaaagaactgaactcgctcgcgggacagctccccgccgaggatatcgacgcgcttatcgcggtcgcgaaacggctcgtcagaaaacagaaataatttctgattatcgtcttatttcaaaaatattttttcaccgttttgccttaaccaaacttttttctctctcgtttattttcctttattttgtcatatcaaaattggtgcaaaacgactattgacaaaagctttcctgagtggtataatatttacacgataaaggctgtgacgaagacggtcggaaaactcacgcttcagagagccggtggacgctgtgaaccggtgctgagaattccattttgaccaatcgcttccgagcttggagttgaacggcgaaagcctattagaccgccacgtgccgccgcgtaaaggcgaagggcttgattgagcctgttaagtgggtcagctatagcgactgaccaatttgagtggtaccgcggaatactattccgtctcaaagaaactgacgagagtcgatctttggggcggttttttgtaccgtcagagtctttcggacatcggggaatcaggcgcgccggcgacagaaacggcggcaaaggaaaaggaaaagaatcgcttttgtaaccttaacgcaaaaagcggcacataccctattaaagaaaggcatggtaagaacaatggaaaacaaactcaaggaaatagctctccgtatcagggagctcaggcagatcaccggtctcacccccgccgagatggcggcgaaaaccggcgtcgacgaaaatgaatacgagctgctcgagctcggtctcagcgatttctcgttcaccttcatctataagtgcgcacaggtcttcggcgtcgacgtcaccgatatcctcaagg

SEQ ID NO: 618 - DNA, 32759 bp, Unknown
  16S sequences of unknown bacteria
gaccagccgatcagggcggcttctgtgtcactggtgacaaacggaacatccgctaccacaaccttctctccatcctcatggtaagtctgcgtgaagatcactttctcatgtttctcatccatgtaatatacatagaatacggtctcgtatcttgcataaagaacagtatctatactctctgtcagttctccctcttcaccaaatgcatcgaacaattctccctccgtcacgtccgtataccatccgacaaatctggcatgttccttttccggtgtctccggctcattcagagtctcaccaacagacaggatctgctgatcaagttctgtcgttccgtcctcatcataaaaagtgtaggtgtggacgactgcatcgcctggccgcacgatccgcatcggagagctggcctgagtgtctgcctgctcatcagttttcgcatctgtcttcacctcttcggacgaagaagcctgtgctgcctcattcagagctgctttctctgactcttcagctccttcagaagcttccactacgtcagattctgctgcttgcccagaatcagcagtctccccggttgcttccaattcttctgcgatttctggctcttccaccacatctgcgatttctggctcttccaccacatctgcgatttccggctcttctaccacatctgcgatttccggctcttctaccacctccgatgcctcgtcctctttctgctcttcttcggctgattcctgttcctccaaaacttctgtctccgcttctgtactttcctgcgccagcacctggaacctgctgtcacacaatcccgagagtatcagcgccagcaccattgccagtgccagcaatctcttcaagttcctcctcattccgcattctcctatctattctccatgttctattctccttctcttctgtaagtttcttaagcatagcacatgaaaaatgcagagtttgtcagattatgttcccttggaatatttttccggcagtcttaggcaacacactgcgaaatatttcttgatttttatcccatgatatgctattctgaacctaatctgtatgtatcattgttctatatccagatattcagtccgtcgaaagcaactatccattttatttttaatctttgcaggattctgctggtcttactaaaggacagactaaaacccagatttccatcattcgctttcagttttttaccaaacgcaagacgccttatatccacctgttagagcgtccatggcgctctaacacaaaaagagccagtccttcacgactgactctccattaactcagtttttttatcgttgaataattcatgtgagatgcaagaactggtcagccatctcattacaaattataaaaaatcccctgccagcatcgctgccgacaagggacttcataatttcaatattctgcttatttagcagctgccatctgtgcagcaacttcagcagcgaaatcttcatttttcttttccataccttcaccggtctcgaaacgaacaaagcctttaacaacaactttggcattgttagcttttgcaacctgtgcaacgtatgcagctacgctctgttttccatcttctgcttttacataaacctgatccagcaggcagatctctttgagctgtttgttcagacgacccatgatagcgccattgataactttctccggctttccagccatcttcggatcattctcgatctgagatttgatgatctcaagctcatgagctttgtactcttcatcaacttcgctgtcgttggtgtataccggtttcatagcggtgatctgcatagcgatgttcttagccatctctttgatctcatcgtttactacatcggtctcaacgtcaacaagaacaccgatcttaccttctgcatggatgtaagaagatacgaatccgttctgctcctcaacctgtttgaaacgacgaatgttcatgttctcaccgattactgcgatctgtgctgcaagagcctcttttacagtcttggtggtatccagtgcccacggctcagccatgaatgcatcgatatcagctgcggtggtgttcagtgcctgtgcagcaacatctgctacataagtacggaatttctcattctttgctacgaagtcagtctcagcatttacttctactgcaactgctttctttccgtcctcagacagagcggtagctacgataccctctgctgcaatacggcttgcttttttctgtgcggttgccagacctttttcacgcaggaaatctactgctgcttccatattaccttcggtagctgccagtgctttcttgcagtccatcatacctgcaccagtcatctctcttaactcttttaccattgctgctgtaatagccatgattgattcctcctgtttggtgttgtgattactcctctaccggctgctcctcagcgtcctcagcatactcctcagcctcgccctggtttgcctcgatcacagcgtctgccatcttggaaacgatcagttttacagcacggattgcatcgtcgttacccgggatcacatagtcaagctcttccggatcacagttggtatcgcagataccgatcagcggaatacccagagtatgtgcttcctgtacacagattttctctttcttcgggtcaactacgaagattgcatccgggatatcatgcatctctttgataccgccaaggttcttctgcagtttctccatctctttcttcagtgcgataacctctttcttcggcagcacgtcgaaagttccatcctcctgcatggtctcaattgctttcagtcttgcaattcttccctggatggtcttgaagttggtgagcataccgcccagccatctctcatttacatagaacataccgcaacgctcagcctcagtagcgattgcgtcctgtgcctgctttttggttcctacgaacaggatctttccaccttcagcagcgatatctgcaactgctttgtaagcctcatcaacttttcctacagatttctgcaggtcgatgatgtagataccgtttctctcggtgtagatgtactctgccatcttagggttccatcttctggtctgatgaccgaagtgtacgccggcttccagtaactgtttcattgaaattacgctcattttttcttcctccattggttgttttcttccgtcagactttcactccaaaaagaaccatctctggcaccactctccggatccgtctgcgtgattatttttcgctcatatttatttgatgcgaaaagagccttatataatgtagcatagcccaaaatgggtgtcaagcattttgtttgacaaataggaattttctgcctataataaaaaacggcatgaataatcgagacttgaactgatacatagcatcgtgtttatttatcgaggaggaattgaaaaaatggcaagaccaaaaagagctgtcactaccgctaaagctgctgttgcaaaaaatgcagaaccgaaaactactgaagtgaaagctgcagaagtaaaagaagtaaaagctgaagagaagaaagtagttgaagaaaaagctgctgctaagacaactgctaaaaagactaccagaaaaccggcttgtaaagtatctacctgtgtagagctgaatggtttaagtgtttctgttgctgaagtggaagctgctgtaaaaaaagcagtgaaagcaagcggtgctgaagctactgatgtaaagatctatatcaacgctgctgagcaggctgcatactacactgtagatggtgccggagatgctaccaataaagtagatctgaagacactgtaatctatctgtaacatgtcatgaaagaagcttccgatacagtttttctgttccggaagctttttctatgtcaaaaattctcttctctttgccttttccgatactgaaacggagtgcatcccatcttcctccggaatatttttgcaaaatacgctggattggaaaatccggtcattcctgcgatctgcgtcacatccagcctgtcatcccgcagaagcggaagacttctctctacacgataatccagcaaatagtcaaaaatggatgcattcatatatcgcttgaacagacggcagctttcgctgcggcatagatgaatctgttctgccaattcttccagcgtgatcttttccgcataatgttcctgaatatacaccataatacaccggatccgctccgtatccctgtcttgtcctgactgctcctctgctcccggctccacatgttcatagatcagaagccagatctccatcaatgcaatctgtatcttcagttccgaagcttctgctttgtctgcagataatctctgaatcttacggatctgttccagtaccttcttctgccagtcaacttcaggtttaaaatgaatggatgccagttcaggatctctcagtattccttccatatatctgttctgcatcagactattgttgtacccatacagaagtcgtggatggaaagtgactgacagataactacagtctgctgagtttccatgacgtcctgcatgcagaacattggtattacagaacaagccctctcctgcctttaacagacagctgttgtcattgacctgataaaggatctcaccctccagaatcaatgtcagctcgatctccggatgccagtgccatgggaactctcccgtatcaaaccaggacagacgctctgggctgaccagcaccggaaatccatatgttccatgtgcttttacttctttttgcttctgatcgatctgtaaccgcataaaatctcaatatccttttattttttaacaaatatacttgttgaaatatctcctgattctcattatattgatattatacaggatgtcaacggatatccgtcagaaaggggaaggttttatggaatttacactcgcacaattaaaagaaaaatttacagagctcttcggaaatgacggtgagccaaagctttattttgcgccaggtcgtgtcaacctgatcggcgaacataccgattataatggaggacacgtatttccctgtgcactgaccatcggaacctatggtgtgatccgcaaacgagaggaccgcacgattcgtttttattctttgaactttacaaataacggcatcatcaccacctctctcgatgatctggttccaagcgaagcagccggctggaccaattatccaaagggagtaatgtggacctttgaaaagcggggctatcatctgactgcaggtgctgacattctgatctacggtgatatcccggccggcagcggactgtcctcttctgcttccctggaagtgctgaccggactgatgctgcgtgacacctttggatttgacatttctatgatcgatctcgcactgatcggtcagtattctgaaaacaacttcaatggtatgaactgcggaatcatggatcagtttgcttctgccatgggtaaaaaggattgtgcgatcttcctggataccaacaccttgaactatgaatatgcaccggtaaaactgccagatgcaagaatcgtgatcaccaacagcaaggtaaaacacagtctggtatcttccgcttacaatgaccgccggagagaaagtgaaactgctctgaaggatctgcagactgttgtagatatcaagacacttggcgatctgacagaagctgaattcgaggctcacaaagatgccatcaaagatcctgtctgccggaaacgtgcaaagcatgccgtttatgagaaccagcgtaccatccacgcagtggaggctctgaaaaataatgacatcgtaactttcgggaaactgatcaacgaatcacacgtatctctgcgtgacgattatgagacttcctgcaaggagaccgatattctggctgaacttgcatgggcagttccgggtgtctatggttcccgtatcaccggcggcggatttggcggctgtactgtcagcattgtaaaaaatgattccatcgaccagtttatcaaatctgttggcgatgcttacaaagaaaagaccggtcacactgcagagttttatgtagtggatattggagacggtgcacgctctcttgactgataattattgagggctgtcgtgttgacagcccttttccatgactgtataaaggagtaatctactatgacattatctgaatcaatcgcagcactggtaaactacggtatggaaaccggtcttacccctgcctgtgaaaaaatctacacaaccaaccttcttctggacatttttcatgaagatgattatgcagaaccatcacagattccatccctttctctggaagagattctgaaagaactgctggatgaagcagtcagacgtgaattgattcctgacagcatcgcttaccgggatctttttgacacccgattgatgaactgtctgctcccacgccctgctcaggtccaggcagacttctggaaacaatacgagatatctccagaagcagctactgctttcttttacaaattctctcaggacagcgactacatccgccgttaccgggtatgtaaggatcagaaatggaagatctccagtgattatggagagatcgacattaccatcaatctgtccaagccggaaaaggatcccaaagccattgccgctgccagaaatgcaaaagcaagtgcttatcccaaatgtcagctttgcatggaaaatgaaggctatgccggacggctcaatcatccggccagagaaaaccaccggatcatccccatcaccatcaacgacagcaaatggggcttccagtactctccatacgtatactataatgaacactgtatcgtattcaacggtcagcatgtccctatgaagatcgaccgcgccgcatttatcaagctgttcgattttgtgaaacagttcccccattattttctgggttccaatgcagaccttccgatcgtaggtggatccatcttaagtcatgatcattttcagggaggacactacaccttcgctatggcaaaagcaccgattgccattccagtgacgattccaggctatgaagatgtagaatccggtattgtaaaatggccgctgtccgtcttacgtatccgtcacaaggatgaaaaacgactgatcgatctggcggagcacatcctgaaagtatggcgtgactataccgatgaagacgcctttatctatgcatacacagacggagaaccgcacaacacgatcactcctattgcacgaaaagtcgatgacacctatgaactggatctgacacttcgcaacaatatcacaactgaggaacatccactgggtgtttaccatcctcatgcgaagcttcatcatatcaaaaaagaaaacattggactgatcgaggttatggggcttgctgttctgcctgcccgtctgaaacaggaaatggctcttctcaaggaatatatcctcacaggcaaagatattgccaagaatgaagatctggctaaacatgcagaatgggtggctgaattcctgccgcactatacttccatcacagaagagaccatcgatcagatcctggaacaggagatcggcaaggtctttgtacaggtactggaggatgcaggcgtctacaaatggacggaagaaggtcatgctgccttcttacgttttgtacaggctttgtaattttggcaatttttccacttgccaagcggaaggttttccgctaatatagattttaagaactgcacgactggcggaaagcagacttctgtctgtggtagggcgacctacaggaagtgcagcattacattaaacagccgaccgcctgggcgcatgcaggatcgtcatgcactcaggcggtcttcttatatttatttaccatttttatttacaggaggtacttatgaaacttttatctctggaacaggaactttcatccaatgcatatccgggccgcggaatcgttctcggactcactccggatggaacacatgcagtcgctgcttatttcattatgggccgcagtgtcaacagccgtaaccgtgtctttgtagaagacggtgaaggcatccgcacccaggcatttgatccttccaagctgtctgatccaagccttatcatctacgcacccgtccgcgtacttggcaacaaaaccatcgttaccaatggagaccagaccgacaccatctatgacggtatggatcatcagatgacctttgagcagtccctgcgctcccgtaaattcgagccggatggaccgaactacacaccaagaatctccggtatcctccatgttgaaggaactcattttaattatgccatgtctattttaaagagcaatgacggtgacccggattcctgccatcgttacaccttcgcttacgagaacccaaaagctggtcagggacattttatccatacctatatgcatgatggcgatccgcttccaagctttgaaggtgaacctaagctggtatctgtctgtgatgatatggatgcatttaccgatcttctgtggaacaacctgaatgaggataataaagtctctctctttgtccgctacatcaatctggaaaatggaacttataaaacaaaaattgtaaataaaaataaataacaggaggactcttagcatgaatgaacttcagttaaaatatggctgcaaccccaatcagaaaccatcccgtatctatatggaggacggaagtgatctgcctgtcactgttctgtccggcagacccggctacatcaactttctggatgctttcaacggctggcagctggttaaagaattaaaaaaagccaccggacttccggcagctacttccttcaagcatgtctctcctgctggtgcagcagtcggtcttccgctgacagatactctggcaaagatctattgggtagaagacatgggagatctttctccgctggcatgtgcttatgcaagagccagaggtgctgaccgtatgtcctctttcggagattttatcgcattatctgatgtatgtgacctggatactgcacgcctgatcaaaagagaggtatccgatggtgtgatcgcacccggatataccgaagaggcattggaacttctgaagcagaagaaaaaaggaaattataatgtcattcagatcaatccggattacgtaccggctccgatcgagaaaaagcaggtctatggagtcacctttgaacagggccgcaatgaactgaatattgacgatgaacttctttccaatattgtaactcagaataaggaagttccagagcaggctttgatcgatatgaaagtagctttgattgtcctgaaatacacacagtccaactccgtctgctatgtcaaaaatgggcaggccatcggaatcggtgccgggcagcagtcccgcgtacactgtacccgtctggcaggacaaaaggcagacaactggttccttcgccagtctccaaaggttcttgggctgcagttccttgataccatcggcagagcggaacgtgacaatgccattgatgtctatatcggtgaagagtatatggatgtgctggctgacggtgcatgggaaaagatcttcaaagtaaaaccagatgtattcacccgcgaagaaaaacgggcatggctggatcagctgaccgatgtaacgctcggttctgatgcattcttcccgtttgctgataacattgaacgtgctcacaagagcggcgtcaaatatatcgcacagcctggtggaagcgtcagagatgatctggtgatcgaatgctgcgataaatatcatatggctatggcattcaccggaatccgcctgttccatcactaaattctcaacaaataatgctgcgcaatggccgatcatggctgttgcacagcatttttttatcctatattcgttgaacagagggattcatatttatctgtaccttccagtctgagcagggcgatcttcttgtggatccctccagcgtatccagtcagacttccatctgcaccaataactcgatgacagggaatgataatcgatattttattgtgtccaaccgcccctccgacagcctgtgcagacatcgtggaaatcccctgttctgcggcaagctgctgtgcgatttcaccatatgttaccgtctgtccgtatgggatctgcagaagtatcttccacacagcctgtctgaaagctgttcccgccggatgaagaggtggtgtgaatttcggctcttctccggagaaatatatatccagccatctcctcgtctctgtgagaatcttcgtctcctgccatatgctctcatctggaagtccatgtgcataatatttctgtcctacaaaccacagaccggtaagcccttcctcatccgcagccagcagaagatcaccaagcggcgatctgtatttacagatagataccatgtttgtacgtcaccctttctttgtagatcttactcttctttgcttccatgaagaagatctgccacagggctgatggccatataagcgcaaggatccattcccttgacaatggttttcagccgaacgatctgaaattggttgacaactacatagagaaccgttttggatgtattggaataatatccatgagcatccagaatcgtcaatcctgttccaaattcctctgaaactgcctgacagatctgatcgggtctggtcgtgataatcatggctgctttggcactgtccaatccatccacaataaaatcaacagtcttcgagcccgccgcataggtcacgatcgagtacagcggcaggatccagcttcccctgactattccacagattatgtacagcaatacattgtagatcaatacaaatgttccgaccgagatacccagttttttggcaaacaccactgcaaccacttcaattccatccattgctccgccatatcggattgccaggccgctgccgataccagatataagcccgccaaacaacgcacacaagaacagatctgtccctgccagcggagaggcgatactcacatcaatgggcagaacatccgtgatcatccatgctgataacgaataaatgcagactgtgaaaatagcatacaccgagaacacgactccctgcctctttaatccaaacagcagaagcggaatatttaatacgatcaggaaaaaggatagcgacagccattccggcgtcagctgccccagaaggatcgaagttccagagataccactgtcatataactggacaggtgcaataaataaggtcacgccgatcgcattgatcacgcccgccaccagcaacatcagaaaattaaaaggtgaaaacttctcaagcagtttcagttttttcaaacacatacctccagacagattctaatataacatttgctatatggttatgcccggaagatcatatctctggtaatgtcactgatcgtattggctccgcacattctcatagtgtcttccagttctccaccgatcttatcaatataacactgtacgccttctgccgcacctccatagacagctgtcacgaacggacggccaagcagcacaccatcagctcccatagccagtgctttaaatacatccacaccacttctgagtccgccatctaccaggatcttcatccgtccgccaactgcctccacgatatcttccagcacctctgctgttgccgggcactgatccagtacacgtcctccatgattggatacgacgattgccgctgcccctgcatcttttgccttcagtgctcctctgcgggtcatgatacccttgatgatgaacggcacacctgccatctctgccacatcccgaagctcatctaccgtcttgctgcccgccggaggtgtcagattcttcaaaaacggaagtcctgctccgtcaatatccatagcaactgcaaaagaaccggatgcttttaccagctccattttctcccggatcgtctccagattccatggcttgactgttgggatgcccaaaccaccagctgctttaatcgctgcggtggctccttccattactttcgcattggttccatcaccggtaaatgcggcaatcccgccttttgcacaggcatccaccagaagattgttgtaagccagatcgtcatatttctctccgtaatgcagtgtcattgctcctaccggacctgcaaaaaacggatacttgaatgtccgtccaaagagttcaacagaagtatcgatcggcttattctcatgaatggtatccatgttcacacggatctcctgccatttctgataattacgaactgcattatctcctacacctttggctcctggtcccggcatctgatttttacatgctgccccattacagaccggacagaccttacagtaaggacccatatttcctcttgcggatttcaatacttcatcataagtcatctgcttttcctcctataatatgccagcactgctgactattttacttcgtgttttgtttgccaaataattcttcgccccagaccgctgtcagacgatccagcgtaaagatcgcattggcaggacttgtagaaggcagtttcacagcttctctgcctgtttctttttcacaatatctgtgatacagctgccaggcctttcctccgtttgcataaatctgccggatcggactggacgacagtaccttttccagttcacagggcactacatttttaatactgctgtcgctggatcctacaatatcacagctgtgtaccacatcccagatagcgatctgatgtttcagcaacaacgtcttcttctcttctattgtttccggaatctcttcatctgtcagtctcgccagcagacgccagaaccgattctgcgggtgtccataataaaatccctcttctctggacttcacagatggaaaggagcccaggatcaacaccttcgaatgctcatcaaagacaggttcaaaggtatgctccacatgctgatatcccagtgcatcggcttccttgatcacatcgtctggtgacagctttttgctccgcggatacatacgacctgcagctccatcttttgccactgccagaatataagaattgatcttcagcttatgttcttcataaagtcccatactctgatagagatccttatatttttccagcagttcaaacttgagcttcaccgcatccacagatacagattctgttgccaccaggctgccttttcgtttcatgtaataatagattggcttctgtaaggcccggaatctctgtccatgacggataaattgcagattaaacagaaaatcttcacaccagttcatggatgcgtcacacctgagttcatgttcctctataattgaacgccgatacagcttgttccacatcacaccataatagtaatccgcaggatcatctgccatctccatggcaaattcttctctgctcatcacatctttctttttaatgtgctttttctccacgtagtgcttgccatttacccggtaaaaatccgcgattaccagatcacagtcatcctccactgccgcacgtaccagactttctgttgcgtccggtgtgatccagtcgtcactgtccagaaactgtaaatacatgcccctcgccagcttcatggcaatattccgggtattggacacgccggaattttccttatctatagtatggaatctgagatctttctcctcatattccttacagatggcaaggcttccatctgtacttccgtcattcatcagcaaaacttccatatctgtaaatgtctgcgcagccacactgtccagacaacgacgcagataccgttctgcattatatataggaatgatcaatgtcactaacggcatagttttcccacttctccttatctacatctgttttcttacgatcaaatattcattatccaactgataataagggcatgaatcggtggaaccgcttaaaaagcgatacatctcatcttcatccagatccatatcacatacatagtattcgtaatcttcatcatatacataatttctgcaggtctcgcagcagcttgcttccatagttatctccttggattgtaaatcataatgcagtagcagctcgaaaatgctttgcatttccgagctatattagtatatcacatttcttctcagttgtctcttttcatcctccatgttatactgaacttaatataatcacagggggatattctcatgaacattacgattcaaaatgaatttgcatctgtcacctgccgaacccttggcgcagagcttctttcctacaagactgctgcaggcaaggaatatatgtggcagaaagatccagcctactgggcaaagacttctccggtactgtttccatatatcggagctgttccggaaaccgttacgatccatggtgttgactacaagattccgcgccacggctttgtaaaagacgctgaatttgaagttgccgaaaaaggtgatgactatgtcattctctccaccggaaccaatgactataccacatctgtctatccatatgacttccgtttcaccgttacattccgtctggatcaggcaaagcttgtcgttacttacggtgtagaaaataagagtgacaaagagatgccgttcctgattggcggacatcccgcattcttctgtcctatggaggaaggggagcagttcacagactatatgctccgcttcgaggatgaaaatgttccggacctgcaccttcagtatcccatgtttgacaacgatgccattctctatgagaatctgaaagcccgcacggtaaaactgatcagttccagaacagaaaaaggcatcgagtttgattttcctggatatgaaagcgttgctttctggactccgatcaaaaaggatgccccattcctctgcattgagccctggtgtggtggaactatggatcagttttcatgcacagacatgctgaagaaaaaatacgtgcagtttctgtcaggcgaacaggcacgggattatgtatttgcatttaagccatgttaatgaccattctttgattcaaaaaagctgccatacgatcatttttttgacgatcatatggcagcttcttttcgccactcgcactgaacaggtcatgcttgctctagctctcttgcgctcattatattatcgctcgatctgatgaataaacagtccgctccgaagcttcggttcgaaccaggtggatttcggcggcatgagaagatcagcgtctgctactgcaaacagctcctgaatggaggttggatacatggcaaatgctacttccatgtcgctgtctgctcttcgcttcagttcttccagaccccggatcccaccgataaaatcaattcgcttatcggttctcgggtcaacgatccccagaacaggagtcagcagttctcgctgaaggaatgatacgtccagcccttccaccggatctggatggatgtaggcggactttgctgtcagcccataccagctactatgaaggtacatggtcacctgaccctttttcgcaggcttcgtcatctctcccagcttctggatctcaaatttttccgaaaccttagtgaggaactctgtctccgacagaccgttcagatctttcacgacccgattgtaatccatgatcatcagttcctcttccgggaacagaaccgacagaaaataattaaactcttccgttccatcataatcaggatgttccgctctgcgcttcagtcctacctttaccgcagatgctgcccggtgatgtccatctgcaatatagatgctgtccacctgctggaatgccatgtggatctttttcaccagttccggctcttcgatcttccatcctgcatgatggatgccatcctcagaagtaaaggaaaattccggttgagcactctttacgttctgtaccagcgcacggatctcatcctttgcgcgatatgccagaaagatcggaccggtctgtgcactgcacacatctacatgtcggatccggtcagcctctttttccgctctggtattctcatgcttcttgatcacatgattctcatactcatcaatcgatgcacatgccaccagtccggtctgcgaacgtccatccatggtcagttcatagagatagtagaccggctgctcttcttttacatagacccctgcctgctcttgctcttccagtctctgtctggctgcttcatagacttcaggagcatacatatcctgatccggagcaaacatggtctccggccggtcaatatttaagaaagacagtggttttccctctactgcctgccgtgcttcttccctgttatacacatcataaggaagtgctgccacctgggacaccacttctgtcgccggatgtacgcagcaaaatggtctgatctctgccattatttcatcacccgtactttcagaactccttcaatcgcacgaagcttttcaatctctgcatcatcagccatatgacttaagtcaaccattacatagccgtattcacctctggtcacgttggtcagacgctcaatgttgataccaagctcaccaaatgcagaagtaaattttgccagcatattcggaatatttcgatggatgatcgccacacgcatagcagaagtgcatacacccatatcacagttcggatagtttacagagttatggatattaccattttccagataatctcttacctctttcactgccatcactgcacagttatcctcagattcctcggtagatgcacccagatgcgggatcacgatggcatttttctgagatgccacatcggagttcgggaaatctgttacatatttacggatccgattggtcttcagtgcttcaacaatggctttctggtctaccagcggacctcttgccaggttcaggacaactacggatggcttcatctgtgcgattgcatctgctccgatcatacccttggtgctgtccatcagcggcacatggatggtaatataatcacactctttgtaaatatcatttacatcggtaatgtgcttcacatctctggaaagcttccatgcggcctctacagaaatatacggatcatatccatacacttccataccaagagctgctgctgcgtttgccaccagaataccgattgctcccagaccgatcacacccagctttttgccaagaagctccgttcctgcaaaccgcttcttctctttctcagccattttctccagatcttcgttctgtctctcggaccgtacccagtacatacctcctacgatgtctctggctgccagcagcattcctgcgataaccagctcttttacaccattcgcattggctcccggtgtattaaatacagcgattccctgctcagagcattttccaagaggaatattattgacgcctgctcctgctcttccgatcacgcagagcttatcggagaattccatatcatgcatcaccgcacttcttacaaggattgcgtctgcatcctccatcttgtctgtctgtgcataattcccgtcaaattttttaagtcctacctctgcaatattattcaggcaatgatactgatacattttatttgttctcctcttcaaatttcttcataaatgccaccagggcttccacaccttccttcggcattgcattgtaaatgctggcacgcataccgcctacggttctgtgtcctttcagattcacaagacctgctgctgttgcttcttttacaaattttgcatccagatccttatctccggtcacaaatggcacgttcatcaaagaacggtcttccttgcggacagttcctcggaacatgctgctggaatccagataatcatagagaagagctgctttttcttcgttgcgctgcttcatgacctcaagaccgcccatcttcttcagccatttgaacactttaccacatacatagatgcagaaacagttgggtgtattgtataaagagccggcatctgcctgggtcttgtatttcataatggtaggagttcccggaagtacatcatcgcggatcagatcctcacggatcacggcgatcaccatacctgcaggtccgatattcttctgaacaccgccgtagaacatgccgtatttggtcacatccatgggctcagacaggaagcaggaagacacatctgctaccagctcttttcctttggtgttcggaagggtcttaaatttggttccataaatggtattattttcacaaatatatacatagtctgcattttcactgatgggcagatctgaacaatcaggaatgtaggagaatgtctgatcctcactggatgcgatcttgttggcagttccgtatttctgggcctcagcataagctttttttgcccactgaccggtcacgatataatctgccactccgtttttcatcagattcataggcactgctgcgaactgatggtgagctccacctgacagaaacagtaccttgtaattatccggaatcttcagaagctcacggaaatctttctccgctgtctcaagaatctcttcaaaggctttggatcgatgactcatctccataacggacattccggtaccgttataatccatcatctctgctgccacttcttgcaggacttcttccggcagtactgccggtcctgcggaaaaattgtaaactctgctcattttcatacactcctctactcatcttgtctatgtagacgacaagggaaaggcactttatacaagcaccctcccccctctgttacatctcttttttcttcagatcatcctcatcaaacgcatcctcgatagctgcccccgcaggtaccatagggaatactttgtcatcacagtcgatctggcagtccagaagtaccggtccaccatatgcgattgcttcttccagtgccggtccgacttcttcttttttcgttacgcggattcctttgcagccgagtgcttcagctacttttacaaaatccactttatcattcaatacggttgcagaatatcttccgccgtagaacagggtctgccactgacgtaccattcccagtacatgattgttgatgacaacctcaatgactggaatattgtaacgggatgccgttgcaagttcattcatattcatacggaaacagccatcacctgcaatattgatgaccgttttatccggtcttgcagtctttgctcccaaagctgcgccaaggccgtatcccatcgttcccagtccaccagaagtcagaagctgacgcggtttgctgtatttataatactgtgctgcccacatctgatgctggccaacctcagtggtgatgatcgcatcacctttggtcacacggtagatctcttctaccacatacggtcctgtcaggccatccagattgtatttcagcgggaatttcagcttcagttcttcaatatgctctacccactctttgtggtcatactgaccgatcatcggattgaggcgcttcagtacttccttcacatcgccgatcacactggctgtggttctgatattcttgtcgatctctgccggatccacatcgatctgcagcaccttggcattctgtgcaaattttgccgcattaccaaatacacgatcgctgaaacgggtacctatcgcaatcagaagatcgcagtgagtcacaccaaagtttgcatatttggttccatgcatacccagcatacccgcatacagcggatgttctccggaaaatgctcctttacccatcaaagtgtcacataccggcgcattgatcttctctgcaaactccagtaattcttcactggcatctgctgcgattgcaccaccgcccacaaagatcatcggtctctttgcttctttgataagctctgcagctgtactcagatcttcatctgtgatcgctgcagtatccggaaggatcacatccggcacctgctgaatatattcggtagtattcgcagtcgcatccttggtaatatccaccagaaccgggcccgggcgtccactcttcgcaatgctgaatgcacggcggatcacttttgcaaggtctctgacatctttaacaataaaactgtacttggtgatcggcataaccacgccagcaatgtcgatctcctggaaactgtcttttccaagcaggctggtacctacattgcaggtgattgcaaccagtggaatggaatccatataagcagttgcaatacctgtcaccagattggtggcaccaggaccggaggtcgcgatacacacgcccactttaccggttgctcttgcataaccgtctgccgcatgagaagccccctgctcatgagaagtcagaatatgtctgatctcatccgcatgtttatataatgcatcatatatgttcaggatcgcgccgcccggatatccgaacaccgtgtccacaccctgctctttcaagcaggcaactacaatttccgctccagtcaataccataactttctccccctagtcctgaatctcaagaattgctccacgatttccggatgttaccagatgtgcgtaacgagccagatagcctgtggtcacttttggctgtcttggctgccattttgcacgtcttgctgccatctcttcatcagaaatatctacgttcagcgaattttccggaatattgatcttgatgatatcgccctcttctaccagtgcgatcggaccgccgactgctgcctccggtgatacatgaccgatggaagctccacggcttgctccactgaaacgtccgtctgtgatcagtgcaacggaagagcccagtcccattcctgcgattgcggaagtcgggttcagcatctctctcatgcccgggccgccttttggtccctcataacggatcacaacaacatctcctgcaacgatcttgccgcctttgatggctgcgatcgcatcttcctcacaatcaaagactcttgcaggaccttcatgtaccagcatctccggagcaactgcagaacgttttacaacgccggtgtccggtgccagatttcctttcaggatcgcaagtccgccagtctggctgtacggattctctaccggacggataacctccggattcttgttatagcatttctcaatattttcaccaactgtcttacctgtcactgtcatacaatccaggttcagcagatgcttcttgttcagttcgttcataactgcatagacaccgcctgcctcattcagatcttctatgtaggtcggacctgccggtgccagatgacacagattcggagtcttggcactgatctcattagccagttccatgtcaagctctacgcctgcctcatgagcgattgccggaagatgcagcatactgttggtggaacatcccagtgccatatctacagtcagagcgttcaggaatgcctcttttgtcataatatctctcggacggatatctctccgaagcatctccattacctgcataccagctttcttcgccagcttgatacgctcggaatatactgccggaatggttccattaccctgaagtcccataccaagaacctctgtcagacagttcatactgttggccgtgtacataccggaacaggatccgcaggtcgggcagacttttgcttcaaactctttgacatcctcttctgtcatagttcctgctgcgtaggaaccaactgcctcgaacatactggaaaggcttctcttctgtccttttacatgtcctgcaagcatcgggccgccgcttacaaatacggtcggtacattgactctggctgctgccatcagaagtcctggtacattcttatcacaattcggcaccataaccagtgcatcgaactggtgagccattgccatagcctctgtagaatctgcgatcagatcacgggtcaccagagaatatttcataccggtatgtcccatagcgataccatcacatacggcgatagccgggaacatgatcggtgttcctcctgccattgcaactcccatctttactgcctgcacgatcttgtccaggttcatatgtcccggtacgatctcattgtaagagctgacaattccgaccagcggtctgttcatctcttcttctgtcagtcccagtgcattgaacagagaccggtgcggtgcctgctgcatgcctttctttactgcatcacttctcatgataattcctcctgttgtatataaaatgtgtgtttgctgttcaaagcctcatgtttgcgaatatggttctgaacagatatttgtcttcttatactctctctgcgatcagagtacccatctctacggttcctacctggctgcagccttctgccataatatcgccggtgcgatatccctctttcagaacctgacggacagccgcctccacagcatctgcctccgcatccagatccagcgagtaacgaagcatcatcgctgcggaaaggatggttgcgatcggattagccttattctgtccggcaatatccggtgctgatccgtggctcggctcatagagaccgaattttgtctcattaaggcttgcacttgacaacattccgatggatccggtcaccatagaagcttcatctgataaaatatcaccaaacatgttctcagtcaggatcacatcaaactgtgccggattcatcaccagctgcattgcacagttgtcaacatacatatgggaaagtgttacctccgggtaatccttcgccacttcttccacgacctgtctccacagtctggaagaatccagtacattcgccttatctacgctgcagacctttttatttctcttcattgcgatatcaaaagctctctttgcgatccggcggatctcattttcattatatgtaagcgtatcggtagcagttcttaccccgtctacttcttctgtctttcttgcgccgaagtacagtcctccggtcagctctctcatgatcagcatatcaaatccggctgcactgatatcctcacgaagcggacatgcactgcgaagctcatcatagagataagccggtctcagatttgcaaacaggttcaaagcctttctgattcccagcagtcctgcctccggacgtctggacggctccagctgataccacggagaagtctttgcatcaccaccaatggaacccatcagaactgcatcacatttctttgcctgttctatagtctcttcggtcagcggcacaccatgtacatcaatggatgctcctcccaggagaagatcagtatagtcgaactcatgtccgtattttttacacaccgcgtccaataccttgcgggcttctcttacgatctccgggccaattccatcaccggaaatcactccaatcttataattcatctcatgtctcctcttttacacgggccttgacagtttgcagaaaaggggcggaagtagtctcccgccccttttggcatctttgccttagtcttgtttttccacttcctggatagccgacttcttcattggaatacggcagttgcggttgcttccgaactctacgatcacatcatcatcagtaatatcaatgagcacaccataaaatccacttgtggtaacaaccacatcgccaacctccattgctgaaagcatggcagctactctcttctgctcttttttctgcggtctccacatcataaaatacatgattgcgaacaatgctacgatccaaatgagcattaccgttgtctgcgcagaacctgttgcggttaataacatatctgtttcctcctagaaaaataacctatcgtctattctacacaatattttgcattccgtcaagtttctgcttcttatattcctgatatcttccctgctcgatggcctcacggatctcctccatcatatgattgtaaaaatacagattatgaagcacacacaggcgcatgccaagcatctcttttgccttcagaagatggcggatatatgctctgctgtaacgacggcaggccgggcactgacagccttcctcaataggatcctcgtccagctcatattgggcattaaacagattcagcttcccatgattggtatagacatgtccatgacgtccgttacggcttggatatacacagtcaaagaaatccacacctcgttccactgcttccagaatgtttgcaggtgttcccacacccataaggtatgtcggtttttctaccggcagatacggtatcaccgcttcaatgatccggtacatctcttcatggctctcacccactgccagtccgccgatggcatatccaggcagatccatctctgtaatctgctttgcatgctcgatgcggatatcctcgaagattgcaccctgattgattccaaacagcagctggttcttattgatggtgtcttccagactgttcagccgatccatctctgtcttacagcgcttcagccagcgaacggtacggtccactgaatcctgcacatattttctgtctgcaaggcttggcggacactcatcaaatgccatggcaatggtagaagccagattagactggatttgcatactctcttccggacccatgaaaatctttcttccatcgatatgtgagttgaaacatactccttcttccttgatcttacgaagccctgccagggaaaatacctgaaatccaccggaatcggtcagaattggtttgttccatgacatgaatttatgaagtcctcccatctttttaacgacttcatcaccaggtcttacatgcagatgataggtattggacagttccacctgggttccgatctcttccagatcctccgtagacactgcacctttaattgctgctgccgttcccacattcatgaataccggtgtctggatcactccatgtacggtatgaaattcccctcgtttggcatctccatcttttttcagtaatttatacaaagttcctcatcctccatttagtctttacagatgaaagtatattctatatacttggatttagtcaatccaaatatacagaacaggagtattttacctatggcaggttccacttttggcaatattttttctatcacgacctggggtgaatcccacggtaaaggcatcggcgtagtaatcgatggctgtccggccggactttctctcaccgaagaagatattcaggtctacttaaaccgcagaaaaccgggacagtcccgtttcaccactccccgtaaggaggatgataccgttgagattctgtccggtgtctttgacggacgcactactggtacgcctatctctttgatggttcgaaatacatcccagcgttccaaagattacagtgagattgcatcctactatcgtcctggacacgcagactatacctacgactgcaaatacggatttcgtgattacaccggcggtggacgttcttccgggcgtgagaccattggtcgtgtagccgcaggtgcagtcgctgcaaagcttttacaggagcttggcatcactgtcactgcttatacccgctccatcggaccggtacagatcagcgagagccgttttgatctctcagagatggaacgcaatgccgtcaatatgcccgacgcagaagcagctgaacaggcgatggcttatctggatgcctgccgtacaaaagaagattcctgcggcggtgtggtggaatgtgtggtcaagggcgtccctgcaggtgtgggcgatccctgctttgataaattaagcgcaaatctggcaaaagccatctgttccatcggcgcagtcaagggctttgagatcggtgatggatttctagctgccagaagctgcggcagtgagaacaacgatgccttctatatgaaggaaaatggatctgtcggcaagaaaaccaatcatgccggtggtatcctgggtggcatcagtgacggaagcgacattatcttccgggcagccttcaaaccgacgccatccatcagcactctgcagcatacggtcaataaatccggggaagacattgaagtctctatccacggccgccacgatcccattatcgtgccccgcgcagtggtggttgtcgaatgcatggctgctattacggttctggacggactgctgactgccatgacttcccgtgtggatcttatcaaagaattctggggcagataatgttccggtaatttcctcgacagcaaaaaagatcccgcaggatcttcactttccagtgaatcctgcgggatcttttttatcttcgattcagaacttcagcttacagaaatgcttttactttctcataaatgctctttccatccagaccatagtactcgatcagagcttttgccggaccagactgtccgaacttgtccatcataccgatacgaagcatcttggtcggagcctcctcagaaagagcctcagcaacagctccaccaagtccaccgataacagaatgctcttctacggttacaactttgccagtcttctttgcagatgcaactaccagctctttgtcaagcggtttgatggtatggatattgatcacctcagcagagataccgtcagcctcaagaagcttagcagcctcaaggctttcatttacctcaagtccggtagcgatgatggttacatctttaccttctttcagggtaattcctttaccaatttcaaatttataattagcttcatcattgattaccggaactgccagacggccaaatctcatataaaccggtccaacatactcagcagcagcttttacagcagctcttgcttctacatcatctgccgggcagataatggtcattcccggaattgtacgcataatagcgatatcctcgttacactgatgagtagctccatcctcacctacagagataccggcatgagtagcaccgatcttaacgttcaggtgcggatatccaatagagttacgaacctgctcaaatgctcttcctgctgcgaacatagcaaaagaagaagcgaacgggatctttccgcaggtagcaagtcctgctgctactcccatcatatttccttcagcgataccacagtcaatgtgacgctccgggaatgcttttttgaaaacaccagtcttagtagctcctgcaaggtctgcatcaagtacgacaatattcggattctgtgcgccaagctctgccagagcgttaccgtagctttctctcgttgcgatcttctttacttctgacataatgcttcacctactttctccaaatctgccattgctactgcatactgctcatcgttcggagcagttccatgccaggatgcctggttctccatgaaggatacgcctttgccttttacagtcttggcgataatagcagtcggctgtccttttacagtcttagcttcctcaaaagcagctcttaactgatccatgtcattaccgtcagcaacgttaatcacatggaagttaaatgcctcgaatttcttatcgatcggatacggagagttcacatcttcgattcttccatcgatctgaagaccgttgttgtcaacgatcactaccaggttgtccagatgacgatgtgcagccagcatggaagcctcccatacctgaccttcctgaatctcgccatcacccagcagagtatatacacgataagatttattgtccagttttccggcaattgccataccaactgctgcggagattccctgtcccagagatcctgaagacatatcaatgcccggaagatcctgcatacacggatgtccctgcagacggctgtctacatgacgaagagtcagaagctcctcaaccggaaaataacctctctgagccattgcactgtaataaccaggagcggtatgtcctttggaaagaacaaaacggtctctgtccggatcagtcggattcttcgggtcaatgttcatctcttcaaaatagagataggtaaaaatgtctgctgcagataaagatccgcctggatgtccggcttttgcactatgtacaccggtaacgattcctttgcggacttcatttgcgattttctgtaactctaaagtctgcataattcatttcctttctatcctaaaataatacgtttatatagtaccatatttttagcttttttcaagcgaatgttttctctgtcttttaagggcagactgcacaagagggagacagttcctaagaacctcccctctcatacacatggcttataatacgatccgttccagatcgtccggtacgatcagattgccgtgataataaaggcttccttctgctgtatacagctctcgtctgtttgccagattcttgtcctctgtatgatagaggatcagattcttagctcccagcttctccccattctcacaggcttcctttaccgtcgtatgatgcttttcataaggcttatatttgtcccgatccgcatacaggcaaaatgcctcatgcaataaccagtccgcatccttcgcatagacttcttcgtgttcctgatagggctcatctccaaggaaggtgaatttctttccatttttcaggttcatagtgaagccgaactgctttgcctttgtagaatgaatatcgaaaaaggtcacatgataccccaggatgtctctctcttcgttgtcttccaccggatgaatgaagatccgttctccgatcatgttaaaaaatttcgcctgaacggtcagtctggtaatcgtcaggataatttctttcagatcggcatggcagtaaatgttcagattgccttcatattgtcccttcttcatctttgttgcgatcattctgatcagccagatcagtcccagtaagtgatcggtatgttcgtggctcataaaaatctcgtggattgattccatagggatccccgctttttcaagctgagtcatgataccattaccacctcctgtatccaccagaaaatattcctctccggttttaatcgcaaagcaggtgttgaagcatttggttactgttgcgttgccagttcccaaaaggatcaatgtttcatccgtcatgtgtatctctctttctctttcttattttacagctgctaccaggcgcattacctgctccgtggtctcaaccatattctttcttgccgttgccggatccatggcctcgtcaagtgtcactacctggcggagaatcgggaaataagcatcaattccctgttcgttgcactcctgtgccccttcgatcactgctcccgcaagagcaatcacctttgcaccgtgctttttcgccatttttgcaatgcccaccggtgcttttcccatggctgtctgataatccagacgaccctctccggtaaataccagatctgcaccttccattgctttatccatctccactgcattcagtaccagttcgatacctggaagaagctctccgcttaagaaacttaagaatgcaaatccaagtcctccggctgcaccggcacctggtgtcttcgcataatcagttccattgtaagcttttactacctgtgcataagcatccatagcatggtcaagctcatcccgaagttctacagtcacacctttctgcggaccatagatataagtagaaccattctctccacagagaggattggtcacatcgcatgcaatgcggaaatgacagtcttttaattccggcatcactttatcatcgcagatttttgcaactttgtaaagtgctcctgctccgattcctgccggttttccttcagcatccaggaactcatatcccagtgctgtcagcattccgataccaccatcattggtggcacttccgccgattccaataataaattctctgcagcctctggtaatggcatcacggatcatctcaccgacaccatacgtggttgcatctaacggacgcttgtctttgccaaccaggataatacctgcagctgcagccatctccatgattgccgtatttgactccctgatcactccgtaagcagcattcaccggtgtctccagcggcccatgtacctgcacctgtaccatatcgccgccaagaccttctaccagagcctccgttgttccttctccgccgtcagccagcggctttaccagcacttttgtctccggcagaacattgcggattccctgttcgatcgcgtgtcccgcttccatggagcttaagcttcctttcagagagtcaatcgcaattactatcttcatactatttgttaaccacgtttacaggtgcaccatcaagaacagatttgatattctccgcggtagtgttcatgatacgttttcttgcatcctgagttgcccaggaaatatgcggagtgatgatgcagtttttcgctttcagcagaacattgtcagctttgatcggctctgtagatacaacgtcaactgctgctgcagatacttttccgctctccagtgcatcatacagatcctgctctacaaccagcggtccacggctgttgttgatgataaccacgccgtctttcatcttagcgatgttgtctttgttgatgattccctcagtagacgggaacagcgggcaatgcaggaaaataaagtcagatttagcaagcagctcgtcaagctctacataagtagcaacctgttttccagcctcgctttggaatgcatcgtatgcgataacatttacattcattgctttcaggatcttagcggtgttgacaccaatacgtcccagaccaatgatacctgcagtctttccagatacctcgatcatcggataatgccagtagcaccagtcagcgttactagcccactctcctttatgtacggactcgttgtgatgtccgatatgggagcaaacctccatcagaagggatactgcaaactggcttacgttgtcagttccatataccggtacgttctgaaccgggattcctttggattttgcatactcataatctactacattgtaaccagttgccagaactgcgattgtcttgatattcgggcatttatcaatcgtctctttgctgatcggggtcttgttgataacaacaacttctgcatcaccgatacgctcagcgatcagcggagactcctcataagatgtacgatcatatactgttacttctccaagtgcttccagcggctcccagctgatatcccccgggttttcagtgtaaccatccaatactacgattttcattttgctcttctccttttataatgattgattatttttgttgcctccgcgatatcggtaaaccggacatcgttttcggattgctctttatgtcaatgattatagtcggaatttgcaaaaagtgtaatattactctatctatctttttcttcagaaagttgttatgcgtaacaaatcctggcattatagtctcgcccggaagatttctccaaactgactgccacaatgttctacttctttcagtaccgtctcaatacctgtctcatgctgataccagttatcccggctgatgcccctggtaatcaccgggcacaccagaatctcagtctccgggtaacagacctgataataaaggctcgcacgtcttgcatgatatgcctgacagaccagaatcgcctttttaatgtccagacccagtttatcagttaatttgcgggagaaaattgcattttcataagtataagttgcctgcttttcctgaaggatcgagtgatcagccactccttcctttagcaggatctcatgaaaataatcccactcggtttcatgatccccatgccccgtaaaatatcctgtcagcttggaatattttccagaagggagcaccaatggcgcatatccttccttccagagttgtgccgcccgcactggcagtgctctttctgcagatccaggaagaaagatcatgtctgcctgctccggctgatcctctatgaaaatgaaatcagtatatgcatctacaaaactcatgcttccagaataccactttcctttacgatacgaactactttttcaatggtttccaccggatgaaccaatgcgatccgcacatacccttctcccagattgccaaaggcagtacccggcgttacgatcatgccggtcttctccatcagatccagggtaaatctctctgaactggtataattctccgggatcggtgcccatacgaacatggttccctgcccatccgggatcttccatccaatactgctcatgcctctgcagagcgcataatttctctcttcatagatccggcactgctcttttacattgtcctgcggaccagtcagtgctgccactgcggccttctggatcggcagaaagatgccgtaatcaatctgagaacggactttccggaacatctggatcacatctttgttaccaagcgcaaaagagatccgcatgccagtcatgttataagacttggacagagaataaaattcaatacccacttccatggctcctggataagacaggaaagattttccctcttttccgccaaagataatatcggaataagcattgtcatgaagcaggatcacattatatttttttgcaaatgcaatggctttttcataaaagctgtcatctgccacggaacataccggattggccggataagaaatgatcataaatttcgcggctttggctgtctcctccggaatatctgcaaaatccggcaggaaattattttctgcatagagcggataagtctccacctttgcccccatgagttgtggtcccatgccgaacactgggtaacctggatttggcaccagtaccacatcccccggatcacacatgacaagagcaatatgtgccatgccttcctgagatccatacatgctcatgatctgatctgtctcaagctccacgtcaaaacgatttttataaaaattcttcatagcttccagcatttccggccggtcagccatggcatatttgtaattatcaggatccttgcaggcctcttccattgctttcataatatgttccggtgttttaaaatccggcgtgcccacagaaaaattatagacttctctgcccgcctgcagcagctcttctttctttgtatttagaattgaaaaaataccttcctcgatctgagtggctctttttgaaaatatcatatccatattcatttcctcctctgtgtattcttgtctgcgatatccagaaactccgaatagttttatttta

SEQ ID NO: 619 - DNA, 16141 bp, Unknown
  16S sequences of unknown bacteria
aagtctgaaaataaattttcagaccaaacagttttgaggctttcacgacattgggtcgtgaattttgaaagccggacaagccgactttcaaaaccgcctcaaaactgtaagtttgtacgaaaggtatggtcaaaaaaatgaaaaacaaagacatctacaaccgcgccctcgccctcctcggtgagaccgcgatcgacgggatcatgaccgggaacgcctcgaacggcgtctcggcgaactcctgcacgtccgactacctcgtcagggcgccgtatctcatcgcgctgattgtcagcgagctctcgccgctcgaggcggttctcggcgactctgacgcgcccgccgtcaggaaaacgcccgcggcgctcgacgacgacttgcaggtcgactcgcgcttcgcggacgcaatcgccttccgactcgccgggctgctcgttctgaacgagagccgcgagaaggcggactcgctcttcgacgggtacaagacgcagatcgacgccgtccgcgccgcgctcacctcacacgataaaataacggaggtatactgatgaccaaaacactcagactcaccgcgaaggacctcaagaacgccgcgaagctcgagaacttccgcgtcctctccgactactcgctggaaaagcgctgcgggacaaagctcctccacaccttcgccggcaagatacgcggcgggtgctccgccaacatcggcggcaccgagtcgatcttcgtcgtcgccgggagcacgctctacagaatctcgccggcgctcatctcagacacgtcggcggaaaacgccgtcacctcgctcgggacgatcgcgggaaccttcgacgcctcgcacggagagtatgtcgatctgtatatgttcgcgggctcgctcttcatcctcggcggcggcgagctctccaagtacgacgggacctcggtctcgaaggtcgccggatacgtgcccctcatccgccgccgcggctcgaacaccagacccggagccctctacgagcgcagaaacctcctcacaaagcaggtcagagtcaccctcaacacggtaaacacctcatcagtcttctggctcggcaaaggcatcgagtcggtcgacaaggtcctcatcgacggcgtcacgatcaccgactggacatggtcccccaccacctacaacacgtcgctcaccttcgaccgcaccttcgccaacaacgacgaggaaccgctcgaggtctggtacacgctgaaggacgactgccgctcccgcgtcacctcctgccgccactcggctgtctacggcggcgacaccgactcccgcgtgttcctctacggcggaaacgagcggtcggtcatcttcccgagcgagccgtccggagcgatcgaaggccaggtcatctccggcgagtacttcccggagggcgccgacatcacagtcgcggacggaaaccccgccgtctccggagccgtcagacagttcgaccggctcgccatcttcaccgaggacggggcgttctacacctatccacacgacgacggactggtaaacgagatcccgcgcttctccttcccgattctcccgctgaactcggacgtcggggcgaccaaggcgggcggcgcggtgcttctcgagaacgagccgtacgcgctcgacccgaccgggctctacaggttcaagtcaacgtcagtcagagacgaaagactcgccgtccgcgtcgaggctcccgatcacgtcgggctgacgagcgatttcatcgcgaactgcatcctcttcaccgataagctgcggggcgagctctggtgctgtcacggcgggaagatcgtcatctacaacgcgcggctcgactgctggtacaggttcaccggcattgacgcggacggggtgttctccgccggagcggactgcttcttcaaggggacgaagctttacgcgttcgacgacaatctgcgcaccgaccgcgggaccgcttactccgcgctctgcgagagcatgccgctcgacttcggcgacccgttcgagcgaaaaaccctctgcgaggtcggaatctcggtctcgagagagggcggcgcgaagaccgggctctcagtcacgagcgacaccggcggaaaagtctcgttcgacttcaccgtcccggaagagaccgcggcaaacggagaaacgccgaaaacactctccccgcgcgtcttcaccgcgcacgcgagactcggcaggttcaggcacgtcaaggtcagcgtcacgtcgccggcggtcgatgaaccgctgacagtccgcgaagtcatgctgtcctgtcaggaggggtaagatgataaattatctcatctgcttcgtcctcggcgcgctctcggcaatcatcccttccgtgctcatctctctcggcgcgaaaaagaagcgcgagagggacaaacgcgcgagctacgacgagtttctgagattctgatattaaataatgaaaggaaaataaaccatgccgcaaacgaacaacccaacatggaccctcttcgacgccggacgggaacgcgacctccgctccgggtacctgcaaaacgccgcgacgaacgaacgcttctaccgcggcgaccagtggaagacgcccgccgggaatcaggtcgactccggcgttctgccgaccccggtcttcaacgtcatccgccgcgtcgtcgactacctcgtctcgcagatttcctcgtcaaacgtggagattctgttctcggacgacaatatcgccctcctcgggcccgaaaggcgcgaaaaggtctcggaagctataaagctcctcaaccgcaacgcctcgatacgctgggaaaaatgccggatggaccggctcgtgagacgggcgcttctcgacgcggcgctctcgggggacggcgtgttcttcacctactgggacccggacgtgcggaccgggcaggctctgaccggcgacttcgtgacgaccacgatcgacgccgcgaacctgcacgtcgcgaacccctcctcgtccgacatacagtcacaggagtacatcatagtctccgggcgcgacaccgtgcactcgctccgcgccgaagccctcgccgcgggcattgacccgaaagaggtcgaaaagatcgtcccggacgacgaaataaaattcggcagaatcgcctccggcgacgggaaagcgacctatctcatcaaattcacgaaggaccgcgacggccgcgtctggttcgagaaatcgacgaagaatcttgtcatacgcacggttcagaccgacctcacgctctacccggtcgcgtccttctgctggattccgacgaagaactcctgccgcggcgcctcgcctgtcaccgggctcatcgggaaccagaaatacatcaacaaagcctacgccctgctgatgaagcacatgatcgacaccgcgttctcgaaggtcatctacgacaaaacgagaatccccgagtggacgaacgaggtcggagaagccatcggcgtcgcgggcggcgacctcgccggaatcgcgaccaccttctcgcccggagagatcgacgagaactaccccgtcatcatcgacagcgtcatcaagaccacgaaggaggtcatgggcgcgaccgaagccgctctcggggaggccgcgccgaacaacacgtccgctataatcgcccttcaggaatcgaacgagggcacactcgaccagatacgcgtgtcgctatacacggctctcgaggagctggcgtcgatctgggtcgacttcatgtgcgcctactacgcggacgggcggatgctctgctcggacgaagcgagcgtcgacgggcatgacggcgggacgacctgtctcgactgcgagctgatacgcggagagctgatccgcgcgagggtcgacatagccgagtcgaaccgctactcaaaagccgccggagccgccgcgctcaaagccctcctcgacggcgggcacataacggtaaggcagtacctcgaacgcctgcccgacgggataattcccgggaaagaatcacttatcgaagaactcaaagcaaaggagaacgaaaatgcctgaaaacgaagcactcaacgaaaacacaaacgcggaacccaacgaaaacacaaatccggaaaccgccccggcaaccgccgtggagccgcccccgccgaccactccgaccactccgacaccggaagaaatcaacgcccgcaacgcgaaaacctcaaccggcaggctctcggacgacggcaaagcctcccccttctacaccgccgccgacgtcagagccatgtcagccgaggaagtccgggcgaattatgagaggattatgatctcgatgaggtcagggaaattctaaggcagggccaagccctgcactgatacacgcgctgtttatcagcgcgtgttctttatttgctgcccgcgggcgcgtctcctacgtcgacttactctgtggtatgttgaatttttgttcggatggtattgacaaacgggtggtcttgtggtataatagatttataattatgaaaggagagcggaaatgaggacatttcagatagatttctcggacatcgaccgcgaagccggggaggacgtcttctcaccgatctcccgcgcgctcgattttccggactggttcggcggaaacctcgacgccctctgggatatgctcaccggttacatcgagaccccatgccgggtgatcctgctctcgaccgggagcgtcaggaaagacgaaaaaagctacctcgaaagcatcatcgaggtcttccgcgaggctgaggaatacggggttgtgacggaggtaagaaactaaaattgaccgcgcacgaattcgcagacagcttcttccttcacgacagctcgctcatcatgataacccgctccgccgacgccgccgctctctcgatagacctctgcctctgggcgcaggaaagctatcgggacagaatgccggatatcgcgccgctcagagtgaccctctccggcgtgcgtgaactgtcactggcaattgacgacaaaaccgaggaactgccggaaaggacagtcttcgccgacctgccgggcgtctttgacgcggaaatcctcgacgcgaagccgctgtcagaccggaagctgctcctctgcctgttcctcacgaaaaaggacgagcaggtttacgcagaacttaacgtcacggctgacgatttttacccggaggtgacaatatgatccgcgccgcgctgatgatatgtctcaccctgaccgccgcgccggttgtcaggtatcagacgatgccggagatgattgaatcggcgtacgcggagctcgattacctgcgcgccgcgctgccggaggacgtcgcggaacaggtagaccgcgaggcagaggacgagataaaggcgcttgaagagctttatttcgccgggtatgatgaagatggacgagccgtttacgggagagaactttcgcttgctaaggcgggggtaatgatcaggaaataccgtgaggcggcgggaaacattgcggaaaaataatcgacaaaaaatttcaaaaagttattgacaaatattggggtatatgctataatagcattgcagagagatcacaacaatccacgcttcagaattttaaggagttaaaccatgaaaaagcatctgaaaagcatcgtactgatcctcgtaactgccatcatcatgttcgtcgtgccggtctccgccgacatgatcgcgcgtccggagatcatcaatccggaaaccgacttctcgctgaacaatccggaggcgaagaaaaccgtaactgcacttgcctacgactgcgacggtgaaatcataggtccgttcaactattattatgcccatgaggacggaaggcttgagctgcgcttcgcggattactacgctccttgcagcaacggatacataaagctcataactctcataaagtcctcgataaattcagacatcggaggaaacgcatttttcatcaagagcaccgacaagcggtatattcccgaaaaccacatctccatcggaaacgaagccgaaacgtatattgttacggcgaccggaaccgccccgtctcagtatacccctccatgcgtcgtggaaagcactccggaacagctcaaagccgtgaacgccgcggcaaaacggtcggcgaagtatctttttatgaattcgtcgccccagcgtatagttatcgattctgaaccggagctgtctacttaaaaaatctcagggcttgtacatcacccgtacaagccctgattttgttttatcaccgataaacccgcgccaccacgctctccgcttccccaacgatccccggctcatcaactccgaaaaccgccagaacgctctgagtatccttctcctgccgcaataccctgaccgcgcaggtttcgtccgggaacagccagaccgtcagcatcacgagcccgccgtcggcgtactcaaaaaccaccatcagcgcccgcgtatcgtccggaaaccccgcgccgtcatcgaacggcgtttttttgtcgtccgtgagcgagtttatcgcggaaacgagcatggacacatcatccggcatctcttcataccgccaagcgttggcggcatccgccgcgaccgagacgctcacaatgttcccggtctcaatgagcctttccccgcccccgcaggaacagaggatgatcattacggcaaacgacaggatagcaataaatctcgttttcatgtccgtttcccccttggtaaacactgtataattcaggttttggtaataaaaagtcttgaattcatgggctttttattgccaaaacgacctcagatcagtgtttctttttttacttcttctccgccgcgtcaaacttagctatcgcgtgtataattcgtcgcagtaccaacggatcgggttttcgcggatataattcatatgtctgtcatagtcatcgcagtttctgatgatatgatcattgaaacgagcctgccatatattcccgccatactccttattgcaaaatctcttgaatgtcgacacaaaccgcgagcacgccgaatttgcccgttcaatatttgtagggacaggcgtccccgactgtcccttctccgacattccgccgcacatattctctttcacgcaaagcagcaaatgaatatggttaggcattatcacgtaatcctcaatcgataggtgatcatagaaatcattcaattgtctgatgtatttatccgcgatctctccgtatgtcgttaattcaaggtgtacattgtttgtttgagggtgagggcgcggacaggggcgtggacagtcggggacgcctgtccctacaacgttcggttcgtcgttgtatcggcacggatcgtcggggacgcctgtccctacaatggtcggttgatcgcgggtggggcgcggacaggggcgcggacagtcggggacgcctgtccctacaatgttcggttcgtcgttgtaccggcacgaatcgtcggggacgcctgtccatacaatgggcggttgattgcgggtggggcgcggacagtcggggacgcctgtccctacaatgggcggttcgtcgttgtatcggcacgaatcgtcggggacgcctgtccatacaatggtcggttcgtcgttgaatcggcacggatcgtcggggatgcctgtccatacaatgggcggttcgtcgttgaatcggcgcggatcgtcggggatgcctgtccctacaatggtcggttgatcgcgggtggggcgcggacagtcggggacgcctgtccctacaacgtgagacaggacgcagcgtctgtcttgggtgcatatcgttataaaatacgcgccgacactattgtaatcaaatcctttgcacctcggggtcttcctgtttttcaattcgctcattttcatcaccctcatacgtatacgaatgtataacacgtaactgtagggacaggcgtccccgactgtcccttctccaaccgtccaccgcacatatcctccaccgtcatactcaaaaaccggcagaaaggtcccccttctgccgatcttcctttttacttcttctccgccgcgtcaaacttagctatcgcgtcgtcaatcgacgccagctgatccacgagcttcaatctctttgccttttcgttctcgataagctgcgcgggagccttcgcgacgaagccctcgttcgcgagcttcttgtcaacgcggtctatctcagacacgcacttctcgcgctccttcgtcaggcgcgcgcgctccttcgcgaaatcgaccagctctccgagcggaatgaagatgttcgcgcccggcgccactatctgcacggccgactcgtcgtcgcacttcggcgcgaacacgacctccgacgcgcccgccagcttcacgaagaatctcgcggtctcgtcgttataggtgtcggtgcgctcagtcacgatgatcgtcttagccctcttcgacggagcgacgcccatctcgagacggcggtttctgatctgagttatcgcgtcgataagcgacgccatcttctcctcgtccgaggcgaaatcataccgcgcgtcagccttcggccactcggaaatcatgatcgactccttgtcgcccctctcacgcggcagcgcgaggaatatttcctcggtaatgaacggcatgaacggatgcaggagcttcagagacgtcgtcagcgcgtggcagagcaccttctgcgccgtcaggtctccctcggtaagcctcggctttataagctcgatataccagtcgcagagcacgtcccagacgaaatcgtaaatcttcgccagcgccactccgagctcgtacttgtcgaggttagccgtaacttccgtgataagcgtgttcagcttcgacatgacccacttgtcctcgagcgccatatcggcggtgtccggcagctcgcactcagttatcgtcaggttcatcatagcgaatctcgacgcgttccagagcttgttcgcgaagtttctcgccgcctcgaccttcttgtccgaataacgcatatcgtttccgggcgagttgccgttcacgagcgcgtatctgagcgcgtccgcgccgtacttcgagatgatctcgagcggatcgacgccgtttccgagcgacttcgacatctttcttccctgctcgtcgcgcacgagtccgtggatgaacacgtgatcgaacggcacctcgccggtatgctcgagcgccgagaagatcattctcgcgacccagaagaagatgatatcatagccggtgacaagcacgttcgtcggatagaagtacttcagatcctcggtattctcaggccagccgagcgtcgagaacggccacagagccgacgagaaccacgtgtcaagcacgtcctcctcctgacgcatctttcctccgcacttcgggcaggtgtcgacatctgtcttcgatacgaccatctcgccgcacttatcgcagtaataagccggaattctgtgtccccaccagagctgacgcgaaatgcaccagtcgtggcagttctccatccagttcgtgtagatcttcgtgaatctctccggcacgaactgcgtcttcccttcgagcacggcgtcgagcgcgggcttcgcgagcggctccatcttgacgaaccactgattcgaggtcatcggctcgacggtattgtgacatctgtagcaggtgccgacgttgtgcttgtgcggctcgattctgacgagccagccgccctcctcgaggtcgtggactatagcttttctcgcctcgtagcggtccattccggcgtacttgccgccgttctcgttgattgttccgtcgccgttcataatgaggatgaacgggagatcgtggcgctttccgacctcgaagtcgttcgggtcgtgcgcgggggttattttgacgcagccggttccgtagtccttgtcggcgtgctcgtcggcgatgagcggtatctcgcggttgacgagcgggattctgagcatcttgccgatcttgtccttgtatctctcgtcgtccgggttaaccgcgaccgccgtgtctccgagcatcgtctcaggacgcgtcgtcgcgatgacgacctcgccggagccgtccgcgaacgggtagcggatatgccagaaatgtccgtcctgctcggtgtactcgacctccgcgtcggagagggcggtcttgcagtgcgggcaccagttgatgatgcggttgccgcgatagatcagtcccttattgtagaggttgacgaagacctccttgacagccttcgagcagccctcgtccatcgtgaagcgctcacgcgtccagtcgcaggacgagccgagcttcttgagctgagagatgatcctgtcgccgtactgcttcttccagtcccagacgcgctcaaggaacttctcgcgtccgaggtcgtagcgggtcagaccctcgttcttgcggaggttttcctcgaccttgatctgggtcgcgattcccgcgtggtcggtgcccggcacccagagcgcggagaagccctgcatacgcttgtagcggatgaggatgtcctgaagcgtctcgtcaagcgcgtgacccatgtggagctgtcccgtgacgtttgggggcggaataacgatggtgaacggtttcttttcggggtcgcgctcaggggtgaaatagcccttctcgcaccatccggcgtagatacggtcctcgaattcggagggcgcgtagttctttggcagattgatttcggtgttcattctgtactccttttacttcggtgaaataaacgacagaaagccctgacggacttctgcacgtcagggcgtgttaacgcggtaccacctgacattatactcgacggaaagcctgtactctccctctccggtaacgtggagaaaacggctgagattacgcgccgggaagcccggtttcaccccagcggctcagggactacttcgctccgttccggcggccgcactcacagcaaaaagcggctctctgtgcgccggatcgcggggatactccttcccgtcgatgcctttggtatggatatagtatagcatatttttcgaggtttgtcaagggggagaggtcaaaaaacacattacaattataaaaagcaacattcacaatcaaagaattgccctttacacagacaaatctaatggaagatcagaaatatctttaagtcttctaccattgacaagcgtagaaagtatttcgaaagcatcttcggatccaacttctttaacagcacgcatcagttcaaaaagagcaaagtgatacacacaatcaatatcgccagtgcccagtgccagtgatgcaatccgattaggcataggttctgctgtcaccacagcaatatgcggcaaatgtccctttctatttctaataaggttcaacgcttcagtccggctgttttgagcacgatcactgcgcatagtatatttcgcagaaatgcttgcatgcagaataggttttccgccgttagatttcctgatatcagccattttgctgacactgtcatcaatcataatccgtgagtcattaatttcacgatcttcatacggattacgatatatcacaatatcaggagcgactaggtaatcattgcctaatgcagctgccagctgagcgttgctttcagtaagcatattaagataagcaagatgctcgtattgcgagaaatcgctggtctttaatttgttattattgccaagctgaagtactgtccattttcccggacgtatattctgaaagtaaggaaatgtatcacgcaaaaactccattgtcaataattcaaactgttttccaagtgtttgtccagaaattttatcaacgatggatacagcatgtctattttcttcaacaagaatatcaacaattctacgtgatatttctttagaccctcgactacttgtatctgcattcgaagctatgccagccgacgtcaaagttaaagttcgcgattcaaataatcgcttgtgaagctgatatcttgcttccactaccaaagctcccataatcaagacactcctttattttctctccaacagcttgcgcgactggcggaggaaacgcattgccgatcatccggcaagcaatagtcttcttttccccaaacgtccacgtatcaggaaagccctgaattcgtgccatcattcggctggtcaaacgaggcataccgtcaaattcctttgttggcgcttcatttgcaattcctctgccatcaacaccaagttccgcccatgcgttccttgctcttgttggtcccaaatccggaccgccatgcttttttgaccctccaactaaagtaggtgcaatttgcgtcgcatttgacgcccattgctttgcgcctttccagccgttctcagccataaggtcataaagcgcctctccaacagatggcgcgctgtcaagcatcttctccggatatgaaaaagcaccgctctcatctcgacggattccaacaataaccactctcggacgaagctgtggaacaccataatccgaggcattcaacagcttcatatgagttacatatccaagattgtcaatagaaccaagaatatattctctatatgtatcgaaacctgcatctagaaagcctcgcacattttccaacattacagcgcgcggatggatttctttgatcagtcgtatagcctcaggaaaaagatcacgctcatcttcctgccccaactgctttcccgcaaccgaaaaaggagggcatggtactccgccagcaagaagatcaacatctctgtacacattcccgttaaagttacgaatatcggcacaaatcacattccattccggtctgtttcgcttcagagtttcacaataatcacgctcatattcaacaagagcgacatggacaaagccagccattgcaagccccaaagcctgtccacccgcgcccgcgcatatttcaacacacgtcaatggccgttgcataatctatacacctctcaaaataatctcaagtttattatatcacactccatcatataagtcaagagataaattcaaaaaaagacggagaagccccagctcccccgccttttttcaccacttacacctcatagtccgcatagaattgagtatagcgataaccgcgacccccacatccgcgaacaccgcgagccacatattcatcatcccgaggaagccgataagcatgatcgccgccttcacgccgagtgcgaagatgacgttctcacgcgagatcctgaccgtctttctcgcgatctccacggcgtcgaccagcttttccgggtcgtcgtccatcagcaccacgtccgccgcctctatcgccgcgtccgagccgatgccgcccatcgcgattccgatgtccgctctcgagaggaccggcgcgtcgttgatgccgtctccgacgaacgctatcgtcgtcttctccggcttctccgaaatcagcttctcgagctccgcgatctttccgtccgggagcagtcccgcgcggtactccgtgatgccgatctccctcgccgccttctcagccgccgcgggcgcgtctccggtcagcatcacgcacttcttcacgccgatgcccttcagaccctctacagcggctctggacgtcggtttcggctcgtccgcgataactatgtttccgagatacctcacgccgtcagagacgctctcggcggcgtacacgaccgtacccgcgtattccggcacattaagaccaagagaggtcatcatgcgcttgttgccgacatgaacgcgcctgccgtttatcgtgcactcgacgccgtttccggcgatctccgcgaggtccgaaatatctcccgtctccggagcctttccgctcatttccgtatacgcctcgacgatcgacttcgcgataggatgcgagctcgacgactcagccttcgcggcgagcgtcacgagcgtcatctcgtccgcgccgttttccgggtgaagctcggtcacgcggaagctgcccttcgtcagcgttccggtcttatcgaagacaatcgcgtaaacgtcggagagcgcctcgaggtaatttccgcccttgacaagtatgcccttcttcgacgccccgccgatgcccccgaagaacgcgagcggaacgctgataaccagcgcgcacgggcaggaaatgacaaggaaggaaagtccctgcgtcagccacttcgtgaagttcgccatgttccacccgaaaatgaacggcggaaccacagaaatcagcaccgccgccgcgacgacgcacggcgtatagactctcgcgaacctcgtgatgaaattctcgtacctcgacttcttcccgctcgcgttctcgacaagatcaagaattctcgcggctgtagactccccggcgagcttcgttacgcgcgccctgaacagcccctcgcggttgacgcacccggcaagcgcagtatcgccgaccgcaagctcccgcggcagactttcgccggtcagcgccgaagtatcaagcgacgaagttccctcgacgacctcgcagtcgagaggaattctctcgcccggcttcacgacgatgatctcgccgattttgacgtcgtccgggtcgaccgaaacaacctcgccgtcccgctcaaccgaagcgtggtcggctctcagctcgacaagcgacgttatcgactttctcgagttcgagaccgcgacgctctggaacagctcgccgacctgatagaacagcataaccgcgacgccctcggacaaattcccgagcgcaatcgcgccgacagtagcaatagccatcaggaaattctcgtcaagcagctccccgtggaaaattcccttgaccgccttaatcagcacctcaagcccgaccagcagataagccgccgcgaacagcgccgccggaatcaacatcaaaggcttaaaagccccgaaatccagccccatgaacgccttagcggcaattccgccggcaaaacaaacgcccgcgccgattatcttataaagatgcttcttctgttttttagtcaacttcataacgctcttcttcctctcgttagaactgagttctattcctgaaactcagttctgatcgctgaaacttatttctcagagcaggatagtgcaatccggctcgatcttgcggcagatcttgacgacctctttcataatcttcttctggtcgtcaacctcagtctcaatcgtcatcttctgagtcatgaaattgacctcggcgttgacaactccatcaatctttttgatcccatcctccatcttaagcgcgcagttggcgcagtcgagatcttccagcatataaactttcttcatggtatgtatttcctttctataaataggggtacgcggcttttctgaagaaaagcctggcaaaagactttatactttgccaatacccaaaatttcaaccttattcttcgatgtgttcgaggcccatcgatataattgtatgcacgtgctcgtcggcgagagaataatagatgttcttcccgtccctgcgcgaccgtatcaggcgcgtctgacgcagcacccgcagctgatgcgatatcgccgactggctcatcccgagcgcgagtgaaatatccattacgcacatttccttgatgtgcagtgcgtacaatatctttatgcgcgtgctgtcgccgaagattttgaatagttcctcgagctcgtccagcgtatcctcgtccggaagcgcgtcggtgacctccttgatcttcgccgcgtcctcggttccggcgatgtctgttccctccgtttcggcgccggtttcctttataatatcgtcgttcatcggaccactcctttctttctgattcgacctttgctgacatctcattcaaatcgtcgttcatatgaatcattgttcatctgtttatattataccacgttttccggaaatgtcaaggggattcgcgaagattctgataagttcggcgttttgctgtacgatgtatatttttgagggggttgtatgtaaatgttgacgtatgcgggaaatatcggtaatgaggttcacgtattcgtatatgcaggcataaatattctgtcgaaaaagaatattatacgtcggattccagtatgtgggaattatgggctggatttcatgtgtaaaatgtataaactgaccgtacccgatgaatattctttggggcagaccgaccatttttaccaaaagggcttgcaaaattcttaaaagcatagtataatagtatttgtccttggatgaatgggggatattgtgcctgttttgcggagggacccggagtcaagataatccgaccagaaaaaggaggtcgagagaaagaataggggcgccgggagccgcatagactttgtgtggcggtcattgtgtcgggctg

SEQ ID NO: 620 - DNA, 1757 bp, Unknown
  16S sequences of unknown bacteria
atttctgctgatcgctcagccgtgaatgatagacggccgcatcatcgggaaaccgctcccgcacccgggcgatcatctgcggtgtcagggagatctccggcaccagcagcagcacctgtctgccctgctcgaccatctgccgggcataacgcaggaacacctcgctcttgccgctcccggtcaccccatgcagcaatacgacctcatgatgaggcacggcgttcagcgcagccagcgcttcgctttgctgggcgcaaagggtcagcgtctctccctttgcggcagagaggatgagctgcgggaccttcttgcgcttttcgatgcgcacacagcccagctcgatgagctttctggccacgctcttgtattcccgccggtattcccgccggtaatcgacggcccgcatgctgccgcgctgcttcatctcgtccagcacctcgcgctgacgcttgctgagcccttcgcgctcgcccgcaaagcacgcccactcttccatcgctgccgatctcgcgctgcttttcggcttcagcacgcctggcagcatcgcctgataacagctgatgagcggcgccacatactgctcggccatccactttcccagctgcagcagctcatcgttgagcagcggacgctcatcgatcacacgctggatctccttgagttcataaggcatctgcttcagttcatccgcgctgacctctttgacgctgtccacgaagccgacgagctgctgcttcgcaaaaggcacgctgacgcgcatgccggggcgcacctcggcatggccgcagagatagctgaagctctgatccagctgcggcgatgaatgctcgatatagacctctgccagcttcatccatacccctccttcctgctgttgcgatataacgaaaaaaccggcctagaccggtttgactgtttcgatggaggttccgaccggatttgaaccggtgatcacagagttgcagtctattgccttaccacttggctacggaaccatttttcgtgacatgaaatggtggggacagtgggacttgaacccacacgggatttctcccaacggattttaagtccgttgcgtctgccgattccgccatgaccccggcacacgtttcacgttgctgttacattatacaatatttccgcagaattgcaacactttttttcaaaatcacgacgaaactctcggaacatagtattctgggatctgaccctgcacgatttccatgaccagcggcagcgtcatcgtctcgctgatctccgtaatgctgaggatggtgagcgtgctgaccttcagttcgatctgcagcgagatcgtgatcatcgtgctgttgaccccataaggctctgccgaataggagaatgacccgctcacatcattgagcatgcgaaaccggaaagggacctgcggcccgatcccggaaagaaaaggaaaacgggtcagcgagcccagcgccacatgatagatgacgccatgctcatacagcacctcatccagattcggatcacggctgccgctctgggccgcttccagcgacgcgtcgatcttatccagcgtttcgcccaggatctgattgagcgcatacgtatcataatccaatgtcaggatctgtccgtcttccccgcgctgcagatgcaccagctcttccacatcataatcgagggtcgagatcaccttctgcacgatattgttcagcgcgatcccggtctgctgccgggcgatgacctgcagctgcggttcgacccacgcattcagccat

SEQ ID NO: 621 - DNA, 4590 bp, Unknown
  16S sequences of unknown bacteria
gctgctgcagccccgccacggggacgtactattatacaacctacgaaaaccgccagatcactgccgtcaccatgaacgaagccacccggaaaggcacgacactgcgcatatttccgctggaaaaacaccagaaaatcgcaagaacaacacagccgggcgaacaataggcatagcaaaacagcaacggtttcccggtgctgttttgtataaatattcaatattgattttaatggtcccgccggacgaggctttgggagagctccgttaagaacccctggtcctggaagcagtccagggcgtgcagggcctgcgccgtctcattctccaccatcgcttcacagcgcgcgacgccataatggcggacgaaggtgttcttcttttcatccatccccgtggccttacccagcttctcctgggagccgatgacatccaaaatgtcatcccggatctggaacgccaggccgacatgatcggcatacgccgccgcagcggccatctgggccgcgctgccgtctgctgcggcaacgccaagctggcaggctgctgcaataagcgcgccggttttacgtgcctggatggcataaacatcctgcgcgtcggcctccgccttctcctccgcagccaagtccaggacctgaccgccgaccatgcctagtgctccagcggcacggcttaaaatacgcacccccgcgacaagacgctccggtgggagctctgctccggccagcgcgccgaaggcctccgtcagcagcgcgtcccccgccaggacggcgttggcttcaccgaacaccttgtgattggtcggcttaccccggcggtaatcgtcgttatccatgcaaggcaggtcgtcgtggatcaggctataggtatggaccatctcaacggccgcggcaaagggcagcgccgcatgccagtcgccgccgcacaggcggcaaaattccagcacataaaccgggcgcaggcgttttccgccggcaagcaaactgtagcgcatggcggcaaagagctgctgctgcggctcctccggccaggcaaagcagccggtcaggtacccctccacagcctgggtgtaggcctgcaatctttcgttattcgccttcgtctgcatggctaaactccaattccaccggcacgccatcggcgcccttcatcagctgggcaattttcagttcggcttggctcagcagctggttacagcttttgacaagccctgtcccctcttcaaatagctgcagcgactgctccagcggcagatcgccctgctccatcgcccggacgatctcctccagacgtgccacggcagcttcaaactgcatcgaatcattattcattgtgcttcctccgtcagtcgtgctacgatggcgggcaatgtgccatccgatagctgtagcgtaagccggtcgcccggtttggcgtcattcgtagatttgacgagcttctggccgtttttcaccagtgcatagccccggcccaagaccttgagggggctcatggcgtccagcgctgcggcgcgcttcgcgaaacgctcccggtccgcagccaggcgctgccgcatggcgctggccaactgcttttgcagctgagcaaggcgcgttcggcgctccaggacataattcatcgggtcctgcagtacgcgggcctgggagagcagctggacctggcggcgatcgacctgcagctgcttttgcagcgactgcagcatccgcagctgcattgcatccagccgctggcgcagctcctgctggtccggcgcgacgatctcggcggcattggatggcgttgccgcacggcggtcggcgacaaagtcggagatcgtcacatccggctcatgcccaacggcagagacaacggggatctccgacgcgtagatcatccgcgccacgcgctcgtcattgaatgcccagaggtcctccatcgagccgccgccacggccggtgatgatgacgtccgccagatgccagcggttggcgtagcggatcgccccagcgatctccgccggggcctcggccccctggacccggaccggcagcagcatgaccttgctcaagggatatcgtcggttcaagatgcgcagcatatcgtggatcgccgcgcccgcagaggacgtgatgattgcaatccggtgcggatacggcggcagcggctttttgtgcgccgggtcgaacagcccctcagcctgcagctttgccttgagctgctcaaaggcgacgtacagatcgccgacgccgtcggggaccaggctattgcaatacagctgatacgccccgtcccgcgggtagaccgtgatacgccccgtggcaagcaccttcatcccgttttctggccgaaaccgcagccgcccggcgctgccccgaaacatgacggcccgcagagcaccctcggcgtccttcaacgtaaaatagtggtgcccagaggggtagatcttatagttgctcagctctccgctgatgcacaggtcctgcagcagcaggtcgccgtcgagctgctgcttgatgtattgattgatctgcgaaaccgcaaaaattttatgctccatgcgacctcctccgcagccaggccagcagcgcgatgcccatggcattatccgtggaatactctggcgcggcaaagactgccgcaaacggcagcgtctcccctcgcagcagagaattggacgctacgccgccggaaaagacgaccggcaaccccgggtgctctgccagcgccgccgccgtcgcgcgttcgatcgcgccgatgatcgaacgcagcgcaaagcgcgctgtcgccgggccgtcgccggttttggcaaaatactgctggacctgattttccaccccggagagggaaaactccgccccgtggcagcggacacgaaacgcatcccggctgtcactttccgcggcaagcttgtccagcgccttgcctgccgggaacgggaggctcaggagctttccagtgcggtcgatgagttgcccggcggaaatatctgtcgtgccgcccagcttttgggcggtcagcgcgccggcctgattttcgacaagcagcaactccgttgtgccgccggatagatgccaggcaaggtggcgctggtacagcaggtccatccgccccgcggaccagagcgccgcggcgatatgcccctgctgatgggaaaattcataaagcgggacgcccagcgcccgggccaaaacggccgcctggctgctccccgccaaaaaacacggcatgtaagacccctccaccgcccgggggcgcgtgctgacgccaatggcggcgatatcgcccgtgtccagatgtgcaaatagcctgtcggccaatgccggcaggcgtttgatatgcgcgaacaaagcgtcgctctgccgcaggcccagctgacccggctgcacatccagcagctgggagcaatttatgggcgctgcgccgtcgtgggcggcgatggaagtcgtgtaattgctggtgtcgaacccgagggcgatcattccgccgccccctgcgcaaccgctgcggcttctgccgccgggttctgtgccgcttccggcgcatcagctgccggggcttcctcctccaggcattccggggcttcctgtaccggtgcgggcggaatctcgcagccgccccggacgaatgcacccaggatgccgttgacgaatttcgccgcctcgtcgtcatagctcttcgtcagcttgacggcctcgttgatggcgacgccgttggggatttcttccatatacaggcactcatagagcgcgatgcgcagaaatgtccgcgccaagcgggaaattcggcccaggttccacccgatggcgtactgggcgatgatccggttcagctcctcctgcttttccgtcacgccgcagacaatggcgcggatataggcaagctgctttttcccggggcgttcggcatacgcctctgactcctgcgccaggccgcgatagtagtccggctccagccgcgcttccagcgttcggtccgccggctggccggtgtactccatggcatagagcaaatgtgccgcgatttccctggcgttcgtcctcgtcatagtgtgcttctccttcttttctcccggcgtagcgctgccggatttatcgggccgttctggccatggcaatgccgcagacattgacattgactgccgtcacctgcaggcccgtcatcgcggcaatggcatccgagaccgcgttctgaatctccttggccagctccatgaccgggtgaccgtacagggcgatgacattgcagtcgatggtgatgctgtcattctcgccgaccgtaagccggacgcccttcgtctggctctttttgttcaaaagctccgccatattggcgctcaggccgcagacaccgtccacatccgtcacggcggcagcggcgatggaggcaatgacgtcctcagaaatatgcaccgtcccggcatcctgcgtgcgggaaatataatcttttagttcacccattggaatttcctcctttgcgctttgggtttattgtaacacactttctccccctttgcaatcccgccaagggggaaattccgggcgctgcaggaaagatttcctgccctccccggcatagaggaaccccctccggtgccaagcaccaaaggggggg

SEQ ID NO: 622 - DNA, 32759 bp, Unknown
  16S sequences of unknown bacteria
gagcgccagcctgtcacgctggaggtcacgagttcgagcctcgtttgggtcgccatttttttactcgtttttcggcggacaagccgaaaaatcaacgccttgatagctcagttggtagagcaagggactgaaaatccctctgtcgatggttcgattccacctcaaggcaccaaacggacagattccagagcggccaaatggatcagactgtaaatctgacgtctcagacttcggtggttcgaatccacctctgtccaccaataaaacctaaatcgaacctgcctacggttttgtttaggtttttattttttatttctactaacaacgtgttttttatgaggacgattatgccgaatatgatcataggacaaatttttggtattatcgcaacgctcgtcacatttttttcctatcaggcaaatacaaagagacggattttgattatacaaacgtttgcctgtatatttacctgtatcggctatttctttttagaggcgcgatcgggtcttgtattaaatattgtatgcattgtaagaaatatcgccttttattttcaaaaggaaggcacgaaggcaagctatctttccgcagttttgtttgcggggattatgatagttttgggcgcaatatcctggcaaggactattatccctattaatcattatagcacttgcggcaaacaccgtctttctttctctcggaaagcctcaactattaagaaaaagtattttgattacctcctcaatggtacttatttacaacgtctttgtattttctatcggcggcattgcaaacgaagcgctcgcgattatttcctcgattatcggcctcgttcgcttttataaaaacaataaaaaatataacgattcgatttaacttacttttgctccacagacaaaaatctgaagcgaattactttcgtttcagattttttattttagtatgcttactgaacctacccgcccttgtggcattagcttgacaaaatcctttgtttttactacactcatactatgaaaaaaattttttgttacaatttgaatgtccatataaacgaatccttacctttacttcctgctatgcacgattatactgtgggcgaaatgattatagaaaacgacaaattaaaatttataactgaagattttatcggccacgactacgattattacgatatcgcatattttaagccgaaaaaactttcaattgaattttgtgatttatgcgatactacgttttttgtcggcgtctcgagattttatccgaaaaaacagtttagagaaaaacacaaaaataatttcgggcgcagagtaaatatttatcaattgaaagattttgtaaaattttataaagaatatgatttgcaattcaattatttttcggttagctataatgaagtaatcatattttttaattgtaacaatacaaaaaaagcgcacgaagctgcaatgcaaattcaatgcaaaaaagttatatatacctttaccgattgaaggttattttcaattttaattcctattcatgttttatcaaaaggcatttttttatagctttctgtttttcgattaaaatcttcaaaaggcttgactttgcgtaatgcttaatgatataatgaaactacaattcatctatggagaatagtttatgaaaatcaaaaatgttgtagtcgcgggcggcggcgttttaggaagtcaaatcgcttttcaggcggcttattgcggctttgacgtgacaatctggttaagaagcgagggaagtatcggtcgtacgcagccgaagctggattctcttaaacaaacgtatattgacacgatcgaaaaaatggccacccccgaaggccaaacgcccaatgtctgggccagagggatcgccgactatgaagcctttaacaaagaagcgtgcctcgaaaaagccgaaaaggcctatgcggggctgaaactcgagctcgatatgaagaaagcggtggaaaacgccgatctcgttatcgaatccatggccgaaaatgcggaagaaaaaattgctttttataaaagattggctcctcttctgcccgaaaagaccgttatcgttacaaattcctccactctgctcccctcgaaatttgcaaaatatacaggtcggcccgaaaagtttttatccctgcactttgcaaactctatctggaaaaacaataccgccgaaatcatgtctcaatccaagacggacaagcagtactttgaccagattatggactttgccaaggatatccgcatgatcgcccttcccgtattaaaggaaaaatcgggctatctgctcaattccatgctcgtgccccttctcttttcgggcatggatctttacgtcaacggcatttccgaccccgagagcatagacaaggcctggacgttgggcaccggcgcgcccaaagggcctttccggatcctcgataccgtcggccttaccacggcttacaacatcgtttcgatgtacgtcaaaatcccttctttcctcgcgccttataatttcaaaggtatggaaaaaatgctgaaaaaatatatcgacgaaggcaagctcggtatgtcctcgggcgaagggttttacaaatataaaaaagacaaggaataattcggctgtaaaaacaaaaacgcctgaaggggatcttcctcccttcgggcgttttcttattgcgttttatatttaagtgtttttcatgacggccgattcgatattgtccgcgatcgactccgcggcgtcgtaacagttttcgaaattgcgatatacgtcccgccactcgatcacctcgcgcgtgctctccgcttcacgcgaaagttttctcaccgcctccacgtacagccggtcccccttttcctctaaatcattcaacgtgatcacaaagcctttcagcttatccgattttttgaaatttttgaactcctttaacagccgcactacgttttcacagcattctatgatcagatcgacaaagggcgtcgtatcgtcgcgcagtttcttgatatccgccatataaaagaacgccacgacgctttcgacgctgtccgtcagatcgtccgtcacgtgggaaagacggaacaaatcgtcgcgctcgatgggcggcagaaattctttgacaagcgcggtcgtcatgtcgtgtttttccatatcgcaccgatgctccagctcgtgcatgcgcgcgcgctgctcctctaaagcctcgggcttgaaatcggaaagaatgtccttcaaaagcttcgcttcttccagcgcgtaaagggacatattgacgagagcttcaaaataatcgaaacttttctttttggttttcatggcttgctcctatgtaatatttcagaatataaaaataaacagctttgtcatcagaaatccgatcagcccgcatccggggaaagtcagtatccaggtgaacaccatttccttggctacgctccaattgaccgcccgcatccgtttcgccgcgcccacgcccataatcgcgctcgttttggcgtgcgtcgtcgatacgggcatacccgttacggaacagacaagcagccccgccgttgcggagatatcggcggcaaagccctggtatttttccagcttcaccatatccatacccaccgatttgatgatcttcatgcccccgatcgaagtcccgaacgccatgacgagagaacataaaatcatcagccatacggggacgttgaccgcgccgggagaaacgttgccctgcgcgagggctagccccagcagaaatacgcccataaatttctggccgtcctgcgcgccgtgcatgaaggccgtgcctgcggcggcgaccacctgtcctttgttgaaaaagccgttggcctttcggtaattcatcctgcggcagagacgctgaatcagcttggtcaccgcgtaaccgagcgcaaatccgattaccagggaaaagaccaatccgaaaagcacctttccccactcggcgccattgacgccgtcgagattgttgtgcatggcaatcgccgagcctgtaatccccgcgatcaacgcgtgactttcgcttgtggggataccgaatgcccaggcaagtacggcccagacgacgatggcgaacatcgccgcgcttaaggcgatggaggcctcgtgcgcgttggaaccgaaatctaccatattatatatcgtttccgctacttttggtgacaaaagcgtcattacaagaacgccgaggaaattgaacaccgcggccatggcgatggcgttgcgcggcttcatcgcgcgcgtggcgacgcaggtggcgatggcgttgggcgcgtccgtccagccgtttacgaggatcacgcccagcgtgaggatcaccgtgatccaaagcgcgggcgtctcggacaattgctgaataaattgagatatcgtcataaaattccttttctgtctctcccgtctcgtttacacttgtatctttcacttgtctcttttttgtatcgagcctgtaaaaacattgtaacacatcggacaaaaatttccaaacgtttgaaaatgaaaatcgaaaaatctcttgtaataaaattgtaaaaaatttgtctgaaaatagaattttacgattttacaaaaaatcgtaaaaaagggtattgacaaacatcggaaaatgtgttataatatctttaacaaaagaaaaaatgtttgcgacccgaaagggcggcaaacgagggagtaatttgcggctcgcgtcgtgcgcggaaaagcgcggcgaggcgtaacaatacccgtcaatcgacggcaaacgtaacgccgtccgggattgttttcaaaaatgagactcattcgtcgtgcgttgtgcgtgcggggtgtgggtcttttttcaagcctcgtgcaccgcttttgtgaaaaatcggcataccgcccgaacgggccgtcatacatttatctgtatattatcatattataaggaaaaaataactatgatctttgctttcgttaccgcggtgctttttctcgcggtgattgcagtcggcgtcgtccttttcgtcagggcgcaggtaaacaaaaaaaagagaacgggaaagcgcggcgcccctgcggggctttccctctcgctcgtcgcggcgggcgcgcttttactgattatgattcccggctctttccataccgtggaggcgggagagatcgccgtcgttaaacggctcggcgtgatcgttaaaaccgaaacctcgggcacgtatttcgatttttggctgacgcggagctatgagaaatacgacgccaaagtacagcagctggaaatcaatacttccgcttatacctcggacgcccagcccatggatatttctatgaccgtacagtttcagatccgtcaggacaacgtacaggacatcgcaatagattacggcagcttaaccgccttgaccaaccgtatccagagcgtggcgatcgagcgcaccaaagcggagctttccaaatatcaggcggaagtgctgatcgctacccgagaaaacatttctccgtccgtggaaagcaccatctcccaggcgatcggcgataaatattacgttaccttcaaaagcgccgtgttgacggacatttctttctcggacgcttttgaagccgccgtcgaagcaaaaatgatggctcagcaggaaaagcttcaggcggaatacgaaaacgaaaaagcaaaagaaaaagcggataccgccctgtatgtcgcagagcaggaagccaaggctctgctcgccaaagcgcaggctcaggcggacgccgacgtcgcggcggccgaggcggaagcaaaaggaattatgcttaaaagcgtggaggtcgcccgcatgctgggttataccgtcgaggaaaaaaaggaaaaagacggcgaaacggaggttaccgtatataccattgttttcgacgatttacatacgggcaaggatattgccgaatacatgaaatatatagagtatttgtccaaatgggacggcaagctcccgcaagtggtgacgggcgacagcggaatcatgatcacggtgccctcggacggtacttcgggaaaataaacaaattttttaatacaaagaaaacaggcgcggatatattcaccgcgcctgttttcgttttgtcttaatttgcttttatttgaagtccaccgtaaacgtggttccctcgccgagcacgctctccacccgcagcggccagcccgccttacggcatatttttttcactacggcaagccccagcccgaagccgccgttttttccgttatgcgatttatccacggtgaaaaaacgctcgaaaatacgttcgagattttcctcggcaatcccgattcccgtatcccgcaccgtcagcctcgcgccgccttcgtccctgcgtttaagccctacataaaggcttccgtcgtccttgttataacgaatcgcgtttcggattaaattccccagcacttccccaagccgttcgtgtcggctcgacaccgagatatcgggatcgatatcctcggtaagagcaatattccgcttggcgatatcgggggccaaaatatcaagcgtctctttcgccagcctggaaacgtttacctcataggagggaagttcgtcgttatcgatttcgttgtaattgatgatgcaggctatcaggttggaaagcctgtcgctctgctttaccaacgtacgcgccgccgccttcgtctgctccgcgtccagcacccccgtggaaagcaattccgaatacccgcggatggaagtgagcggcgtgttcatttcgtgcgtaatattggcgataaagtcgtttttagaccgctgcgcacgttctaccagctccttttcctccgaaagctccttaaactgctcgctcacttcgcggttgcggttgttcaaaatatccacgattggctgcagctcggaatattttgtggaaagggtgagattgagggcggcgtctttggcgagttttctgacgggattgatgatgtattccgtctcgacgtacgtaaaaagcagacaaacgagaaaatccagcagtaacacccagacgatcgtgggcaggactttggcaaacatctgccattccgacgcgcccgaaacggcgagccgcacgagatagaccttatctccgtccgacagcttacggcagtaatagatcatatcctcgcccaaggaagcgctgtggcggacggaatagccctcgccctttgacagggcggcaagcacctcttcgcggtcggcatgattgccgagatcttccctttcgctgtcgccgagcacgtttccctcccggtccataaacgtgacccgaagccccgaaaggctttgagaaaacgcatttgcgccgacgtcgtcccaggcatattcgcccgcgtcgaaaaggttcatatatactttcaggctctcctttcggttttccacgaggccgccgtaaaagacctgcgtcgaaagtaccgtatagattatcagcaccgccgccatgatcaattgagatatccacaatatttttttacgcatcgctttatccccgtccgtttacaaaaaacggatagccgcaaccctgccctatccgtttcttacgttcagctttttctgaaacggtagcccacgccgaacaccgtctcaaaattgtctatccccagctttctcaaccgcgcgatatgattgtcgagcgtccgcgtctccgtatcgacgtacccccatatttccgtgagcagcgtatcgcgggaaaggacaatatccgcgttgcgcatgcagtatttcaaaagctcgaattcttttttattgagctcgagcgggcgcgaatcgagcgtaaccgtcatggtatcgctgttgagttccagcctgccgactttcagcacgttgtttcccgccctgcggcggagcgccgccttgacgcgcgcgaccaattccattacgccgaagggcttggcgatataatcgtccgcgccgaggttaagccccgtcaccttatcgccttcctgtcccagtgcgctgagcatgatacaacacacgctgggataacgttccttcaccgatttcagcacttccaggccgttgccgtcgggaagcatgatatcgagcaggacgacgtcgggcgtctgctcccgcagccccgccgtaaaatcgcggacgcacccgaacgtacggcaggtcagttgttctctttccaaagaaaattttatcaaccccgcgatgcttgcgtcgtcctcgaggacatatacgatgcctttcactttgccacctcggaaaaattttttccaatacgagcgttcagatattgtcggtgctgtgcgcgatatagcttaaatggtctccgatacgctccagattggacaccagattgataaatacggtattgttttcgggacggcattccccgcgccccatgcgcgcgatatggtcggctatcagttcgcggcgcatatcgtccacttcgtcctccagcttatccgaatcgctcatcagggtatattccttatccaacgcgatacgctttaccagctcgtactgcttgcgcagcaggtcgtgcatagccgtcaccttttcccccacgaccgccgaaaacgtcaggctgtcgtttacttccttgcgcgtatatttggtgaggttgtccgccagctccgagatacgcacgatatctcccacgtcgttgtgcagcgcgctgaccagcttttcgtcttccagagaaataccgctcgccgaaacctgtacgagatagtcgctgatctgtccgctcaaatgagagatctcttcgtttttcgctatgaccctatctaaagccgtgatatcccgttcgataaagccgtcgaacgcgagctgcaagctctccatggacatatccgccatacggaaggtctccttcgtcagctgattgattgccagcgcgggcgtcgaaaggaaacgcttatccataaacgtcgcctctacgggcttcttctttttgtcgggaataagcagcgtggtcgttttcaccagaattttggtgaacggcaggaacagcaaggtgcaaaccgtattaaacagcgtatggaacatagccagctgagtgccggggtatgcgaaccatttttcaaacgtattctgctgaaaggtcggccagcaaagcaacagaatcatgaagatcaaagtgccgaacacattgaacatcaaatggattaagctggcccgcctggcattggtattggcgccgatagacgaaatgagcgccgttacgcaggtgccgatgttggagccgagaataatatagagaggcgcgtttccgcccccgccgatgatgagtccgttcgccgccatcgtgatgatgacgctggtcaccgcactcgaggactgcaccaacgcggtaagcaacaggcccacgcccaacaataaaaagggattttttatcgtttgcagcatcgactgaacgctttcgttgcccgcatatcccttcatcgtccccgacatgacgcttaagcccataaacacgagacccagccccgccaacgcgaggccgcagcttttcaccctgtcgtttttggaaaacatctccataaacacgccgacggcggtgaacgccataaaaagcgtatctatctgaaaagactgcagggcgacgatctgcgccgtgatcgtagtgccgacgttggcccccataatcacggccgctgcctgattgagcgacatgattcccgcattgacgaacccgactaccataaccgtggtgatggaggagctctgcacgacggccgtcgtcacgacgcccattcccacgcccaccatctttttttcggaggttttgttgaacagcgatttgaggcggttgcccgcgatcttctccatattgtcgctgagcagcttaaatcccagaaggaacgcgccgcaccccgcgagaatcttgatcaccgcataaaatacttccatttattactcccttgtaaaaacattacatccgtattatacaatccgtttcctttaccctctaattatataataccttgcggcgaatgtcacctcaaagttgtaataaaaatgtaaaaaaactcgaaaaatatcggtttttgtattttttatcgataaaacagtatcggttatccgttttccgtattgacgtgaacgcccgtgatggaaaaaataacccattccgcaatatttgtggcgtgatcgccgatcctttcgagatacttgctcacgagcatgagatcgagcgcgcgctcggcaagcttttcgtcgttgcggatacaatcgagaagcacgtttttggctccgttgaataaattatccacctcgtcgtccgatttgcagacttttttcgcaagctccagatcggaattggtgaaggagagcactgcctcgtccaccatacggatgacggccctgcccatgcggtcgatcagttcgatgtgatagcccgtgcccgtgcggccgccctttgtaacgatctccgcaatatccgccgcaaaatcgccgattcgttccatatccgtaatcatcttgagcgccgaagaaatcatgcgcatatccgtagcgacgggctgttgggtgagcagcagctttaagcagagattttctatcgtgcgttcggcgtcgtctataatacagtccttattgatgacctcctgcgcgagcaggagatcgtcctcgacgagggcggtcatcgtgttttttatggcgtcttcgatgtaggcgcccatccggagcatgtctgttttcaattctttcagttcgcttaaaaaagtagtacgcatatcctcttacccgaatctccccgtgatgtagtcttccgtccgcttgtctttggggacggaaaaaatttgctcggtagctcccatttccaccatttcgccgagcagaaaaaacgccgttttgtcggaaatacgcgccgcctgctgcatgttgtgcgtcaccatgacgatcgtgatgctttttttgagctcggcacacaattcctcgatctttcccgtagaaatgggatcgagggcggaagtcggttcatccatgagcagaatctgcggctcgacggcgagcgcgcgggcgatgcaaagccgctgctgctggccgcccgaaagccccagcgcggatttattcaggcggtccttaagctcctcccacatcgccgcccccttcagcgaacgctcgacgattgcgtcgatgtccgactttttgcgtatcccgaaggtgcgggggccgtaggcgacgttgtcgtaaacgctcatggcgaagggattgggccgctgaaacaccatgccgacgtttttcctcaacatggcgagatttgcgccgcgctcgtaaatattctgtccgccgatttgtatcgttccctccaccttacagccttccacgaggtcgttcatgcggttgagcgatttcaaaagagtggatttaccgcacccggacgggccgatcatcgcagtgatctgccgctcgggcatggtcatatctatctctttaagcgcctgaaaatttccgtaaaagaggttcattttccgcacttcgatcgccgcgcccttttcaaatttgaatttatcgatcgttttcatagccttttaatcccgttattcgttttccgacgcggcggccgcaagctttgcggcgacggcgttccttttcgtatccttccttaaagcgcgggatgtctttgcgtcccgctcttctccgttcgcttttcgggcaaattttttctgcaccagcgtcacgagcagatcgagaatcaacacgatcgccagcagcaccaccgccgtcgcgtacatcttttccatggcgagcccttccacctgaaagcgatacatcatcacggcgaaggtggagcctgcgccgccgtagcccgacggcatacggatagacgatcccgccgtatagatgagggccgccgattccccgacgatccggccgatgcttaaaatgaccgaggtgacgataccgcggagggcggagggcaaaacgatcttaaaaatcgttcgcaccttcgacgaaccgagcgcaagcgagccttcgcgcatactgtcgggcacttccctgaggctttcctccgtagaacggatcaccgtcggcaaaacgatgagcaccatcgtgaaggaccccgcccacaggctgtaccccaggccgcagatattgcagaaaaagatcatgccgaacagcccgaacacgatggacggaacgcccgcaagcgtgtcgatgaacagccgcaccgttttgacgaatctgcttccctttttggaatattcgttgaggaatatggccgcgccgatccccagcggcagggcgatcagcaaggtcataaaaatgatcagccccgtcgaaacgaaagcgggaagcagggtttcgtcgccgtttcggctctccccgaacaggaaatgcaggttgagatgcggaatccccttgacgcagataaacaggacgagaaaggtcagtacgaaagcgataaacagagacaaaacaatgctgatatatttcagtaccttctgcgaagcgccgcgctgcttatagacatataccttttccgcggctctatgctttccgatttttccgccgaacagtttattgccgcctgctttatcccgtttgatgacgttgagcgcgagattgatcagcaggacgaataccagcagaacaaatcccgtcgcgatcagcgcgctttcgtggatactgccgggagaggcgtagcccatttccagcacgatcgtcgtcgtgagggaggcgacgggcgtatagagcgtctcggggaaatttccgggcgtgccgccgatgacgaaatacaccgcgatggtttctcccaccgccctgcccacgccgagaataatcgcggacagtacccccgatttcgccgcggggagcatgacgcggaacaccgtctgatcctttgtgtttccaagccccagcgaaccttcgtaatattccttcgaggcggcttcgaggctgttttttgccagagaagcgatcgtgggcataatcataatcgaaaggacgatgatcgccgaaagcacgcccgtgcccgtctggtgagggggaagaatatcccgtaccagcggcacgatgaccacaaggccgaaaaagccgatgatgattgagggaatactcgccaaaagattgattatctgctcgaagatcccctttaacggcagcttgttgagtacggggatttttttcagcacgggcacgttttggagatttttcgggcaataaaacgccataaatacggcggtgaacacgccgagcagtccaccgaacagcaccgagccgcccgttacggcgaaggaggtgacgatcataggcgcgacgccgaaaatatcgctgaacttatattcgccgttccaggccttgtcttcccaggtaggcttccagcccgtcccgaatatgaaattgaaaacgcccacttcccggaaagcgggaatactgcggtagagcacgaaaacgatgatcgcaaataccgcgaatatggaaaacgccgcacagaggccaaacgtcacctttgccgcgttttcttttgtaatagcgtcctttagttttctcattgcgttgaatccgatgggaaatttcccgtttcagcttattttactgctttgatataaccgtctttttcgacgatcgcctgcccttccgcggagaaaataaagtcatggaacttctgagcggcttcgcttaaggtcttaccctctttcgtcaaaagaaggaagggacgggaaagcttatacgcgccgctttcgatattggcgacagtggcttccactccgtcgtatttcaacgctttcaccttttcgctgagagagcccaaagaaatatagccgatgagattggtatttcccgcggtagagatctgggtgatcactgcgcccgtggagttttgcgtctgaacgcattttgcgaagctttccgctttatccagcgttttgccctcgctgttttttaccagctcgtcgaacgcgccccgcgtacccgagcccgattcgcgggagatcgccgcgtttaccgtcccgatcgccgttccctccgcatataagccgtaaacctcgtcgggcgtcacgttgtccagcgtacagcccgtattgacgatgatcgcaatcccgtccgtggctattttttcagccttgatccccgtttcgctgtctttcagctcgcgggacgccatgccgaaatcgtttttatccgtctgcgtatcggaaacgcccacgccgctgccgccgccgttgacgacgatctctatatccccgtgtgcttcctcgaacgccgcgccgagcttttccatcaagggctgcacggaggtggaaccgctgagcgtcacggttgttttatcgctgccgcaggacgcgaatgccgccaaggtacccatcgtgaccgccgccagagcgatcgccataaattttctcgatctcatagttttttatctcctttaactttgtgcctatatcataaaccctatttgtaaaaaagtccgcacggatttgtaacaaacaagtaataaatcggtcacttttttgttacaagtgtaataaatatttttacaatttcccctctttgttccatacgcgctctttcgcttgcctttttcgcgcatatgtgctacaatacattttgttcgcccgcctgtccgcagggcgcgcaagctttactttcagtttcggcaaaagagagaaatttatgtccaacaccttttcttccaaagtaaaaaaatttttcggggaatggaaccttttcgagattctgctcctgtccgtcagcctcgtttccaccgtcactattttctgcctcggcaaagaaaaaagcgtctggtcgcttttgtcctccgtttcggggatcgtctgcgtactctttacggccaagggcaatcccgtcgcacagtatctgagcatcattttcgcaattttctattcggtcgtggcctatcagtcgaaatactacggcgaaatgctgatctatctctttttaatgacccccattcatatcgcctgcatcgtgtcgtggatcagaaaccgccgcgaccccgaatccgccgaggttaaaatcaatcttctccgcccgcgcgagtatattattatgggaataggcgattgtctcgtcaccgtagcgttttatttccttctgaaagcgctgcataccgatcagctgatcgtcagcacgatttccctcgtctccagcgtctccgccgcctatctcatgctgcgcagaagcgaatattatgcagtgtgctttatcgtcaacgaccttattctgcttgtcctttggggcctgcgcgtctataattacggcgtcgcctcccttccgacgctgattaccttcgccgtgttcctcgtaaacgacgtctatggcttccttgcgtggagaaaacgcagaaaaaaacaaacggcgcccgttgcggctccctgacgtttcctttcctttttttgctttgcttctcttaactgcaaaagcaaaaccgcggacaatggctcccgcggtttttttataaacttttctgcctctccccctttacaaacgcttttttttatgataaaatataaatgattgaaaaaaggaaaaaggagaaagcgatgatctattctatcgaaaacaaaattctcaaagcgacggtcgatacctcgggggctcagcttcagtccatttattccaaagcgacggagacggagtatctttggcagggcgaccccgcctattgggcgggcagagcctataaccttttccccacgatcggaagaatgtataaaaatacttatacgtatgacggaaacgaatattctctgcgctgtcacgggatcgcccgctaccgcgcgtttcagctgaccgaccgcaccgccacaaagcttaccttccgccttacggaagacgaggacagtctgaaggagtatcctttcaaatttgagttttttatccgttatgagctgaaggaagcgacgctggaaatctcgtttatcgtaaaaaacacggacgaaaaggagctgatttttgcgctcggcgggcatcccggctttaacgttcccttcggaaacggcgccttcgaggactattatctcgaattttcggaaaagacgaaggtgcttttccataccctttcggaatcgaagtttatgacgggcgaaaaactgcctctgccgctgacggagggggtacgtctgccgctgcggcacgagctgttcgacaacgacgcggccattctcggcaatacctgccgcgaaatttctttgaagagcaaagcggatccccgctacatcacggtaaaatatcccgatttccgctatctcggcgtatggcacacgcccgaaacggacgcgcctttcgtctgtatcgagccgtggtccgccctccccgcgacggacggcgtcattaccgacctttccgcaaaagaggacatgacgaggctggccccgggcaaaacctataaaaccttgtggagtatcgaaatacacgaataaatccgaaaaatacggataatcgtatccgacggcaaaagcgccccgctataaaatcggggcgctttttttaccaattttgttccttcaagctgccgtttctgtacgcttcgagcagcgtcgtcaagtcggctattcgctcccgcagctcctttcccgcgtcggtatcttccgttcggagacggcgcggcgaccttgaaacgatctccgccgtggaatgcatttcccgctcgcttctcaccgcttcttcggtggagacaaacggctcgtgcgcgatgagcttgaccatgcgggaatcggatacgagggtatagcccgcgatccccgtcacgccctggtacgcgtgggaaaagccgccgtctatgatgatgagcctgccgccgcaatgaacgggagattcgccctttttcactttaacgggtacgtggccgttgataatgtgccccctttccatatcgatgccgaactccgcgaaaatacgcttcaccgtcgcttcgtcgtcccaaaggcggtaataggcatttttttcttccgtataacattcggcgtccgcgataaaataccgctcgaacgtggccatcttgtctttgccgtaaaggggggacttttcgtttgaccaaacaaaccacattacgtccctgccgtaagcccgttcctttgcgctcgccgagtacctgcctttccgtatccacttttcaaggacgtcgtaaagcgcttttcccgcatagcttttcccggcaatttccgcgcttttgaagctgccgtccttctccagcggtatgcagccgtgatacaaaagatttccgttacaaatgcggtacatgctcccgcaggaaaagagaaattcgacatgacggcgcaatttttcgcttccgcggaaggcctctttcaacctcgcgcatacccgcgcttcccctgccgtcagctcgtagggacgggcgggatctacggtaggaaaataggcgtccgcgagcggataagttttttcgccgaccctgacggtgcccttttcccgatcgattttgtcgagaaaaatccgttccctcataccgaactcgggccgccgcaaagcgagctgtccctcaagcttcagttgaatcacagcgatcgccttatgtattttcgccgtcagcgcgcgttccttttcgtcctctcccgcctcggggtaaaaccttgcgcagtcgtccccgccgtaaatttcggaggcaaaacgctccaggggaataaggttgatgccgtatccgtcctcgagcgtggataaatttccgtagcgcgccgaaatgcgcacgacgttggcaatgcagatctccgagccgcttgccgcgcccatccaggaaatatcgtggtttccccactggatatccaccgaacgacggttctccagcgcgtccatgacggttacggcgcccgcgcctcggtcgtaaatatcgccgatgacgtgcaggcgttccaccgccagcctttggctcagttgacaaaacgccgcgatcacggccttggcccgtcccgtcccgaggatcgcctgaatgatcccgttataatatgcctctttgtcgggcagctcggccttttccgtgagaagctcgtcgatgatataggcaaattcggacgaaagcgcctgtttcagcttttcgcgggaatatttggacgcgactctgcgcgtcacccggatcagccgcaacagcgccgtacggcaccaatcgccgaaattttccctctcgttttcttcgatctccagcttttcggcggggtaatagatgagggtggcaagctcccgcttttccgactccgtcagttcctccgaaaattcgtcgtctatcttttttcggatagagccggaaccgcttttcagcacatgcagaaaggaggccgcctcgccgtgtatgtcggaaacaaaatgctcggtgcttttgggcagattgagcacgctcgacagcttgatgatctccagcgcagtccgcgcggcgtcgggatattgagcggataataatttcagatatttttcgccttgcatcttttcctctttttaattatgccggcaggcggggcgcgggcggggaaacagctccgcgtcttcccccacgatactgccgatggcaaagggttttccgtccgccgtatagagaccgtctgtttcaatgccgagctcggcgtaacgacctgcgattttatctgcggctgcttgcgtaaatatcgtgtcctttacgagatagtaggcgtctaaaaactcattatctccgtaaagggacagctttacatacctttgagaacgggtccagaccgcatacagcgctatttccccgcaatcgggaacaaggccgtcgaaaggccgttcgccgtcccgatcgtatgcccagcccgaaaaatgatagacgggctccgaagtcggctcgacccccgtcgtcaacagttttgcctgcgccgctttttcgttgagtttgataaaagcattttccgcgttgtccagctcggccgtttcgcccgattgggtaccgacgaggaccttgtccgccacgggaaaaggactattgaaatgcagataaaaaaggacttcccgcacctcctccgaactatccgacgaggactcttcctcaggagaatcctccgaagaagctccgaacgaggaattttccgcttccgaggaaaagttcgaagcttttccgtccgtgctttcaaaaccgtccgtttcgtcgcgcgagccgttttcggtttcttcgctcaaccggtcggcgctgctgtttccgcggatttccgcggctccgccgcaggcgcccgcagacagaagcaacgcgagcaacactgccgaaatcacccttcgacgtcctttcatatcttcctcccgtctctatcccgataaacgttttctttgcagcgacggacaaaactccgccttgaaaaatttcccgttgttcctttttaataaacgctctctcctaccaaaacgggatagactttttccccttcaacggtaagataacaatagccgccgccctcgcccgcgggacggcgaagagagccgggattgacgagcaatacgccgccttcctccgaaatatcggcgcggtgggtgtggccgtaaagagcgacgcggcatccccgccgccgcgcttcttccgcaagagaggatagctcggatttaacgcggtatctatgcccgtggcaaaaaaagattttcacgccttccacttccagctcgccctcggacagagcggggacaaaatcgcagtttccctgacagacgaatactttttcggggaacgcattgacgacttcgcgcatgtcgcccgccccgtcgcccagatgaatgacataatcgttttccgaaaacaacggcatcagcctttcaattccttccctatgcccgtgcgtatcggaaaaaatgatcatcgttttcatttttgcttccgttttacagcccgtccttcagcatttcggacagcttttgaagggcgcggaaacggtgggaaacggcgtttttttcctcagccgaagccacgccgaacgatttgcccagatcttcgctttcgaaaacgcaatcatagccgaagccgttttcgccggtttcttcataaagaatatttccataggtgcggccttcggctatcagacattttccgtcgggatacaccagcgcgatcgcgctttggaaatatgcccgacggtttctctcgtcctccatatttttcaaaagcagcaagcggtttgcccgatcgtctccgtgtccgcccgcatagcgcgcgctgtaaacgccgggcgctcctccgagcgcctccgcgcacaagccactgtcgtccgccaaagcgatacaccccagagccctcgccaccgcttcggctttcagcctggagttttccgcaaacgtttcgcccgtttcctccacttctccctcgaagcccgcctgttttgcggagattacttcatagtgcggaaatatctcggcaatctccctcagcttgttgacgtttcccgtcgccaccaccagtcgtttcttttcctctttagccgccatattttactccttcactactttttcgtaagcgatccgttctccgccgtaggcgggataaatcaccccgcactcgataaaaccgttctttttcaacgcggcgcgcatggcgaggttatccctgtgcgtatccgcgcgcagacttttacgcccgcaggaacgcaccagcgattcggcaaaggcatataatttttccgtaagtccccgccgcctgaatttttcccttacgcaaacgcgatgaacggcgagatattccccgctttcgcccgtcagccatgcgccgccgtaaattttatcgtaatcgggctcccgctccacgatcgccatgccggcggcgggttctccgtccgccgttaaaagataggatgcgcacgattctatatcctcaaaaacgttttcgaggacgggatagttatcggtccactgatcgacgcccgaggcgcgcagaaacgcccgcccttcgtcgtacatcgcggcgacggcttccgctttcgcaaatgtcgttttcgaaatttttatctccatagcttctctattatatcatatttttccgtcaatgcaaagcgtttgtttcccgtcttggacgaaaaaaacggacgaccttaaggccgcccgcatatttttcatatttcttcgcccttgattttcagacgcatgcgcagggagttgagcaccgccagaagcatgacgccgacgtccgcgaacaccgccagccaaagcggcatgacgccgaccaccccgagaaccataaacgcgactttcataaagatggaaaacgctatgttttcggtgacgatcctgcgcgtctttcttgcgatccgtatcccgcgcgggatagctttaaggttatcggagacgagcaccagatcggaagcctccacggccgccgcactgcccagcttacccatcgagaccgagcaatcggccgccgccatcacgggcgcgtcgttgattccgtcgcccacgtacatcagcgccccgctctttttgagctgttccgctttttccagcttctcgtcgggcagcaattgggcgtttacctcggacatgcctatctcttccgccactttttcagcccgtgcacggctgtctcccgtcagcattaccgtccgcgcgatccccaaggctttcagctgcgcgacggcctctttcgtttcggggcggagcttatcgccgatctctatccggccgagatatttcccgtcccaagccacgtaaatgagcgtataagggctgtcggcctcggctgcctccacgccgttttccctcaaaagagcggcgtttccgaccaggacggttttgccttcgacctccgcggcaacgcccctgcccgcaagctcgcggatattttccgccgcataggccgtttctacattcttaaaagccttggcaatcgggtgggacgaacctttttccgctgcggcggcgattgcaaggacttctttttccgatacgcccgaggcgacccgagtaccgcagaccgcaaaatttccttccgtcagcgtacccgtcttatcgaaggcgatcgcacgtacttttgcggcggtgtcgagatacgtcgcacccttgaccaggataccgttacgggcacagcttccgataccgctgaaataggtgagcggaacggaaataatcagcgcgcagggacaggaaataacgaggaaagtaagcgccgtctctatccagcgggagaaatatcctccgtagccgccgccgttgataagcccgaggaaaacggggacgagcaccgcgatcgccgcggccaggccgcacacgatcggcgtatagtaacgcgcgaatttagtgataaacttttcgggcgccgcctttctggaagcggaattttccaccaaatcgagaatcttcgccacggcgctgtcctcgtaggcgcgcacgatcttcatttcgaaaacgccccccgcattgatacagcccgacagcagctcgtcgccctcgtttgcctcgcggagcgcagcttcgcccgtcagagattttgtatcgagagacgcactgcggctgagcaacactccgtccgcgggcactttttcacccgcttttaccaaaacgacgtcgccgatcttcaaattttcgggctttacgctcctctgttcgccgtcctccaaaaccgttgcgttttcgcttttcaaatccatcaaagcggccacggaacggcgggacgaacccaccgcgataccctgcaggagctcgccgatctggtaaagcagcataaccgccgcgccctcggcccaatcccgcaggcaaaacgcgccgatcgaggcgacggtcatgaggaaattttcgtcgaaaatctttcccctgactatatttttcacggtggaaagcaatacgggatatcccacgatcagataagccaggatataggaagaatattcgaacgcccgaacgagcgcggtttttccgccgaaatgctccagcaaaaatcccgccagaaacaaagcggcggaaagcgcaatctgtaaaatttctctaaaatgcgattctttaggaggcgcggccaattccccgtccagcacttttactttatcgaaacgccccgccgccctgacgaccttccgcacggcgtcctcgttttccgcgtcgaggaggatcgtttgagagacgaaatccacgctcacttcctttacgccttttatttttcttaaaatgtcctcaagatccatggcacaagccgcgcaatgcaggtttgccagatgtaaaagaatttttccgtcctcgagccgcccgccgtccgcaatcgacgtctcctctaccacttccacttcctcgaagtggttcgccttatgcttgacgagcgcgagcgtctcctccgtatcatattccaccgtcaatttttggttgacaaaggttacggaaacaaagcttacgcccgccgtagcggcaatttcttcttccagctcgcccgcacaagcggcgcagtccagacctttcagctgcaaagtctttttcattttagtcctccaatttgcagttcagatgttctttgctgatctctatgagctttacgatatgatcgtccgcaatcgaatagagaacgttttgtccctcccgccgcgatttgattacgcggttatctttaagcacgcgcagttggtggctgacggcgctttgcgtaccgccgcacgcctctacaatatgatagacgcacatttcgccctgtaaaagcgccagaacgattttcatcctcgacggctcgccgataatccgaaaggtattgcacacgctctcgaggtttttggcggtaggcatgttctctttggcgcgccgtacgacgctttcatgctcggtttcgtattcgcagttttcttttgtcataagtttagtttctccaatatatgaacaactattcatagtttaatactttcattttattttgtcaagcgtttggaagatattttttgatttttacagaaaaaaccccgaagcggattccttttccgcctcgggatttttatatagctctctacttttcctctccgttactccgcaattccgcctcgaagcgggaaacaaacatcttatccttcaaataatcgagcgccccgcccgcagcaagacgcaggctcttggctacgaggcactgtcgggtgagcccgaaacgccgattttcttcggaaaagccgtatttcgtatcccccgcgacggggcagccgatataggcgaggtgggcgcggatctgatgcgtcctgcccgtatgcagaacgatttttactttcgtatattccttttcccgtttcagaacctcgtattccgtcacaattttttccgcacccgctacggggccgccgaatatatgcacccgcgctttttcctcgtcttttttaagataggcggtcaatcgttctccgtccttttcgaagaggccgaagcagagcgcgtgatatattttttctacgcggcgttcacggaaagccttttcaagccaaaccgccgcctccgtccgaagcgcgaaaatcaaaagtcccgcggtgttcctgtccagacggtggataaaaaagcattttcgttcccgcgagagcgcggcaaataccgcctcggaattgacgccgctttccttatcgatcaccagcacgttttcatcctcgtaaacgggataaaaagcggactttttctccttttcggacggaagataataagcgactttatcccccgccgcaagaaaaacgttttctcccgtcttttttccgtttattttgatctctttatttctgatcagataattccagaaaaaagagccctgcgcataggtgttgtcggtaaattctttcaaggtctgcggtttctccgcaataaattctttcacttatgtccttcccgaagtttttaatcttttcgccgcgcgcgggcctttttccgcggtgtttttcttccgtctcgtctgtttataaagctttctgcccagcacgtatgcccctatcgcaagcaaaaccgccatgcctacccccgctccgcccgcgaggaaaaaatagacgaggtacgcgcagagaaacgcaaacagcatctgcatacccgcatagccccaggcggtctttcgtcccaattcccgcgcgcaggcggtaaccgccgagatacagggcggaatcagagccacaaaggtcagatacgcacacgccgacggaaaggaaaaggaaatcccctcggggaacagcacggagagcatgcccgcgatattttcctttgcgatgatcccgctgaccgcggcaaacgcggcccgccaatcggtgatgcccatgggataaaaggcgtacttaaatacggagcagatatgcgccagaaagctttcctccgcggaacacacgcccgaaaaagaaaaggacgaaagaaaccagacgatcagcgtaaacacgagcacggtcgtcgatatttttattataaactgttttatctgaaagagcaacttttttgcgacgaaaaatacgtcgggcatgcaaatatccgcaatttccatcaaaaatatgctttcgtcctttttcaaaaacgccgcgacggccagccccattcccgtgcccagcacatacaacagtacggcgcccaaaaaggtgttttcaaacacggaggaaaggagcgtgagatacacgggcagcttcgcgctgcacggcacgaaatagagacaggaaacggcccgtttttgaatgcttttttcctccaatgcgcgcgtggaagtgattgccgcggccgtacagccgtagccgagaagcaccgaaaatgccgcccgacccgaaagcccgattttggaaaacagtccgtccgtcataaacgccagcgcggacatgaagccgctttcctcgagaaaatcgagaaacagatacatcagcgcgatctgcggaatgaaggaaagcacgctccccgccccgccgatcagcccgtcgcatacgagactgcgcacgatcggggaatcgatctccccgcccgcaaattccgccagacggccgatcagcgtttcgaacgtatttttcagccaaacgccgggcatatgcgccccgaacgtaataaaaaaaacaagccccgctagcagaaagaaagccggcaatgcaaaaaatccgtttaacgaaagtttagtcagccgattggcctcgaacggcgcgggagaataacactcggaaaaggacggctgcgcaacaaatgcgtcggcgtcaaacgtcctttctccgacggaggaacggagacaggccgctttatagcccgataacgcggggaaaagcgttttgagatattccgaaaattcgcgcacggattttttccgcagcgcatcgacctcgacgcatttgattcccagcttttcgctcagccgtccgcagtcgagctttccgccgcgggcacggaatttcctgcccatggtcagggcgagaacaacggggataccgcgggccaacaggctttttgtcagtttcagagaccttttgagaaaagtcgcgtccgctacctgtacggccagaacctcccctttctgccgattgatatattcccccgccagccgctcctccatgctcaatccgtctaaagagtaaagcccggggagatcgcagatttctcccaatcccaagcgtttggaagacgggcgggaggagacccccaccgttaccccgtgatagttccccgtgcggttatgcgcgcccgtaagcgcgttgaacagggtcgttttccctacgttgggatttcccgtcaaaagaattttcacgctttcgcctctccttgcgtttccgttttgtcaatcctgacgacgaatatcttttccgcaaaattgcggcgcatgcctatccttacgcaatccgcgcggatcagacattcctgcccgaaaaaggcccgtttcaaaaagcatacccgcgcgcccggaaaaatgcccagcatcttcagccgttccttcacgtccttatccgcctctatcccgaggatctccgcattttcgcccgctttcagctcgttcaaagttatcatagaaaaaatatatgcggccgacgggaaaacatgtccgatttttggaaaaaatataaaaaaacacccgcttccgagcgttcggaaacgggcgcttacagacttatttattttttaggtttatcgagctcgtcaagctcctcggccgccttcgattttttgtccttcctgtccttattgttctttttggattttttgcccttgccgtcctcgacgtcctccagcgtttcgtcggagggtttgacgacaagcagaataatcacgataatcaacatcaccgccgcaacggagaacagaataacggacgcaatgttattcttcagccactccgtttcgcccgcaatgatatccctgggagcttctacgttgatggccttataggccgcggccttttccccaaacagctgcgaatcggtaaacaccgcaaacatcagataggaaccttccgcctgtggcttgaaggatttcgaagaggaataccactggtaatcgttatcggagttcttccaatcgtcggggtgcttgtcctcgtcgatcgtagaatcgaattcctctatcttcctcaagattgcgtcgttctcgccatcgggcttgagaagatcctccgcgttgagttcgatccccagcctttcggaaagcagcttcgcatacagcgcagcgtagtatccgacgtaatcgtcgcctttgacttgggacagatccgcttcctccttaagggattcgaaagagacggaagcaagctcgtttaccgaaaaggaagtaattttatatttcttctggaatgccgcaacatcgaagaagtaaagcccgtattcgctcttataccccgaaagccctaaaacggtgaaatcggacagattgtaggaaacgtcgatatagcccgtatccgcttccgcgtttttgggttcctccacgctgatgccgttgttggagacggagaaggtgaaagacgggatggcttcgatgtcccagatgttgtcgcccgttaccttcgtcttgtatttgtcgaggtaatacttcatcgggttgcccgctttgtccgtggcgagtatcttaaactcgtacatgccgacggaagaaacggtaagcttgaggttatcatagctcaaagaagtggaggacgacgcgctgtcggaggactgcgtcttgtaataaatgctgtatttcagatttttatagttggtatcgtcgtcttgaatcagctttatcggcgcaggcagataaatataggaattggaacccgcatacacctttttcgccgcttcggtaaccgcttcctgatacgacttatacacttcgttttcctcgtcgagcgtgctctctttagcctcgtcgtcgttggtgatacaggtataatgcggccccaccgcgtttcggtcggctttgatataatcgatctcggaatccgtttcgggcttgaagctttcggtcgcataccaggcaagctcgtaaaccgccgcgtcctcgtcgctcgtaaaggtatcgtccgtcagcttaaaccgtacggaaatgtattccatacggtttgtcttatagacgtccgtatcgaagaaatatgtgctggtggaaagcgttttatattccgcgcccttcgctttctcctccccttccgcaactgcgaaatctttcggggcatactgataatactccatcgttttggtgacggaagtgtcgatgacgtcgattacctcgtaatcgagggagaacggcgtgcccagcgtaaaggaagccacccgctcgttgacgacaagcacgggtttcgcgttgtcggtaatcttctggtcggcgtcgagttcaaacgtttggccgttgagttccttaaatataagggtgcttttcgccgcgtcaccctccgcgccgtcaggcatttccgccttaaaggcaaacggcaccatgggcgtggtggccgaagcggaaaaatattcggcaaagtcggcgccgacgtcttcgaacataccgatcgtttcgccgttgagcgtaacgaaaaattgtccttcctcggcactattgcttccgtccttctcggagaacgcgagggcgatatccttcgaagtggggtcggaaatttcctttgcctcgccgtcgttgaccttcgccgtgatcttaccgtcggtattttcaaaaagaattttattgacggactttttatccttgttcgccgcggcgggagccgtttcaaacgtcagggtaagcgtcttgaaattggtatccttaaacgcaaatttcatcgagagatattgcgcttcgcctttcgccttgtaccatttcaacgccagatcgcgcttaaaggaaacgcttccgccttcggggaatacaaacgccagttcggtcgtcgtcgtttcgtcggccttcaccgaagcggaattttccgccgtgaagatacgggaaggcgtagcggtagccgccgccgacgctttgccgccgtcgagcatcagcacgccgccgaaaacagccgaaccgagcgcggccgcaagcagaagggttatgattttggatttatactttttcattaaagcaatgcctcgcaatttttgtaagcttttaccttttacaatattgtgctttctttattttacaccgaaacgcgacgaaagtcaaacgcattttacggtgaaataacttctttttctctttttacgaaattttcacttgatttccacggccgaagcgacgtcaaacgccttccagggcgtttcctccgcgggaggatatgccatgaagcgcaggcgttccttcgttacgggatgagtaaaggaaagagaatatgcccaaagcgcaagcttgcccttctgcgccagagcgcccccgtagcgcatgtccccgtaaacgggatgggagatccccgccatctgcacgcggatctgatgcgtccggcccgtgtgcagccgtacttcggccagcgaatacctgcccttgctctccagcacgcgataatcgagcgaggcaaattttgccccttcctccgtctgcgtacagatatacatcatattattgaccgcgtttttacgcagatagttgaccagcgtgccgcgctcggtttcgggcgtgccgcacagcaccgtgagatatttcttttcaaaatcgcccgactgcaagccttccgtgagccgcgccgcggctttggaggttttggcgtaaaccatcacgccgcccgtgggcctgtccagacgatgcaccaagcccgcataggcgtttccgggcttattatacgcaattttgagataggcttttatctgatcgagcagattgtcgtccttgctctcgtcggggcagcaggccgtcatctgaggcttcaaaacgacgatgatatggttatcctcgaaaaggatttcgaagggcggacaatagtccttttgcgaagtttcagtcattgacgaaaatgcctcccgcaccgcagggaagggaaatcccctcctcggtctttatacccacttcgtaggcgtcggcgcggccgccgcgctttccgagcgtaagcgtcagtatatttttgagaaccatgggctgcagccccgtggtatagctgttgatgaggaaaaaaagcggcttgtccgaaaggaccccggcacagagctttacgaaaggatagagatcgttttcgatcttccacatttcgccgcccggccccctgccgtaagagggcggatccatgatcaccgcgtcgtatttgttgccgcggcggagctctctttgcacaaacttgagacagtcgtccacgatatagcgaattcccgtatcgatgcccgacagccgcgcgttttcgcccgcgcgctccaccatgcccttcgccgcatcgacgtgcgtcacctgcgcgcccgcctttgcgcaggccaccgtcgcgccgcccgtataggcgaaaagattgagcactttgacgggccttcccgcaccgcggatcagctccgacatatactcccaattgacggactgttcggggaacaaccccgtatgcttgaagcccatgggcttaattttgaaattaaggccgagcttttcgtaagaaatatcccattccgcgggcatgggcttcaaaaatttccagcctccgccgccgttttcgctgcgcttataataggcgttgagcttcggataggaaaacagatccgtctgcgccgaccagatcacctggggatcggggcggagcagatatacgtttttccaacgttcgagtttatagccgtcgcccgtggcgataatggaataatccgtccaattttgcgctattttcataatttccttattttcgtaaaacggatttcgactttttgacgaaacgaacgcgacgaaaaagacataatccgacattttgacttatttattatatcggaaaagctttcttttgtaaagtatttttcccgcggaaaataaaagtaaacaaataaaaaacagaaaatttttatttccgcgggacaaagcgcgaacagcgcagaatcttctctattttatgcgaggcgattttctctgtctgtcagccgaggcatcgaatacgacgctctatacgatatttcatatcgagcagctgcttctttatccccgttcccgaaaaagcaacagacaatagaaaaggccctccccgtcgctttgaagaaggcctttccctgttttgccgtcggtttagtttttcaccagcgtgagcgttaccttctcgccgtttatatcgacgtccctcgtatagccctccgcactgccctcctccaccgacagcgcaagcacgtccgccccgaacgcgcccgcctcgagcgccgccttcgcacggccgtccgcccgataatatattctgatgcggtcggtgacctcaaagcccgcttccttcctcagcgtctggaccttggaaaccaattcgcgttcgattccctccgcgataagctcctccgtcagttccgtgttcagcgccaccgtgatccccttgtcgctggcggaaataaagcccgctttgctctccgtaaagatttgcagatcctcctccgtcagcttcacctccgcgtcggtatccatcgcgtactcgccgccgccctgcaccgtttccacaacctttttcgcatcgcattcggccaaaaatttactgattgcgcccagcttcctgccgtacttgggccccagcgtcttgagctgaggtttcagcttgtacgaaataaattcgtccgcgtcggccgccgtcttatactgtttgatattcaactcgtccagagcgatcgccttcaggccctcgtccagagcgaggtcttttgccgtcaccacgtacatttcggaaagcggctgacggtttttgacgttgcccgcgttgcgcgcggctctgccgaggttgacgatgtccagaacgctgtccatgcccttttcgagcgccttatccaccgacgctccgtcgcaggcgggaaacgcgcacatatgcacggatttgggcgcagctttatagaaagcgggcacgagattgagatacatctgttcggcgataaacggcgtatagggcgcggtaagcttcgcaaacgtgacgagaacgtgccaaagcgtggtataagccgccgccttgtcgtccgtcatctcgctgccccaataccgttcgcggccgcggcgcacgtaccagttggagaggatatccgaaaactcctgcagcgcgcgcgcactgtcggtgatattatatacggccagatgtttgtccacttcgtcgatcaaggtgttcagcttggacaatatccatttgtccatcaaagacaatttacattttttcagatcgtatttcgagggatcgtacccgtcgatgtccgcatagagacagaaaaacgcatatgtgttccagatcgtgcccatatactttctctgcgcctcggagacggcttcgggatagaaacgcgagggcagccacggcgccgacgaggtatagaaataccacctcaccgcgtccgcgccctgcttgtcgagcacgctccacggatcgacgacgttgcccttatgcttggacatcttgacgccgtttttatcgttgacgtggccgaggacgatacaatttttgaat

SEQ ID NO: 623 - DNA, 9258 bp, Unknown
  16S sequences of unknown bacteria
tgaacggtgcaggtttgttcttttattaaaatccccgagaaaaaagtgaagaaccaataaattcggttttcgtacgcaaaccaccgggtctgaaattcagaaaaggcggcccgggtgccggtccgaaaatggaaaaaccctgcatcgtcagcaacggcttgacgatgcagggttttctcattacctattgctcaccttgcgagctgtcctcggtttgattctcgaactgggacgccttctccagtttgacttttgcggtcacttctttgccgttccgctccacagtgaaggtgacggtgtctcccaccttcttcttctgaatggcctgaattaagccgttggaggaggtgactttcttgccgtccagcttggtaatccggtcgccggacttgagacccgccttcttggcgtggctgccgtacacctcgtgaatgtacacgccggccttatccacattgtactcggccttccggtcctcggtcacgtcgagaatgctgatgcctgccgccggtttttccactatcgtgccgttcttgatgatatcgtcgataatcggtgcggcggtatccaccgggatggcaaagcccagcccttcgattccggtgccggaacccttggccaccacgagaccgatgagctcgccctttccgttaaacaggccgccgccggagtttcccgggttgatggcggtatccgtctgaagaagggtcaacttcttgccgttgatggacagctgccggtccaatgcgctgatgatgccggaagtggtggtgccgcccagctggcccaaagggttgccgatggccacggccaggtcgcccacctgcacctttttgctcttgccgatggtgacggcggtgtagccgctgccgccgattttcagaacggcgatatcgtttccttcatcgtagcccaccacggatgcagagcgggatcggccgttccgcaggcggacggtgattttcttggccccttcgatgacgtggtagttggtggcgatgtaccccttcttgttcacgatgacaccgctgccggcgccctggctaacggagttccccagcacgctcttcgtgggaacctcggtgctgatttccaccaccgcatccgcatttttcttatagatttgctgaatggtcagcttgcttccggtggcgctttccagtgaattgttgctgtccagattggaatagctgccgccgccgctcattcggcttcccaggaaggcccccaaagcggagctgaaaattaccgccaggaccaaagccaccgccagaaagcgcttcgtgacgtagggggagtcggacgccttgggccgaggcgaaggtttttttcttggggcttttttttcgccggtaaaaacaccttccgtgccgcccttggtttccgaccaaacctgagggttgacgtccggttcgtcgggattgaccaagacgaaattcggatcctcggggatggaatcaaaagggttcttttcgttcatatctatttcctccatgtggttaattattgaatggattttcacacaactctaattattataacctctcaatatgagaatcgcgtgtggattcgggagttttatgaattttctgtggggagggggaaagccgccataaaactattgataatccgagttttatgagtgtataataaccctatgtgtttaaattaagcttaaagagattgcgttaaaagaacatccttcggggtgcggaaaggagatataaatgtactgctatactaaaattcaggaagatatgtattggatcggcggcaacgaccggaagctgtccatgttcgagggggccatcccgatgaccgagggaatggcgtataattcttattttatcgatgatgagaagaccgtagtgctggacacggtggacgattccgtggttcgcgtgttcgacgacaacctgaatcacctgctgaacggccggggtctggattacatcatcgtcaaccacgtggagccggaccacagcgcgtccctgtgcgagctggtgcgccgtcacccggagaccaagatcgtggcgacctctaagatcaagaacatgctgaagaactacgttagctggaacctggacgacaacttccttcaggtggaagagggggaagagctgagcaccggaaagcacgtgttcactttcgtaaataccccgatggttcactggccggaagtgatgatgacttacgagaagaccaccggaaccctgttctccgcagacgcattcggaatcttcggcgctcatgacggaaatatttttgcggactgctacgatttcgacagagactggctgccggcagcccggagatactacaccaccatcgtgggcaaattcggaaagttcaccatgggtgcgctgaagaaggcatccggactggatatcaagatgatctgcccgctgcacggatacatcatccggaaggattttgagaagtacctggcggcgtataccgcatggggcacctacaccgcagaggagcagggcgtgctggttctgtacgcttctccgtacggcaacaccaagaacggtgcggaaattctggccaacgagctggcggcaaagggcgtggacaagatgaagctgatcgacgtttcccacacggatccgatgtacatcctgccggaagtattccgcttcagcaatctggtcatcgccaccaccacgtacaacggcgatatgttcatcaagatggaagaggcactgaccgagctgcggtccatgggcgtatccaacaagaaggtcagtatcattcagagcggctcctgggcgccgaccgccggcaagaaggttcaggagatgacggatcagctcaccggaaccgaatacgtgggcgacatggtgaccatcaagggtaccgtaaaggaagactccagagaagctctggtgactctggcagatgcaatcgcagaatcattgaagtaaagaggaataattttggctaaaaacaaagcgacgttgcgcatacgcaaccggcaatacgaagagagtctggaacccagcggaaatgcgtttgcccggaagctgaccctggatgatgaaatggaaatgattacggaagctaccgtttataccaaagaaaattccacctacatcacctatgaggaatcggagaagacgggaatgcaggacagccgcaccatgatcaagctgacgggagacatcgtggaggttcaccggtacggaaagaaaaagaagaacgacgggatgaatctggatctccatctggagaagggccgccgggaattggttcggtaccgccttccggtgggaagcgtgaatatcgagatggtgacccacgatgtgacccacgatctggacgaagaagggtttggaaagatttttgcggagtacagcatgtacttcggcgatgaaacaatgggaagccggagaaataaattggaaatgacaatccggccggaataggcaagaacgacaagagaggaagaacatgaagaagattggatttgacgcggagaaatatttggaagagcagtccagatatattcgggagcgcattacaaacggagacgggagactgtatctggaattcggtggtaaattggtagaagacaagcatgccgctcgggtgcttccggggtatgacgagcatgcgaaaatcaacctgctgcagcgtctgaaggatcagacggagattatcatctgcatctatgccggtgatatcaccaccagcaaaacccgccaggatttcggcatcacctacgacctggaagtattgagactcatcgatgcgctgcgggattacgatcttcagatcaattcggtggtggtcacccggtatcaggatgtgccatccgtcaacatgttcatcaacaagctggaacgtcgcggcatccgcacctacaagcatcggtacacaaagggctacccgacagacgtggataccatcgtcagcgatgaaggctacggcgccaatccgtacatcgaagtgacgaaaccgctggtggttgtaaccggtccgggaggcggatccggaaagctggccacctccctgtctcaggtataccacgaataccgccggggcaacaaggcgcgctatgccaagttcgagaccttcccagtatggaacctgccgctgaagcatccggtgaacatcgcctacgaagcggcgacggcagacctgaaggatgtgaatatgatcgattccttccacctggaagcctacggcaaaaccgccgtgaactacaaccgggacatcgaagcgttcccggtactgagaagaattctccacaaaattaccggagacgattcctatcagtctccgacggatatgggtgtgaaccgggtcggattctgcatctccgatgacgaagtgtgccgggaagcttcccgccaggaaatcattcgccggtacctgctggcggaatgttcctataagaagggcaaaatcgacgagagcatcctggagcgcaccaagctcctcatggaagaggttcaggccggccgctacgaccgcccggtggtaaaaccggcagaggagtatgcggaactgaagcgtcaggaagagggcgatgacgagaatgtaatcatcaccgccattcagctgccggacggcgccatcgttaccggaaagaactcggaacgcatggtggccactgccgcaatgatgctgaacgccatcaagaagctggcgggaatcgatgacggcattccggttatctccgcgcagattctggagaacatccgggatatgagagtgcggctgttccacgacaagtccagtctgaactgcgaggaaatcatcatggctctcaccatgagcaagatgaccaacccgattgcggaaatggcgctgcagcagctgccgaagctgagaggctgcatggcccactgcaccgcgattctcagcgaccgggacgagcagaccatgaagtccctgggaattgacgtgaccagcaatccggaattctccaccaacaacctttactcgaattagcgggtaaaaaaagataccagagaggagtgggagaccgatgtccccggctcctctttcgcataatagagaaaaattgagaagagaacaatgacaaaagaaaacttgaaaggaaaaagcgcggtggtgaagaacctccgccgaaaatccgtgtttcgatacgccttaatcggtcagggaattatcatcggtgtgacgaccgggctgatcatcgccctgttccgctggctcctgatctttgcggacgggtgccggaaccggctggtggcttacgccaacaccggagtgggaccggcgctcatcgccgccctggtgatgctcctgctggtgctggttatcgggtggattctgcggaaagaaccggaatccaccggctccggcattccacaggtggaagcggagctgttgggaaagaaggatatgaactggctttcggtgctggtttccaaaatcctgggttgcgccctgtccatcggcggcggtctggcactgggacgggagggccccagcattcagatcggtgcgatggtgggaaagggctttgcccggaccaacaagcgtgtgctgaccgaggagcggtacctcatgagctgcggcgccggtgccggattgtccgcggccttcggcgcgcctttggcgggcaccatgttctgcttggaggaattgtaccgcaacttttcatcggaagtgctgctgtccaccatggcagcggcggcatcatcgtattttgtggccgcctacatcataggaatggagccggtattcggcttccggattgattaccgccttccgctgaaatattactggttcgccatgattctgggggtggtgctgggcctgttcggaagcctgtataaccggaccatcgaccggatgcaggatttttttgaccgggtaggcacggcggccaacgcgctggccaagaagtggccgggaagacggcggctgaacccaaagaccggaaaaatggattacaagggaaatatcgcaccatttgccaagctggcggtgggcctgaccatggcctacatctgcttctttgcatacccgattactttgggaagcggaaacggattggtgagccggattgcagagggcaacttcgcgctgaaagcgttgctgatccttttggcagtgaaattcgtattctccactgccagcttcggaaccaccgcaccgggcggcatcttcctgcccctgctggtgctgggcgccgttaccggcggagtctactcccgactgctggaaaacctgctgggcattgacggaaaatacattgccgccttcgtggtgctggccatggcggggtattttgcggccatcgtccacgcgccggtaacgggggtggtgctgattacggagatgacgggagattttcgttccctgctggggctggtgatggtttccctgattgccttcgtaatctcggagcgcctgggaacggagccaatctacacccagctgatgaatcgcagcagcggaaagcgctataacgttccgaaacagcgcaaaagcatcatcgacgatatcgtccatcccggctcgattatggacggaaaacgaatcatggatatggggctgcccttgggtgcattgatcgtctccgtgattcgggaggagcaggaattcattcccgacgggcacaccatcctccgagggggagatgtaatcgaggtgctgctgcgggaagaagacctggcggaagtggagcacatcattgaagcggagtgcaaggaggtgagattatgaacatcctggactatgtgaagaacaccacccggacatttgaagagatgccgctgaatccggtggacagcctggtgctgagccagctgtcctatgctcggctggagttcgccgagccgaagccggagaacttgccggatcgcctgcgaaagggcgtgaccgttgccgacttctttcgaaacgagtggtttgaaaaaatattctgcgacgggatttccgattccgacaatatgaacctgatggcctacgcggtagccagccggcggtaccgaaatctgaaaatccgggatatcgtgggtgactttgacaaatccagtgaaaagcagttcggcgccatgattttccggctggatgccaacacggacttcgtggccttccggggaacggacggatccatgctgggttggaaggaggacttcaacctgtccttcatgaacgaagttccgtcccagtcggaagcggtggagtatttggagcggaattacggacccggcaatcgaaagggacggaatcgtcgcttctacgtgggcggacattccaaaggcggaaatctggcagtatatgcggcactgatgtgcagtccggaagtgcgctcccgcatcctgagggcttacagcttggacggaccgggattccgagatgaggtccaggaagagctggaccggattcaggcgaagagcgatgttgccatcacgaaactggttccccgcacctcagtggtgggaatgatgatgcagaatagctcggattaccaagtggttcagagcgatgccatcggcatcatgcagcacttctcctattcctggcaggtgcaggattccgatttcgtctacctggaggaaatcgacaccggcggaaaatacatgaaccggacggtgcacgactggcttcagtccgtgcccgacgagaagcggaaggtgttcatcaattctctctttgacgtcctggcggaacatcaggtagataccctccaggacctgaaggaaatgagcctgacggacatggccaaaatgattgcctccctgcggaacctggaggaggaggaccggaccgtggtagcggaggtgctgaaatcgctggccggagcagccctgccgaagtttcgccggaaggacaacccgaaaaacccggaagaaaaataatgtttttttgtacagaattcgatacctttattgcggacggagaacaatgagcgtaatataaacaattggaaaaaacagtttaaaaaaattaatggtaatggtacagaaagaaggctcatcatgaaaaaagtagttacttacatcatcttgacggcgtttcttttcgggacaatggagattgccctgaagattgccggaagcacatttgattccattcagctcacgtttctccgtttccttatcggcggtctggtgctggcgcctttcggcgttgcggaaatccggaaggacaacattaagattacaaaaggtgattggctctggctgcttctggtaggcatcatgggaattgccatcagcatgttggcattccagatcggcgtgcagcactgcaacgcatccaccgcggcagcactgatttgcctgaacccgctgttcaccatggttatcgcccacttctttacctcggagaagatggacaaagcgaagggactggcatttttcatcggcatcgtggcagcggtattcatgattcgtccgtgggacgttcagccgggcaacacggtgttcggtatggccaccatgcttctggcatccgttacctttgcagcatatacggtaatgggcaaaaaaaccatcggccgaatcggtactttcgctcagaccagcatctccttcatcctgggttctctggtgctgctcttggtcctgattccgatgggacgtccggtattcgcccacatcacggaacagccgctggtacttctctacagcggaatcgtggttaccggtctgggatacctgttctacttcttggccatccgttactcggatgccaccaccggatccatcgcattcttcattaagccggccatcgcaccggtgctggcggtggctgtcctgggagaacatgtctactggaacaccatcgtgggcatcgttcttctgatcatcgcctccgtcatcacccttcgggatacctggtccacggaggatccgaccatcgaagagacggaactggaagttcgggaaggactggaagtagaataaaaaaaaactgcatgcggtcagcaaccgccggggcctgcggctcaagccgccgcaccccccggccaagattgcctcccgcatgcagtttttttgtcggattgtttttgtgccggattatcgaaccgggattattgaacatgcggtcagcaaccgccggggcctgcggctcaagccgccgcacccccctggccaagattgcctcccgcatgcagtttttttagtggggagaagaagggacgtggtgcttcaaggcccgcaaagccttattctttcgtcgggaggcaccacgtccctgagcccctccgtgctttcggtgccgtggacgtggtgcttcaaggcccgcaaatccttattccttcgt

SEQ ID NO: 624 - DNA, 3341 bp, Unknown
  16S sequences of unknown bacteria
cttgttgaatacgtgaactttccaagcaactatatctctcttcacggatggttcaaatttaacgcctccattcttgtaaatggaggcgttcttatttcggaaaagcaataaaaatcctgcccagcatcctgttgcaggggcgcaattcagagcacacactaattagcggtcttgttcagaacctcacgcaaaacgtacaatttcgatcccttaactacggtttaatccgtcaggcaacgtccagtttctttccatattgttccatgcacgggacacgtctcattctatgcagtacactctgccgtataggcatatgtctgtataccgcaatctcttcccggtctcaaacatatcccccgcctgccacctccccttcataaatgaaaatcccttctttcccgctgcttttattccagaacggcaagccattcaacagccctctccctttctgttttctcaagttaagcccctgttatattcatctgcttattcgaggaaacaaaagagctgtttgctacacaacacaccgctatatgacgtttagaccccgaaacagcacaaaattggacacggatcagcaacctctccaagcaagccggcaactggccggaagctgacggataccaaacttcccgcagtccgtcagattgacaatcatcctactatgcattcgtctcccatggtcagaccagagtactgcagagcataccgtgcagattccatgccgagtcaggatttgcctcgaagaacaaaaagaaacgcaaggagtgtcagaatctccttgcgtttcctgtaagatctcatctgcaaaatgcttggcagttcccctgcgttcagcatctgcaagcatggcggatttttctcctccgagaaaaaggttatatggagaacagcgtacacaagcgcatcatgatcagcgcgtgagatatcctccgtcaatgggcatcacaatcccgttgatgtaatctgtggcatcggaaaccagcaacagaactggagccgccaagtcttccggttttccccagcgtccaacgggaatatgggcgagaatgctctggtaagacgctgaatcagcctgaagtgcctgtgtcatatccgtttcgatatacccaggggcaatggcattgacccgaattccccgatcgccccactcattggcaaaggcttttgtcatctgtgcaatagcacctttggaggccacatacgctcctacacgcttgcccgccacaaagctgttcatagaagccagattcaccacccggccataattctgcttgagcatataccgccccaccagctgcgtgcagtaaacagccgcattgaggttgacattgattacctcatcccactcattgacaggaaaatcctccaaattgtatcggcggttaattccggcagcattgatgaggatatcaattctgccgcccagcacccgagcggcctcctccacgccgcgttccagctccgcccgatcggacacattgcagcgcacggcgtgcacggcagcgccagacccctgcattttggcagtcagatcttctgcgcaggtatgattatagaagatcacaacctccgcaccagcatcatgaagcgtctgcgccaggcagtttccaatcccgcggctgcctccggtaaccaacgctttcttcccttccaagctcaaccagttcttcatcatacgcacactcccatcttttttagactctgcaatcacatattccgcttagactttgcggatctcatctataatcgttccgtcccgccagtaaacatgtcccacaatcgtttcgctcaggtgcagaggcggtaatttaccagtgaactcctccgcttttctttggagctcatggatatctgccacaggcagtcccgcatcttttaggcgcaaggcaagctcttgattatgcggcagagcggtatttacggcaatgccctcctgacatacaaacatatccacaaagcgccccggtgtactgatggtgcagaccctatccacaattgtgggatatttgtttcggtacatcggcgccactaccactgtcattttggcaccttgtgcggtgtcgccatggccgccggcgccgctgattacccggccattggaatctgtgattacatttacattgaaatccgtatcaatttccgtcgctcccaaaatcacaaagtccaagccatcaacaattgcaccgccttttgccaaaggactggcatacgtttcggcagaaacctccacatgaccgatatgttctttcaaagaagaaatggcgcgttggtcaaaggactgtgtatcataaagcgtacgaagcagcccttcttcatacatgttgaccaacatggaggtaattccgcccatggcataattgccggtaatcccctgctgcttcatatatgcgcccagctttgatgcaaccgacagcgatattttgccgcttcctgtctgcatgcagacaccctcgcaaaggagcccggagtggataatggcctgggccgtaagctccgcgattcgtgcattcaacggatttgcagaaggtttcatggctcctgtggcaatgccggatggatccccgatggaatccacctgcaccacataatccacgtcgctttgacagatggaaaccgggaagaccgggacaggagaaagcgtatccgtaaggacaataaccttccgggcatagcgcacatccgtcatggaatatcccatggagccaaaagcggacgttccccctgtaccattgcagtttccgttgacatcagaaattgaagcggcaacaaaggcaacatcgatggagatctccccgcgttttagggctgccggccggccgccatgcgtccgcaattcacacacttcccgtattttcccagcttgcagcacacggcccagcgccggagaaaacccgctggtctggaatttcgtgaaggtaccattttcaataaacggaatcagcacatcatttccggttgtcaggctggacggtgccaccgtgagatttcggattcccagggaggaaattgcctgtgcaatttgtccgctggctgtatcgcctccccgcaggcagtgatggaaggaaatggtcattccatcttccagtccgcagagccggattgcttccgccagtgtctttacaactttactcatgggaagcctccttttccaaagaaacccccgcagaccgcgccagatccagaatatgctgtgcttgctgcaaaacaggtttatccagcatttttccattcagcactgctacaccggttccattttccatggattctttcatcttttctgttacagccagtgcatgggcaatttcttttggactcggcgtatagacttcgtgaacaac

SEQ ID NO: 625 - DNA, 4587 bp, Unknown
  16S sequences of unknown bacteria
aataagcagcacccatgcattcagtttgacggacaggcgtaaaacgggcgggtgccgctgcatctggaactttcgcggccagatgccccgctatgctttgcacagccgtcccccgactgtacattgcatggcgctctgggcaggccttgaacctgcaacctacggttttggagaccatcgctctgccaattgagctaccagagtaaaaagccgcccttggaatcgaaccagccgtgtctacacacacgcgccgcgctccaaactgcgctcaggcggccatataaaaacagctccggttcgccgccggggctgttggttggcgcacatcctgtcaggaaagctacaccttggcaaggattctaaggccttttcttggcacgggaggttacacgtgcggcctttcgggttgtctggtccatgcgccatacggtgcgatacggcggaatcgaaccgcctcctgtctctcatgagcggcaggctgcctttgtttcagtgtatcgcatagatgcgcagtccgcgaaacgtgaagagagaaaaattcctgcaaagccaaaaggaggaaaattatcatggaggttcgtttcggagactgcgtgtatcggtttgcctttccggcattgccgatggtactattcaatcactttcgcacggtttctgtacataccgcgtacatacccgaagctgtacaaaaaatcacgcgttttttatgcactttcgtcaaaatcgcaaaaaggtgttgcttcccagatctctgcaagggcctcaaaccctactgtgatggctctggatgccgtgtgtgcctgtgcaaagcccacctcagcggcggcctgctcacgggtcttaccctcaacataacacaggatgatgcacttgctgcggcggatggatgccgtgtcagcattcagcagatatgccgtatcaatggccgccttctgcatctccacatactcgcacttgagggcagccagcttttcctctgcttccacaatggccgcgccaccgttccccaccttgtcactggttccagaacgaccaggtgcagctgaaacgctggatgtggtggcggtagcgatgcactgtagatctacaatgcgctcttcctgctgctgaatctgtgcccgcattcttggcagtcgttcaaaccatgcccgcaccagctgggccttttcattcttaggtggcttttcgttctcgctttcaggtgtccatgtgcgaatcattgttcctcctttactccttccaaaaacagcagcactccgggtgctgcaaacgggacgcggtaaatttcaatgtctgattgggtgatgtacttacggccaaacagccgtttcatgtccttccatacggcccacgggacgcggtagaaagccctgccgctaaatgagcatagtacaaaggcgacacctccgagggcttctgtgcggctcaaacgaagcgattgtgcggccaacacacgatcaaaggtcagccggtcactgtcagtgtgctttgcttcaaaattgatggctcttccgcctttgagaatgcctttgtagtccggctgggcctgtttcgtgtagcaggcaaggaaccggccagcacggtctgggcttccaatcgggcgcatcggctccggtgttttttcgatgtctgcaaggccgatggatctgtaataggcgcaggcattgtcaatgatgctttcaaagccagcgccctctgcgcggcttcgggcaccggtatagctgcggcgaatactggcagccgttcttcggttattcattgctcaattcctccacatagcaccagctttggggcggacgacggagtctaaggccatccagtccatagcaaaatgcgcagtgtacatctttcttcttgccaattgcgcatttcttgcaccacagttcgttttcctcgacagcacggtgaaagcacatgatgtctttcggctgattataaattttcaggtcagagatgtgccagccgtagccattacgaccttgcagatattttttagcggctgcttcggtcagacaggcagcttgaagcagttcgccagctggtttataccacccgtccaatgtcaaaatgtttatgtccatcatcgttccgacgtggacgagcttgtcgattttatcgcatgtaaactcgccaatgatattgccatccaaccgccgccatcctttgcccgggacaattaggagccagcctattttggatttgcttttcgtgcaatagacatagcacttaaatggagtctccagcttcgggctggtcctgcgcacctcaagggtcttttgcctccgaatgatgaggtcgcaccattcaggccggatactcaaaaggactgctttcatgctcgtacctctcccttcagtaatactcgatctccaccagagatgtggataccagctcaaatcgtccatcttccagagggatttgcaggagctggtactctcgctctgaagaaagtttcgggtctggcaccagctcaccaaagttgtccacggtaatggtgtacttcggcttacgcctactggcatagccaactttttcaattgccggggagtagaccgtgacatggtagcaagggtggtcagcagtttcagcttcagttttagtttcagcatcagcagatgtcgaactacaggatgtaaaccacagcgtcacaattagcaatgctgctgacacgataaagcagaccattctcttttcggttttcatgcttcacttctcctcctcaaaagtcccagtcggaaggaacaccgagacggcattctccatcgccatcgttactggtcggcttatcgaacgggcaccccgggcagccatttccagccgccaaatggcaatggcaaaaatccatcaaataatgggccatgtcctccggactcatagtgtcggtttcagggttagatttcgcttgatcattcatcgtcgcccctccaatactccacaaaataggtcaaagtagatttgccgctgcgcttttcctttcccacgcggacggtgtagccgttcatcgacaggacgacgaccagcgctttccggtcctccaccttgtcgcagtcaatcttgtaatgctgtgacatgtattcatcctccgtgccgctacttgtataatcagcagcggtttatgtaactgtgtttgtatttcagaccttgagatcgctttgcgggcgttccagccagtcgcggacggtatcttcggacggcgcgccgtcgtcgcacaaggccagaaccgccggaaccagcttccgggccatttcttcgtcatccatgtcacggatagtgtctccgatcgtggtctgatcgctcgttctgatttccagcgccagcttcacgacggagccgtcctgacgggtccacgagcaaataaggctctggccgccgatcttttccaatgtggtcaacatcgtatcgcgacaggcggcgataatcgtttcagctctttccattacctgtactcctttccggtggccttgtccctcagcgggatgcggcctatgatctcgaaccctgcgataccggccatctggcgcagcaggggaacgatgtctccgattctgtcaagccgggcggcttccttctggtactcgtcccggcagatgttgcgcatggctgcggtcggtgtcgggtctgcatagtgctcggcatttcggcccatattttccttgctcatgttctcaccctctctcttcccacaaatacgcccgagaacaggcgttctccgatggtatagtgataataccggtgtcctgccggaacgccgtctgcagggccatctgccggtctgagcaccatcggatgactagcgacctgaacgacatactcaccgccctgcacaagccgctgcatccagctttctgcaggtgtagcatcaacccggcttccatccatacagcagactgctacggcaggcggaacaggggacagcattgtgaaaagcgaaagctgttcgacttcaatcacggcgcacctcctactttgtagatcagagccacagcaagcatccaaatcataaaagcggtagttgctgcaagagctatggggtgatcgcgcagcagccagacaagcagtttcgatgcagccgcagaggcttccgccagttcttccgtaagctggcccaaaatctcagttttgggcaggtagtcggaaattttcttttcagccatcgccgcttttccgcgcggctggcggcttccgaattcacccattgttcttttcctccagttcagggcctgtgatgttaggcatccagtgggtgacatcatccagaggaatgcactctctgttctcagcccaatctccgttttcatacatgaatgcggtcaagatagcaccatcggaacagtacacgatgacatcaacattcgggtcaggcgggtctttctttgcatctctccagagctggcgggccatttcctgcgggtcagcttcaggaagagcatcaataaccctgttcacatcagccaatgtcttgaggtagcccagagtggcctccatgaaaagatgctgcttcagggtttcaacatcaagatatttccgcttcatctggatcccccctcacttcacggacgggttcacacgctcaaccagctcacagcc

SEQ ID NO: 626 - DNA, 18335 bp, Unknown
  16S sequences of unknown bacteria
gctccgtccctctcgcgctctcctggggttttttgacagtcagcgtgttttcgcggcggctcctttttgcggtgcggcctggcttgcggcggaatagcagccattctttaggcgcggcggggattgaacccggcggcgggacgtggtataataaggcacggacaaacgccggaggaggctgaacgcaatggatacgatcaaaattcgcgccgggttgtgcaaaatggtggcgcaccggggcgtgagcggcctggaaaaggaaaacaccatggccgcgtttgtggcggcaggcaaccgcagctattacggcatcgaaaccgacattcaccgcacgctggacgggcattatgtggccattcacgacgcggacacgggccgcgtcgcccggcagaagctgaacgttgggcagtccacgctggcggagctgcgcgatgtctgcttaaacgacatcgccgagggggagccgcgcggcgatttgcgcatccccacgctgcaggaatacgcccgggcctgcaagcgctatggcaaggtgagcgtgctcgaattgaaggacgattttacgcgcgcgcaattggaagaaatcatcgccatcctgcgcgcggaagggcaactggaaaacgtggtgttcatcgctttcgcactggaaaacctgctgcgcttgcgggaaatcctgcccgagcaaccagcgcagtatttggtgagccgcatggaggaaggcgtggagcaggcgcttctcgcgcacgggctggacttggacgcgcactatgccgcggtggacgcggccctggtgcagcgtttgcacgcgcatgggcggaaggtcaattgctggacggtggacgcgccggaagaagcgcggcgcctcgtcgccatgggcgtggattatatcaccagcaatatcctggaaggcgacgactgactcggcagcctttgcgccccgttgccgggttcccccagaatggtttgacgcgattgaaaaccccgcgtgaattgacatttaacacggattgtgatacagtaagacttggagataccatataaaggagtgcaataccatgagccagttaaagggtgcctgcatcatcggccaatccggcggcccgacctctgtgatcaacgccagcgcttacggcgcaatcaaaaccgcgctggagagcgattccatcacccgcgtgctgggcgcgctcaacggaattaaaggcgtgctcgacgacaacctgatcgacatgggcaaggaagatcccgaagagctcgcgctgatgaagcataccccgtcttccgcgctgggttcctgccgctataagctcaaggacccggatgtggacgacaccgattataagcgtatcctggaaatctttaagaaatacgatgtgcgctatttcttctacaatggcggcaacgattccatggatacctgcaacaagatttccaagttcatgctcaaaaacggctatgagtgccgcgtgatgggcatccccaagaccatcgataacgacctgtacggcaccgaccactgccccggcttcggctccgccgccaagtacatcgccaccacctgcatggaagtgtatcgcgacgcgcgcgtgtacgacaccggcatggtcaccatcatcgaggccatgggccgcaacgcgggctggttggccgcttccgccgcgctggccacctacaagggcaatggcccggatctgatctacctgcccgagctgcccttcgatatggacaagttcctggcctccgtgaaggagatctacgccaagaacggcaagtgcatcgccgtggtgagcgagggcatccgcgataaggacggcgtgtacatctccgaatacgccaacaaggacatggccaaggacaacttcggccacgcgcagctgggcggcctggccgcttatctggcggcccgctgcaaggaagccacgggcgcgaaggtgcgcggcatcgaactgagcctgctgcagcgctgcgcggcgcacgtcgccagcaagacggacatcgaggagtccttcagcgcgggcaaggccgccgtggaaaacgcggtgaacggcgtcaccgataagatggtcggcttcgagcgcaccgtggaaaacggccagtacaagtgcaacatcaagctcttcgagctctccgatgtggccaacaccgaaaagaaggtgccgctggagtggatcaacgaaaccggcgacggccttaagcaggaatacatcgattacgcgctgcccctcatccagggccagaccgatctcaagatcgaagacggcctgccgcgcttcgtgaacctcaaaaaggtcaaggcataaagcaaagttttgcgcgccgccctgccaaatccggcagggcggcggattttttgctttcagacgggcgtccaccagcttgacgccccggcgggattttgctacaatacaagcagcgaaactggcggcccgcgcgatgtgggcgcgaagggaaggaatgcatatggtcgatgtggtggccgcgctggtctggcggggcgaggcgtttctcatttgccagcggccggcgggcaaggcgcgcggccttttgtgggaattcgccgggggcaaggtggagccgggcgaaacgccgcagcaggcgctcgtgcgcgaatgccgggaagaactggacatcatcgtacacgtgggcgaggaattcatgcaggtgacgcacgcctatcccgacatcaccgtgcggctcaccctgttttgcgcgcagattgtttccggcgagccgcgttgcctggagcatgccgccctgcgctggatccggccggaagaaattccgcaatacgatttctgcccggcggacgcgcccattctcgagcgcttgcgcgaactggatggcgcgcgggcgggaagcctgcgggaaatgcaaaaagccgcctaccagaataagctcgataagggctttaacgtcacggacgtacacaaggaattctgcctcttgtatggcgaggtggcggaggcctatgacgcttaccggaaaaagcagcacagtgtgggcgaggaattggccgatgtggcaatttatttgatgggcctcgcggaaatcctgggcgtggatttgcaggcggaagtccagcgcaaaatggccatcaaccgcgcgcgtgtgtacgaaaacaaaaatggcgtgctgctaaaagcgcagaaaaaatgagcggctttagcccctaggccaatccaggatacacaatctgggggccgcgctcttttttcaacgatcagaggccaggcggtctttgcccgcccggcctcttgccataagaaaaaattttggtttgtttgaatgtattgcgctatttaggcgttgcggaaatagcgattggagatatagcccgtgtaattgccatagagcactttggagaagctagagcccttttcgagcacttcaatctgggtgcccttggggatcacgcgcagccgggcatagctggtgccgggaccggagcgcatgttcacatcgccggtggtcaccgccgcggtgcccgccgcgatgtagtccttgtacatatagcccacggtgccgccgctggtgcggatcttgtaccaatcgcccgtgcggcccaggatggtgacggtggtgccgttcttcagggaggtaagcaccccgctggacgaactggcggaagcgcgcacattcacattgctggacgcgtatttggtcaccacgcgaccgctgctgctggtggcgctgccgctgcccgaaccgctgcccgagccgccgccggaaccggagccgccctgcgtgaacgacacgtaagacgcgctcacatagccaattttgccgttcttcacgagtttcacatagtgccacgaggtgccgcgcgagagcacttccagcttatcgccgttcagcgcccagccgatcacgccatagcccgtgccggggccggtgcggatgttcacggaaccgttggccgttttggtggaaatccacgcggtcgtgccggtggaaggcgtgctgctcggcttatcgaaggagatgtattccttgctcataaagccgatcttgccattttttacgatttgcacctgataccactggttccccgtagaaaggagcaccagctcatcgccatacaccgcccagccgatcacgggatactctgtgcccgggccagaacggaggttcaccgcgccatcggcggcgggcgtctccacccacacggatgtgctcgccatcgcgggcacggcgagggcgaccagcatcagcgctagcgatagacagaagatcttgcgtaccattgtttttcccctccattttcgtattgagcgcgcgttcccttataagacccaattttgcgcaaaaaggttgcaattttccatgggaaatttccgtggaaatttttggattaacaaatccgccaaaatccgctatcctgtttccatgcaaattcgaaatatcgggatactggctcacgtggacgcgggcaaaaccacgctcacggagcagatgttgtttgcctcgggcgcgatcaaccgccccggccgcgtggacgacggcaccgcgcacaccgaccgcctggccattgagcgcaggcgcggcatttccgtgcgcgcggcgtgcaccgctttttcctggcgggacgcgcgcattcagctattggacacgcccggacacgcggatttcgccgccgaggtagagcgcgcgctgtgggcgctggatggcgcggtgctgctgatcgacgcggcggacggcgtgcgtccgcacacgtgcgccttgttccaggcgctgcgaaacgcgcgcattcccaccatcctctatctcaacaagatcgaccgcgaaggcgcggatcccgcgcgcgccctgcgcgaggcgcaaaagcggctttccacccgcgtggccgattacgcggacgcggaagcgctctgcgcgctggtagcggaagaagatgaggccctgctcgagcgctacttaaacggggacattcccccgcgcgaaaccctgctgccccgcgtggcgcaaatgacgcgcgattgcgcggcgtatcccgcgctgcgcggcagcgccctgcggggcgagggtgtgcgcgaattgctggacgccattgtggatctcctgccgccgccgcgaggggattgcgaaggcgcgcccagcggcgtggtgttcgatgtggaggacgacgccgctctgggccgcgcggcgctggtgcggctgttttccggcacgctgcgcaatcgggaaagcgtgcgcgtgcgcataggcgccaggcgggaagaacgcaaaatcacgcaaattcgctccatcgccctatccggcaagggcgcggatctgggcgagctgcgcgcgggcgaaatcggccgcgtgttcggcctggcgggcgcgcgcgtgggcagcgcccttggcgaggccgagccgccgcgcctgggaaatctgcgcgagccgctgatgatggcgcgcctgggcgcggaaaacgcggacgaccacgcgctgatggccgcgctggagcgcttgcaggcggaaaacccgctgttggacgccgcgctctatggcggcgcgccgcacgtgcgcctgatgggcgcgatgcagctggacgtgctggccgaggacttgcgggaacgcttcggcatccaggcgcagtttgggccgcccagcaccgtgtatcgcgaaaccatccgcgaaagcgccacgggctttgtggcctacaccatgcccaaaccctgctgggcggtgatcgagctgcgcatcgatccgttgccgcgcggcagcggcgtgcgattcgaatccctcgtgcccgtgcgcgacatcgccgcccgctaccagcaccagatcgagcaggccattccgttggccacgcgccagggcatgctgggctggcaggtggacgacgtgaagatcacgctcaccggcggcaatcatcacctgatccacacgcatccgctggatttcatcgtggccacgcccatggcctttctcgatgggctgcgccgcggcggcagcgtgctgctggaacccatcctggaattgacggtatacgcgcccgccgaatgcgcgggccgcgtgatcagcgaaatcgtggccatgcgcggcgaagtgctgcaaacggacgccgaaggggaggacatgcgcctgctcgcgcgctcgcccgccgccgaaacgtttgattttccccgccggctcagcgccatcaccaacgggcgtggcgctatggcgcaagcgctcgccggctaccgcgattgcccgccgggcatcgaggccacctgcccgcgccggggcgtgcatccgctggatacctcaaaatacatcctcgccgcgcgcagcgcgctcgagggcggcatcttcgatgagtaagcgcgccagttcttccggcagcggggaggcaaacgccatccgctctccgctttccgggtgccggaaggcgatatacgcgctgtgcagcgcgaaccggcccggcaggcgcgggctttccgcgccatagagaaaatcgccgaacaccgggcaacccatataggccatgtgtacgcgaatttggtgcgtgcggcccgtcaaaaggcgcaggcgcaccagcgaaagcgcgccgcgcttttccacacaaaagtgcgtgcgcgctttttggccgccttcgcccacttcgcgccggatggtcgcccccgccgccttgcggatgggcgcatcgatccagccctcttctgcctgcggcgcgccttccaccaccgccaggtattcgcgcacaaaatcgtccgtatgcaaatcgcgctgcaatgcgtcctgcgcgtgggcgtgccgcgcgaccaccatcagcccgctggtgcccttgtccagccggttcacgggccggaacgtccagcctggcatttgcgcgcgcatgcgcgcttccagcgtgtcccccgtctgccgcgcggaggattggcagggcagcggcgcgcacttgtccaccacgaacagatcttcatcttcataaacgatgttcaccgcgcccgccggatgcgtagcatctgcctctggcgcggcttcttccgccaggcgcaattccagcacctggcccgcgcgcacgcgcgcgttggccagtgcgcgctcgccatccagcagcacgccacccgcgaacttcacctgcgaaaataggcgatgcgacgcgcccatggctccacgcgcgatttgtttgaccatgcgcccctcttcctccggcgcgatcgtgtgcctgagcgttttcatcgcctcgcctccatggggtttactgtatcacatttccagtggcaaatcaagctgtgtgtggataattctaggatataatatacaaaacttataaatatattgttgatataatatgaatatattatatagaacacctttaaatataacatatatttctattgacaggcttgtgtaaatatgtaataatataactggatttagaaaataagaaataaaattacgaatggaggagtctataatgctttggcggcgcatacagagacagcgtatgtattacgcactggcattgccgggcttagcgtattttttgatattccattatcttccaatgtatggcgttatcatagcgttcaaagattataatatctacaagggaatatggggtagtccctggatgggtttagaggtattccaacgattgtttgggttggcgaatttttctagggcattttggaatactgtgattatctgcctggaaaaaacggttacaggttttccactttccattattcttgcactcatgctcaatgaacttcgtagcaaaggatataataagtacatttctacggcattgatcttgccacactttatttcttgggttgtgatatacggcttggcgtacgcaattttatcccccactacggggctgattgtagccatttgggaaactttattccctggtgcgaatacgccgaacttgctgatttcttctaccgcgtttcgaccccttatggtatttttgcacagctggcgcaatgtaggatttgcctctattatgtatacggccgccattgcggggattgatccacagctgtatgaatctgcacagatcgatggcgcagggcgctggaaacaaatgacgaacgtgacacttccttgcatttttccgacgattattacaatgtggattttgcgactgggtgatttattaggagcggatttcgatcaaatactaacgtttatgaattccgctacgattcgtaccggcgatattattgatacatttgtgtatcgtatgggattgcaagatgcagaatatagtctatccactgcagcgggtctttttaaatcgacactatctctggtatttgtgcttggaaccaactacttggtgaaaaaatatgatcgcgacagcgctttgatgtgaggagtggatgctataatgaaacgcggagtaggggagcaggtaggacataccacgattgtagtagtgctattttttgcctccattcttacgatttatccattttggcatgtgctgatgtattctttaagcgatagcgctaaggcaatggagggaggcatatttctttggccaaaaggattcggactggggcaatataaaatattgcttggcgcaagaaatgcatttgtttcgctgcgcaatagcctgctgcgtgtttgcattggcgttcctttcaatttgattatgacgtcatctttagcatacgcactttccagacgcgatttggttggaaggaacgcgatgaatactatgatctttttaaccatgctttttagcggagggttgattccaagttttttgttgatgcgtacactgggtttatatgataatccattgatttatattttgcctggcgcaattagcgcttacaatatgtttgtaatgaaaacatattttttgtccctgccagaggaattggaggaaagcgctttgattgaaggcgccggccccttgcggattctactgcacattgtgttgccagtgagcatcccggtgatcgccgcgataggaatgttttcaggtgtaagtcactggaatagctggtttgatggtatgatctatgttaataaccaggagtatatgctttttcaggtgtttttgcgtagcatgatgctggatagttcctatcaggcattggccggttcgggtggacttttggatgtgggtgcgctgactgaagaatcagtgaagatggcggcgatcacgttatccttagtccctgtagttattgcatatccatttgtacacaagtattatatcaaaggcttgatgatcggttcaattaagggatgatggaagcgaagtgccggaaagtcgacgccggaatgacgctttcacagataaacaaagcataggaggaattgggatgaaaaagttgtctcttgctatggtagtgttaatgatgttgccgtttttgaatgcttcattttctattgcagaagatgaaaggcctgtcgtaacagccttgttgcaaaccagtcagctaccagcggcggaaaattccgttttgcaggaaatttgcgagcgtacgcagattgatttccaaccattggtggttgaaggctctgcgctggaagaacggtacaatacactggccgcagcgggtatgctgccggatattatcttacgcggcgggaaaaccgaagcgctggaacttgtggaaaatggagtggttctcgctttggacgatttgctggcagagtatgggccagacatcgtgcaaaaccgcggcatgttctttgagcaaagcgcagcatacatcgatggtaagctctatggcattccgctcaatgcattttccaccggcaatgcgctgatggtgcggcaggattggttggacgctgttgggaaagaggttcccacgaccatcgatgaattttatgatgtgctcgtggcctttacgaaaaacgatcccgatggcaatggaaaggacgacaccataggcttgggtgtaaccatgaattttgcaacgacgatagagtttttgtttggcatgtacggggtgccttatggtgtgcagtatctagaaaatggcgaagttaaaccatatttcatgcatccaaattatttggaagccgtatcttttatccgtaaattgtatgaggagagattgatagagccggactttttgaccatacccaatatgagctgcttagaaaagctatggaatggtacgtatggtttttattatggcgccccgtccggcactacaaacaactggtatccgggcaggtatacggaggatccgctcccggtaatgacatacacttggatcgaagggccgacgggttccgcgggttctgcaatggtgattgattcttcgttcctggcgattactgccaacgcaaagcatccagacgctgcaatgcggttactcaattttctgtgcagcgaagagggaaatcagctggcttatgcgggcatcgaaggcaaacactgggagtggaattcagaaggtggaattacgtatttaggagagtatacagattctagcaaacaacgcgatgatggcgtatattgctattggcccactttgcgttataatggcatgcaggatcagctgcttacggaaactacgcaatacggctatcaaattgccaatgagcacaattgcgcatatgtcgatttgccttacttgccggaggcggcggattacattagttttaatccagaggagatgtttagcgctttgctgcttacgcagggagatatgcaggaggaatacgataggtatatccaagactatttggaaaatggcggcgagcaatggatacaggaagccacggagatttacacggcgcaatgaattgtgatatactaaatttggaagcggcgcgcttttgcagcgcaagtttgcttcgttaagacggcgcttccgcctttcggcgccctatccgggcgccgaaaggaaatatatcacaagagaaatgaggaagttacatgcacgatagtgtcagccgcatcgctgctagatacgatcttcttacgccgagcgaatgcaaagtggcggattatgtcatgggaaatatttcagaagccatcacccagagcgtgcaaagcgttgcaaggcgggcaggcgtgagcgaggcaacagtcatgcgtttttgcaaaaacatgggctatgatggatttcgttctttttgccttggcatggcgcaaaatgcctccgcacatgatgattatgtgatggatattcgcaacgaaggcgaattggagcaggaagtttcccgtgtgctgatggcgagtgcgcaaacaatagaagatactctgcaggctatggattttgacgccgtgcaaaaagcggcggcactgatcgtgtccagccgcaatctgctctttgtaggcatggggacttcaggaattgtatgccaggatgcaatgctgcgctttttgcgcagcggacggcaggccttttttcacgcagactatcatgcgggaattgttgccattagccattataacgagcaagacgtggtcgtcggcgtgtcgcattcgggcgctacgcaagaagtttgtgaagccatggaattggctatgaaaagaggcgtgcatactattggtataacgacatatcctcgggaacgaattgcgcaatttagcgaagtcttgcttgcgacggtcacccgggagagccccttgcataaagtggccatcacatcgcgcacaagccagctatctgtgatcgatgccatgtttatcgctacgatgctcttggattatgatgcatctatgtccggtgttttgcgcgtgtctaacaatattacggccatggaggggtttaagcatgggaaaaaatcccatggaaaacagtgagaggtgcatatgtcaacggaagatattaattcaaatacgctagatcttgaccaaaaaacgacgctggaaattttggagcgcatgaacgatgaagactgcattccccccaaagctgtgcgtggggcgattccagccattgcgcgcgtggtagactttttggtggagcaatatccccgcggcgggcgtgttttgtatctcgccgcaggcacgagcgcgcgtatagccgtgatggatgccgcggaatgcccgccaacatttggtacggccccagattggctccaggtaagaattgcaggaggaacaaatgccgtattctgtgcgcaagaaggcgaagaggatggcgaaggcgaaggcgcacgcgctgtagaagaatggcatgcgggagaaatggattgcgtaattggcattgcggcaagcgggcacacgccatttgttctggcaggcctgcgtaaagcacgccaaatgggagcttttaccgctatggtttccgctaaccaagtgacacaagatttggccgacgtcatgatatgctgcgaaacgggtccagaggttatcacaggttctacgcgtttgaaggctgcaagtgccgcaaaattggtgctcaacatgatcagtaccaccaccatgacgcgcctggggcgtgtttatggcaaccgcatgtgttatatccgtacaaataaccaaaagcttttgacacgtgcttaccgcactttggaagaatgctgtaacctgtcttcacagaaagcgatggagctgtatcgggcagcagattcagatttggctattgccctggtggctagcctgggatgcgtacctgtcgaacaggcgcgggctgcgcttgagcgcacctgcggtcatgtgcgccgggcgattgatgcgctgaaggaggaatctcaatgacgctgtacgctatggctttggataccggtggaacaaaatcttttgcgttgattgcagatttacataagcgcgttattgcggaagcgcatttcgatggattgggagtagcccacgatgacgcatgtgcggcattgcagccactagaggatgcgatggaacggatactgcgggaagcggcgctgcgtgcggaagaaatcggctgcgtcgttgtaaatttgggtggtaagaatgaacagcagatgcgaagcgccttgcacaggatctttccggccgcgcatgttgaggtgcaccgcgagtcttcgggcgtgttggcggagcaaattgggcgcgctcatggggcggacgccgttctcctagcgggtacgggggcgattgcaatttcctacagctctaaggggaggtttatcgcggatggctggggtgcaaacatgggtgatagaggaagcggctattggattggtgaacgcgcgttgcagatagcgctatgcgctttagaagaaaggcagccgctttcgcattttgcgagcatggtaactggtagggaaacaccttttacggcacaggaaaccggttctgcattgatgtgcgcgcgcgacaaggttcgcgagaggttgttcccactttcgcgcgagcgcgtagccgcgtggtgcaaaatggctgcaaaatatgcgctggaaggtgatactgcgctggcggccctttttgcggaggcggggcgcgcaatggcagacactgtagaacgagcgctgtgtgccgtgggtttgccggatggagttccgctggcgatgggaggcctcacaaattgcgcgtgcctttggcaacccgcttttgaaaagcggcttgggcgcgctctgcgaataggcggagccaatcttgcatatggcgcgctggagagagctgtagaatggcaaaggaggtatgctggatgcgaaaattcccgaagggattgatcgtttcctgccaggcgttggaaggcaatccgctgaggaacagcgctgcgctggcgcgaatggcaaaagcggcagaaatgggcggcgcacaggctatccgagccaacggagttgaagacatagccgccattcgggagcaggtcgcaattcctatcattggtatcaataaaataaaaaacgcacagggacgagtggtgatcacgcctacatatgccagcgcggcagaagttttgcgcgcaggcgcggatattctggcgatagacgccacctttgcgccggataccttgcgcgaaaacgccggggaaatcgttcgtaaagtgcatacagagtacgatgtcccggtaatggcggatattagcactgtggaagaggcgcggcatgccgtgcaaattggagtagatgcggtaagcacgacgctttccggatatatgccgggtatgccgtatgcgtctgccgaccgttaccaaccggacttttttctgctgaagcaattgctgtccgatccgaagatttgcgtgcccattgtcgcggaagggcggttttggaaattggaagacgtgcggaaagcatttcaaatgggcgtacatgccgttgtaattggcaaggctattacgaatcctatggctattacggtatattttatgcaaggctgctgcgaagatgggcattaaaatgaaggagaggctcttatggcaaaattgatttctgataggaaaattatgatgggcgctatgtatgccccattttgccgcacgaaatacgtggatatgtcctcttgggaaagcgatgtacgaaatatggcagagatgggctatacctgcatccatgcctttaccgaatggtggcgcattgaaaagaaaaaaggtgagttcgatttttcgcagacagattatctggcgcagctgtgccaaaaatatggaatatccctggtgtttaatgtggcaacgcaaaacggcgtcgggtattatatgccgcgctggatgcaggaagaataccgcgggcgtggtatggtcgatagcgatggatatggcaatcctataaggagcgaatacgtggtggcgtgcatggatgatccgtggtatcaaatgtacgcgcggcgctatctttgcgcattggccacgcattatgctggcgattcgcgcgtggcaggctgggttatatggggcgagccaatgctgacgagcgatacagggaagcccatttgctattgcgagcacacccttgcgcgattccggtgctggctcaaagaaaaatatggtacaattgaaaatttgaacgcagcctggggcaacgaaggcccggccatgtggacggattttgtgggcgtgcttccgccgcgggacgctttgggccacaaagggtcgtatgcatcatggagcgactttgcgcggtttatggatgaaaattttgccacgcacatcaaaaatgcagataaaattttcaagcagtgtggggcgacgcagccgacaattgtggagttgttttgctatatcggctgggatgccatttgcaatgatttgtggctgctggcggagacagcggatattgtgggcataagcaattattgccgcccgggtttggatacagacattgtcatgaccgttgccgacagtattgctaagcctttgggcaaaacaacgtttgtagtggaagctctgggtgggccgcgctatccttattatgataagcgcacgcctggttgcgcagaaattcgtgcggaagggatccaggctgtaggcggtgggagtcgtggcgttctttattggtgctatcgcccacgactttccgattatgaaggtggcacgtttggaatttgccgtgcggatggagtgccgctgccgcgcgcttatgcgattggcgatttaacgcgccagctggggcaggattgggaagaaattctccatgcccagcgcaaggccgaggttgcggtcctgtattctacgcatgctgcgcacaccagcaaaggcgaccgtttgggaagcatgctgggaaaatctgtgcagggcgcgttgcgcttgctgttcgacgcccgcatcacaccgcgccttattcacgaagaaagcattttggctggagagctctcgcaatacaaagctttgattttgccatttgcttatgccatggatgaggatgtgattgaagagattgcacggtttgtgcaggaaggcggtatattgctggcggatcactgcttggcaatgaaacggttgaacggtatatgctatgaaacgcttccaggcggaaaattccgagagatattcggcacgcagcgggtggatttgctttacctggaacattcatcgcaaattccctctaacgattggggtgtacaaacggaagattgcctggatattttggtttctgagggtggaatggtagaagaaatgttgggccaatatccactgtggatcgtgaaccaatatgggaaagggtgcgcgcatgcgcttgcgtggcccgcatttgccggatattgcgcgcagcccagacgcatattgcgcgataaaattaagggtatacttgctggcgcaggaattgagagcatgattgaattggaggcatgggacgatggcgatgaatgccccattagtacgcaagtgttgcacgggcaaaatggtaagcgcatttatacaattgtgaatccaggctatgagccgcgtcaactcattgcgcgcattcctggcgctcaaaagatttatcccttgttgaacgcaaaattttccacgctctacacgcaggaaggcgcacagatctccttggagctaagcgcttgggatgcggtaatgttgatcgcggaagcgtccgaagcgtaaacggcacgcacgtgaaaagcattttgtccggtaaaagcggtgcgggcatgcgcaactaccgggccccgttgacgttagatgcacataggcaggcgtggcaggaattttttcattcgtgctaaaaagcacaaacggagcctctctttgactctgtttgtgctttttggcatttagttttggtattttatagcctgcaaaacgatatatagaatttcatctggatactgaaaaatattagcaaaaaaactttgatctccaatagcttagcacatgaaggctgtctatggcaggaacaaatggcgcggaaccatgggaatatggagaaccttgcaaacaatggtgcagcaaagccccttgcgaattacagctcacttgcttcttctggcgaacttatccaccatctgcgagaatttaacgcatttgccttgcgaaaattcccggttcctgctatgataagaagagatttttcggataatggaggcggaagtatggcttcgctcacgatggacaaactcgtcgccctgtgcaaaaaccggggcttcatcttcgcaggctccgaaatttacggcggcctggccaacacctgggattatggcccgctgggcgtggaattcaaaaacaacgtcaagcgcgcctggtggcgcaaattcgtgcaggaaaatccctacaacacgggcgtggactgcgcgattttgatgaaccgcgaagtgtgggtggcttccgggcatgtgggcggcttcaacgatccgctgatggattgcaaggcttgcaaggcccgtttccgcgcggacaagctgattgaggatttctgcgccgcgcacggtgaagaagtgcaggccgacggctggagcaacgaaaagatggaatcctacatcgccgagcacggcattccctgcccggtgtgcggcaaaaaggatttcaccggcattcgccagttcaacatgatgttcaaaaccttccagggcgtgacggaggacagcgcttccgagctgtacctgcgccctgagaccgcgcagggcatcttcgtcaatttcaaaaacgtgatgcgcaccacgcgcaaaaagctgcccgcgggcatctgccagatcggcaaatccttccgcaacgagatcacgcccggcaacttcaccttccgcacgcgcgaattcgagcagatggagctggaattcttcacccgcccgggcgaagatctggaatggtttgcctattggcgcggcttctgccgcgactggctgctctccctgggcatgaaggaagagcacctgcgcctgcgcgaccacgacccggaggagctggccttctattccaaggccaccacggactttgagtatctgttccccttcggctggggcgagctgtggggcgtggccgaccgcacggattacgacctcaagcagcaccaggagcattctggcgaaaacatggaatacctcgatcccgtgaccaacgagcgctttatcccctattgcatcgagccttcgctgggcgtggaccgcgccgcgctggccttcctgtgcgacgcctacgaagaggaagagctcgaaggcggcgacacgcgcgtggtgctgcacctgcacccggcgctcgcgccgttcaaggcggccgtgctgcccttgcaaaagaacaagctgggcgacaaggcgcgcgaagtgtatggcatgctcgccaaacgctttatggtggattacgacgaaaccggctccatcggcaagcgctaccgccggcaggacgaggcgggcacgcccctgtgcatcaccgtggactttgatacgctggaaaccggcaaagtcaccgtgcgcgaccgcgataccatgcagcaagaactcgtcgccatcgaagacctcgccgcttatatcgatcagaagatcgatttctaaaacaaattggggctgtgaaaaaaaggagcaataaaaaaagaggatttggcgccgaagagaggcgctaaatccccttttttgtggtataatttac

SEQ ID NO: 627 - DNA, 13381 bp, Unknown
  16S sequences of unknown bacteria
gatatccgtcagttcaacctgatgttcaagacattccagggtgttaccgaggatgcaaagaatacggtttatttaagaccggagacggcacagggaatttttgtaaacttcaagaacgtacagagaacatcgagaaagaaactcccgtttggtattggccagatcggaaaatccttccgtaatgagatcacaccgggcaactttactttccgtacgcgtgagtttgagcagatggagctggagttcttctgcgtaccgggcacggatcttgactggttccagtattggagaagcttctgcttcaattggctgaaatcacttggtatgaaggaagaagatctgcgtctgcgtgaccatgatccggaggagctgagcttctacagcaaggggacaactgatatcgagtacctcttcccgttcggatggggagagctgtggggaatcgcagaccgtactgattatgacctgacccagcatcagaatgtatccggtcaggatatgtcctactttgatgacgagaagaaagaaaagtacattccgtacgtcattgaaccgtcgcttggtgctgatcgtgttgttcttgcattcctgtgcaatgcttacgatgaggaaaacatcggtaccgaggaaaaaccggatatgcgtaccgtactgcatttccatccggcacttgctccggttaaaatcggtgtgcttccgctttccaagaagctgaatgagggcgcagagaagatctacacagagctgtccaaatattacaactgtgagttcgacgaccgaggaaacatcggaaagcgttacagaagacaggatgagatcggtacaccgttctgtgtaacctatgacttcgattctgagactgacggtgctgttaccgtacgtgaccgcgatacgatggagcaggagcgtgtaaagatcgaggatctgaaagcttactttgaaaagaaatttgaattctgatatgaattagaaaaagttcttgcatgaggcaggaggatttggtataatcaaacgcctgtcattagccggaacagcatgaagcggatcgcctggaaaaacccgggcgatctttttgcgcctgttcatggattcaccgccgaaacaggagcattttgacggcgaatccatgaataggcgtttgattgtgcattgtgtcaggaatattttttgaaaatgcagaatatgacaatattttcacaaagtcgaagcaaaattacaggaaaaaatacataaaaaacatatgaaaaacttgacgtaatatggaaatatgctacaattaggggagaagagttattgggtcggatttgctatgatgaaaaaacgtcttactaccggaagcgttttaaacgagtcaggcaagaggaaaagcggattgtaaatatccgtccagtccggcgggtagctgttgaaatacaatttaggaggaatgtgtaacatggcgacaaaatgggtttatatgtttacagaaggaaatgccaatatgagaaatcttcttggcggaaaaggtgccaatcttgcggagatgacaaaccttggccttccggtaccgcagggctttacaatcacgacagaggcctgcacacagtattatgaggacggcagaaagatcaacgacgagatcatggcacagatcatgacagcgatcgagaagatggaagagattaccggcaaaaagtttggtgataaagagaacccgcttcttgtttccgttcgttccggagcaagagcatccatgccgggcatgatggacacaatcctgaacctgggtctgaatgaggaagtagtagaggtacttgcggcaaaatccggcaatccgagatgggcatgggactgctaccgcagatttatccagatgttctcggatgtcgttatggaagtaggcaaaaaatatttcgaagagctcatcgacaagatgaaaacagaaaaaggtgtgacacaggacgttgagctgactgcagacgatctcaaagagctggcaaatcagttcaaggcagagtacaaagcaaaaatcggcaaggactttccggcagatccgaaggaacagctgatggaggcgatcaaggctgtattccgttcctgggacaacccgcgtgcaaacgtttaccgccgcgacaacgatatcccgtattcctggggtacagcagtcaacgtgcagatgatggcattcggaaatatgggcgagacctccggtaccggcgttgcatttacccgcgatccggcaaccggtgaaaagcatctgatgggcgagttcctgatgaatgcacagggcgaggacgtagtagcaggcgttcgtaccccgcagaagattgatcagctcaaagaagttatgccggaagtatacgagcagtttacgcagatctgccatacactggaagatcattacagagatatgcaggatatggagtttacaatcgaggataagcatctctatatgctccagaccagaaatggaaagagaacggcgaaggcagcgctgaagattgcatgtgacctcgtagacgagggcatgatctctgaggagaaagcagtagccatgatcgatccgcgaaatctggacaccctgctccatccgcagtttgataccgcagcactgaaggcagcgacaccggttgcaagagcactggcagcttctccgggagcagcgtgcggcaaggtcgtattctccgcagaggaagcaaaggcatggaacctgcgcggtgagaaagttgtcctggtacgtcttgaaacttcaccggaggatatcgagggtatgaagagtgctcagggtatcctgacagtacgtggcggtatgacaagccatgcagccgttgttgcgcgtggtatgggtacctgttgtgtatccggatgctcagaaatcgcaatggatgaagagaataagaagtttgtacttgcaggcaaagagtatcatgagggagactggctctccatcgacggttctaccggctgcatttatgacggaatcatcccaaccgtagacgcaacgatcgcaggtgagttcggccgcatcatgggatgggcagacaaataccgcaccatgaaggttcgtacaaatgcagataccccacacgatgcaaaaaaggcacgtgagcttggcgcagaaggtatcggtctttgccgtaccgagcatatgttctttgagggcaaccgtatcgacgcattccgcgagatgatctgctctgagacggtagaagagagagaagcagcactggcgaagatccttccggagcagcagggcgattttgagaagctttacgaagcactggagggatgcccggttacgatccgtttcctggatccgccgcttcatgagtttgtaccgactgaggaagcggatatcgagaagctggcagattcacagcacaagtcggttgagacgatcaagaatatcatcaactccctgcatgagttcaacccgatgatgggacatcgtggctgccgtctggctgttacctatccggagatcgcaaagatgcagacacaggctgttatccgcgcagcgatcaatgttcagaaggctcatccggactggactgtaaaaccggagatcatgatcccgctcgtaggcgacaacaaagagctggagtatgtgaagaaggcagtcgttgaaacggcagacgcagagattgcagcgtccggcgtagatctcaagtatgaggttggtacgatgatcgagatcccgcgtgcggccctgactgctgacgagattgcaaaggatgcagatttcttctgcttcggtaccaatgacctgacacagatgacatacggcttctcccgtgacgatgcaggcaagttcctgaacgcatattatgatgcaaagatttttgagaacgatccgtttgcaaagctcgaccagaacggtgtcggcaagcttatggagatggcgatcaaactcggtaagtccgtaaatccgaacctacatatcggaatctgcggcgagcacggcggcgatccgacatctgtagagttctgcaacaagctcggacttgactacgtatcctgctcaccgttcagagtaccgatcgcgagacttgcagcagcgcaggcagcgatcgcgcaggggaaataaaatattgtttttgtgtcacggggcaaactcatttatccagttttgaggcaaaattaatatcctcttgctcttatggatgaatgaattccgctgggtacgacaataacgactaaaagaggaagactcttagaactttggagtgatctgaggttctgagggtctttttttgatgttttggtgcaaaatatggaattaaatgtaaaaaagctcttgtttttaagaggtaaatggcgtgaatttccggatgaaacggtgatttcatctgaatgtaaaaggataaaatttttgcccgtaaaaaggatatttagagttgccccgtgacacatagaagaaatttacaaatttgcggacaagataaaaacaatgcctgagtgccaaaatttgacctcagaagaaaaattaaaaataattttctcgtacccatttaagattgaaataatttaaaggatattttttctgtaaagaatgttggggaaaactaaaaaatatggagaaaactaataatgaataaagtcaaaaacaatcaaagctgcataacctgcagatattcagaagaatcctatgaagatattctgggagcaggcggacaaccggaaacaattcttgtaagaagatgcccgttcgtaaatgatgaaaaggtaaaaaatgggaaaacattgacttttggccgcatcttgtattgtatatcatagtgatgatatccgaagttcctgatttttcagaggaaacattatgaagagtacgtatcggctagcaggccacaccattaaaatcgagtcactctattcacaggtacatacgctgtgtgcagcctaccgggtagaagatgatgccgaatactgtatcactaccgcacccgccgacattgcatacgagcggcagcgctctgcgcgggcagacgagttggaaggtgcggcggtgcgggagcacgcagatccctatctggaaacgctggcggtctaccgcaaactggcgcagctgctggtgcaggacgatatcctgctgatgcacggtgccgtggtggcggtagacgggcaggcgtatctgttcaccgccaaaagcggcacaggcaaaaccacccatacccggttgtggatgcagcagtttggcgaccgcgccgtgatggttaacggggacaagcccctgctccatgtcacaaacacgggcgtgaccgtctacggtactccgtgggacggcaaggagcacctgagcactaacactttctgcccgctcaaagcactctgcatcctgacccggagcgagacaaaccacatcgagcgcatctcaaaaaaggaagcgctgcccatgctctgccagcagatctaccgtccggaagacccggcgacgctggcaaaaatgctggcgctggtagaccggttgggcagcagcgtgccgctgtaccggctgggctgcaacatggaaccggaggccgcacaggtggcctaccatgggatgaaccaagaatagggggaacgcatatgcaaaccattttaccgccgtctggcaatacgatgaagatccttggtaaaccgaagccggcagagtacggcctgcgctggatgacatatgttcttgcccagccggtcgagggcggagttctggtgttccataccctcacacgggcgctgcttctgctcacgcaggaggagtataccgcaccggatgccgtggctgaactgcgcagcagctggttccgcgtaccgcaggagatgaacgaccagaaatacgccgaccatgtgcggtttatccgccgcacgatgtggaaggaaccggagcatattacaagctataccatttttactactacggactgcaacgcccggtgcttttactgctatgagatggggcgttcccggattcccatgagcgacgaaaccgcccacaaagcagcggcatatattgcagcgcattgcggcggtgaaaaggtccatctgcattggtttggcggtgaaccgctttttaataagcaggtcattgatatcatctgcaccgaccttgctgaaaagggaatcgtgtacgaatccatgatcatctcaaacggatacctgtttgacggagctaccgtagaacaagcggtttcccattggaagttgaagaacgtgcagatcacgctggacggcacggaggaaatttataaccgcagcaaggcctttatttataaggatggcaaaagcccctatcaggtggtactggcaaatatccagcgtttgctggatgcaggggtttccgtccatatccggctgaacatggacgagcacaacgccgataatctgatggaactggcggatgaactgcacgagcgcttcggaggtaaaggtaaattttcggtttacagccataccttgtttgagtttgcaggcagcaaagcacatatccgtgcccaagaagaacggcgccagctctatcaaaaacagcagaggctccgcaaaaaactggacgattgcggaatcggagcatcgtactatttgcgccaaaaactgcgtatccggcaatgtatggcggatagcggcggttcccttacgatcctgccgaacggggaacttgggctgtgcgaacattacagcgaggacaactttgtgggaagccttgatggaaaagcgtcagagcgttctgtcatccaaagttttcgagaatactgggagccgattgaggagtgcaaagcctgcttctattaccccgaatgtatccgtctgaaaaagtgtgttgaacagaaagaatgttttgaagaactgcgagcagagtacaaagaatacttgttaaagtccatgcaaaaaaactacaacgcatggctgaaaaaagagcagatcgatgaggaagaacctcacccggactgttgatcctttgcgtgacgcggcgcagcagccgcttcacatagaaattttctgcgaaaggagatgtgtaaacatggaaaagtacacaaaggctcagatggaagtcatcgagttcgaggccgaagatgtcatcacgaccagcggctgcaatggcgtgaatgccggcattggcggctggggctgcggaaccgataacccctcctgtccaagtgactgctgggagttcgatgtgggttgatttcagaaaggggcaggccgtttcggcggtctgccttacccgattttctttgctctgcaaagggctctgacatagtttttttccaaaatggaagcgaggacttgactttatgaaacaaacagcgataatgcttagcaagcaggttaaattatgtcctgagtccggttttctgccaacccctccttttgcgtgatgcggcgtaacagctgtttcacatagagatttcttacgaaaggagggaaaaacaatggaaaagtataccaaggctcagatggaagtcatcgagttcgagaacgaggatgttgttacggcaagcataccgattgagaaatgtccttatgatggtggatgtaagattgagagcctcatctgtactcaggacagtggctgttcgagcgttatatggggtgactaattcaaaggcaggcagtttttggctgcctgccttctttttgtatagaagaaaggacgataaaatatgaaactgaaagatacctttgtgacgcaggagatggacggcgagcaggtgatggtggaagcgggcggcggctttgccggcatggtgcgcagcaacgccaccgctgcgtttatcatcgaccagctcaaaacggaaaccaccaaagaagccattctggatgccatgtgccagaagtacgatgcaccccgctctgtgatggccaaggatgtagatatggtgcttggcaacctgaaaaaaattggtgcgctggatgcctaagctcacactgaaagaatgccttgcgcaaaatggctttctgacctaccgtatccggggcgtgagtatgcagcccatgctccggcaggggcgagacctgtttaccgtagtcccaaaaggcccggaacgctgtaagaaatacgatgtggtgctctaccgcaggccttccgacccatatgtgctgcaccgcatcattgaggtgcgcccggacagctatgtgattctgggcgacaattgcattgcaaaagagtatggcatccgggatgaggatattctgggtgtgctgacttcgtttcaacacaacggccatacggtgtccgtatctgactggcggtatcggctttacagccgcatctgggtcttttttcagccgatgcgtatcttttgcaagcatgtgaaaggaaagttgtgccgatgagacaaaaacataccatgcaatggctcagcgctgtcaccggcagggcaaaagggctggtggggctgctggtagtggtgcagaccgtgctgagcgtttccagcatcgcttttgcgttcgtgctgcggcgcattatcaatatggctgtggacggggcatggggcagcttctgggctgcgttggctgcgctggtgggcatcctgctgggacagatcatactgagcgcagcaggtcgatttttgagtgaatacaccagttctgcggtagaaaaccgcttcaagcaccggctcttttccgccctgcttaccggcgattatgcctcggttgcggcggtgcactccggcgagtggatgaaccgcctgacctcggataccaccgtggtggcgggcggcgtgacccagatcgtgcccgggctgatcggaatgctggtgcgcttgctgggcgcagtcaccgctattttgtggctcgagccgcgttttttgtacattttgctccccggcggcgcggccatgatgctgctgacctatgcgttccgcaagatattgaaacgactgcacaagaaaattcaagaaacagacggcgcgctccgggtgttcttgcaggagcggctggaaagccttgtcatcgtccgcacctttgccaaggaagaacagatggcgcagcaggcagacgccctgatggacgcccacaaagccgcccggatgaagcgcagcaatttttccaacctgtgcaacatcggctttgccggtgccatggacggggcgtatctgctgggtatcgggttctgcggctatggcatcctgacaggaaccatgagctacggcaacctgatggccattatgcagctggtggggcaggtgcaaagcccgtttgccaacctgaccggctatctgccgcgctactattccatgctggccagcgccgagcgtctgatggaagcggaagcctttgcgcctgccagcaccgaaactgtaccagaagcacaggttctacagttttaccagaccgaattgcagtcccttcagctgggacacgcctgctttacctatcagcccccggtgcagaccgagggcgaaccgcctgccatgccggtggttttgcaggatgtcagcctgactgtccgcaagggcgaatatgtggtgtttactgggccgtccggctgcggcaaaagcaccatcctcaaactgctcatgtgcctgtatccgctggattccggccaaaggttcctttccacgaaaagcgggaaccaaccgctgacctcagcatggaaaagtctgtttgcctatgttccacagggcaaccagcttttgtccggttccatccgcagcattgttgcatttggggatgaaaaacgggcgcaggatgagaatgcaatttataatgcactgaaaatcgcctgcgcggacgattttgtacgcaggctggaaaacggactggatactgtgctgggtgagcgcggcgcaggtctgtccgaagggcagatgcagcgcatcgccattgcccgggcggtatattccggccatcccattctgctgctggacgaggccaccagtgcgctggacgaagcaacagcccttcgactgctgaataatttgcgaaatatgacggacaaaacggtgattctggtcacgcaccggatgaatcaggcggatttctttgataaggagctgctcttttcaaaagatggtatttgtgtgagggaaaggaaaacgtgtaaatgaaaagaaaaacattatcaatcgtagtccttctttttgttgtcgtgctgttcggactgctctttgtaaattaccgtcagaaacagcggcagacaacgcatatgcagcaacttcaaaaggaagcaatgccatatgagcaagagatcaacgatatccgttgggagcttgtacaaaagaaacgtgctatcaacacgaaagaggatacttctggcatcctctttggtttcgttcctgcatcggcggatgattttatcgagatcgataagctggctgcagaacattccatcaccccggtgatccttctggactgttcacaggaaaaagacgtgctgacggcgatcctgaaaaaagctgttgaaaaagattatgaagttgtgttggcgggcctgcaatttggcgaatccattttgcagacggcggacgagatgaaagactcgttagcacagttggacgataccaaaagtcctgcgtttctgcttcggaacaatgtgaacacagaagagaaccggaatcttctgaatgaacatggctatacagaattgatcctgtatgataatttcttgcaggctggtatgcaggaaaatgggaaaccatacatttgctatggctttttcaggcagcccgtctactactcagactatatttctcaagttgttacagcacataccataatgcttgcggcgtttaatttttcaacgattcaaagcggaacgctccagatttcagatgttgaaagatttatgacgatggcagacgaccggaaagcggccaatgagttgcgttatgttgacctgaacagtgcttttcaggcagtggccgaccagaataccacccagcaagagcggcaggaatcctatgaaaaatatgaagcggagcagaaaaagcgcattcaggaactcgaagaaaaaatcagtgcaatctacagctgttgggatgagtattgaaggagcatgatatggaaaagacttcggaacttttgatttatctcgtgggctgttcactgcaaggcacaaagccggaaggagcactgcttgcaagtattgacttggaggcactgcttcggttagcgaaagcgcactccgtttctgcaatggtgtgcatggcgctggaacagacagacgaattccagaacgctgctgaaaccacccggctgaaatggctggacagcaaaaataaggccgtccgcaaaaatgtgctgctggatgccgaacggcaccggctggaaaaagaatttacagaaaatggcatctggtatatgccgctgaaaggcagcatcctgaaagaatggtatcctaaattcgggatgcgggaaatggcagataacgatattctgtttgatgcgacaaggcggcagcaggtaagagatatttttgtaaacaggggctacagcattgagtcctataacaagagtaaccatgatgcctatgaaaagccacccatctataattttgagatgcatgttgcgctgtttgatgaagactactcaactcttcaaaagaagtatgagaatgtcgtagacaggctggtgcaggacgagaagctacctttccggtatcacttcaccccagaggatttctatgtgtttgttgtggcgcatgcctacaaacattacagccatggaggaaccggcattcggactctggcagatttttatgttatgaatcggaaactggggaagaccttagactgggagtatgtagagtctgagctgaaggggctgggcatccttgaatatgaaagggacagtcgtaagttatcacagaagctgtttggagatgccaaaaccgtgttgaggtccgatttgactgaggaggagaaccagatgcttgcctattatctgggagcgacgacctacgggaatctgttcaactggacacttcataggatgcaggaatttcagccagatggggaaccgctcactacgaaaaccaagggtaaatatatcatatcccgtatgtttcccaatatggagtggtgcaggcatcatgctcctgtggtatataaacttccggttctgctgcctttctactgggtatggcgtttgatatacaagggcattacgaaacgaaagaaggtcacacaggagataaaagcgatcaaagcagggaaataaaactgaaaaacaggagcctctacaggagctttcaccacatgactgccttttcggcagtcatgtggctattttttacttaaacacaatgagaaaaattagagaagggatgaaaaaatggaacagacatctctctttgcagatatgttctgattatttataaaaactattattgaaaaagggaggtgtttctcagtataatattctgtattgaggaatgttagttaaaagtatataggtaattggaggttattatggatcaggcacatttaaagagggcgggtacagttgcgacagttattttgggaaatgttttctatgcttttgtaatcagactttttcttttgccgggaaatctgatgacgggagggacaaccggtatcggcctggtagtgaagcattttacaggaacatcaatttccgggtttgttttagtatttaatattgtgatgctgatagttggatggacgcttcttggcaagaaatttgcactgacgacagttatcagttcttttacttatccaatcgcattggaagcggccaatcatattttcggtgatctggtgattacaacggatccaatgctgaataccatatttgccggacttggaatagggattggtctggggattgtgattcgaacgggagcttctacaggaggaatggatattccgccgttggtgttgaataagtattttcgaatcccagtgtcggttagtttaaatatatttgatatgttgatcctgattctgcagattgtatataatcctccggagcgtgttttatacggtgtgttgttagttatgatttatacgacagtgttggacaaagtgctgatgatgggaaataccaagacggaagtgaaggttattagcagtcaggtggaagaaatacgtcaggtgattcttgcacaggtagacagaggtgtgacgatgttgtatggtgaaggcggatatcggcaggaacaaacgcagattgtgttgagtattgtatctaatcgtgagcttccacgggttgagaaattaatcagacatattgatccggaggcttttatgattgttagcagagtcacagaagtacgaggaagagggttctcattgagtaaacattacggagaagaggaagcgtgatgcaatgagggaaaagggcgtgtgaaaaaatgagaaatcattttttgcacgctcttttatcaattttaggacaataagcgggaatcctcggtaattcaattaccgagatgaaagcgtagaattgtgcatatctgcacagt

SEQ ID NO: 628 - DNA, 32759 bp, Unknown
  16S sequences of unknown bacteria
gagggacatgccaatgccgttaagcttgtgcgcgccataaagtcgaaagatccgagcacgatggcggacctcataataaacaaagccgtggaaaattacggtgtcagagaaaaagacgacctcactgtaataagcgcagttataaaggatacctctttgacttgcagtaaacgagcatagtatggtataattttctcatggaaaaaaacataaaagcaaaagtaatttctgagataagacaagcaattttacgatataaaatggcagataaaggcgaccacatcgttttcggactttcgggcggtccggattcggtgtgccttttttttgcgttttatctgatgagagaagagctcggcatcacgatgtcggcagtgcacatcaaccacaaattcagacctggagcagcagaggaggatcaaagctatgtggaaaatttatgtgtcgggcttggcataagatgcagaagtgaagtctgcgactgcggtgaaatagcggaaaggcttggcataacgagcgaggaggccgggcggaaggtgcgctatgaagcatttgatgccgaagccgcatatatgcaggagcagctcggtatagcaaaatcgcaggttaaaatagcgattgcgcataatatggaggatcaggcggaaacgatacttttcagacttatgcgcggtaccggcacggatggactttctggcatagagaggaagagaacgagcgaaaacggttatactatcataaggccgatactcggtatcagcagaaaagatatagaagagttctgcaaagaattcgagcttgcgccgcacatagatcttaccaatcttgaaccaatatatacgagaaataaaataaggcttgggctcattccttatatacaggaaaatttcaacgaaaatataacggaagcgctaaacagactcgcgattatagccggcgaggatagagaatatatgagacagcaggccgaaaaatgctatgaagaggcgcgaaaaagtgcagcggcttcggaattgggtattgacagacttgccggcttgaaagctgtagataaaagcagcagtgaagaagataaggaaattgcgctcaatatggagattttgcgcaatactccgaatgctattaggcatagagtgatgatgaaatcactcgcagagcttgggcttacgcaggacataagcgctgtgcatatggacgccgcagacagccttatcgagcgcggcgttacgggaaaaacggcggaatttccatatggatacaaggctgttacaagatacggtgatatagtgtttaagaaaccgcaggcatcggcaagcggtgatatcaaaaaaaatgcggataagcgaaaaatatccgaactgcataagaatatagaagcgtcgccgatactgacggcgaaaatagttacagcagaagagtggagagagtacgagagacaaaagaatgcttcgggcgcgccgaaaaattttgccgcattcgattataatgcgctttgcgaagcaaaaggaggatttgccgccgcggaagaagccgaagaaaagcttggctgtgcggacgtcggtttgaagattgtgcttcgcggcaaagaggcgggagattttatcgcgctcacaatcggcagaaaaaaggtgcaggacctgctcgtcgacagcaaggtgccgcgggatcttcgcagcagcgtactttttgcggcagcgggtaatgaaattttgtggatgataggcgctgacagtgggatttcatgtgcagccaccgcaaaaagcagatttaccgcaaattataaaatttcacaagcgtctaaaaaggtacttatacttgaaataggcgaataattgtgttaaaatataaaatacgcgtgaatacaagcaggcaaaattgtatttgcttcacaaaaatgtagaaggggaatggaaaaaattgaacaaattttttaggaatataggtgtatatttaataatatttgcgcttgttctggcaatggcctacctgtatagagggggcgcgccgcaggaagagataaaagaaattaagctttcggagtttgttacggagcttagagacgaacaggtaaagagcataaatataggagaagttacatcgagcaatgtaaagcctgtgcagggagaactcaaggatggaaccaagtttatctgctatgtttcgtcgataacacagatgagcattctcgatcagcagtatatactgccgcaggtcgaaagcggtgtgatagagtcgtatacgagcgatgagccgacggtgacgccgtggtatatcaatttgctgccgacactcataattgctgtacttatgatagtttttgtagtgctgattatgaatcagcagggcggcggcaaagcgatgcagttcggcaagagccgtgcgcgccttgccaaggacagcgaccttagaaaagtcacgtttaaagatgtagcggggctcgacgaagaaaaagaggagctcgaagaaattgtagattttcttaaaaatccaaaaaaatatcagcagctcggagcgagaattcccaaaggcatacttcttgtaggccctccgggaacaggtaagacgtatatatcaaaggcgacggccggagaagcgggcgtaccatttttcagcatttccggttcggatttcgtggaaatgtttgtcggcgtgggtgcttcgcgtgtaagagatctctttaatgaagccaagaaaaatgcaccttgcataatatttatagatgaaattgatgccgtaggccgcaaaaggggcgcaggcataggcggcggacacgatgagagagagcagactctcaatcagatgctcgtcgaaatggatggttttggcgaaaataccgggatcataattcttgcggcgacaaacagacctgatatactcgatcctgcgcttttaagaccgggcagatttgacaggcagatagtaataggcgtgccggatattaaggggagagaagaaatttttgcggtgcattccaagaataaaccgctggacgagggcgtaaatcctaaagtgcttgcaagaaggactccagggtttacacctgcggatatagaaaatcttatgaacgaggcggcgcttctgacggcaaggagaaacggtcttaaaataaggatggatgaaatcgaagaagcgattacgaaagtgattgcgggaacggcaaagaaaagccgcgttatttcggagccggagcgcaaactcacggcttatcacgaagcaggacacgcgatcgtggcgcgtacgctgcctaataccgatcctgttcatcagataactatcataccgaggggctccgcaggcggatttacaatgatattgcctaaggaagacaattattacggcacaaaaacgaagatgacagagcaaattgtgcatctgctcggcgggcgtgtggcggaaaagcttacgcttgacgatatttccacaggcgcgtcaaacgatataatgagagcgacggaacttgcgcgcgatatggtaacaaaatacggtttttcggaaaaactcggccctgtctgctatggacagacggacgaagtattcctcggcaacgactatcattcacgcaagaattactcagaggaagttgcagccgagatagacgaggaagtaaggcgcatagtggaagaaggctttgcggaagcggaaagaattctgaccgaaaatatagataagctgcacgaagtggcggcggctcttctcgaggtcgaaacgcttgacggcgagcagtttgaagcgctttatacaggagagattacggcggcagagcttgcgggcaaggtgaaagaccgcgatgaggaaataaagaaagcgaacgaagctgaagcggcggagagaaagagattgatagccgaggaagaggcgcgcgaagctgcggaaaaagcaaatgcaaaggtacagattgtgcagatgccgggcgataagtcggatgaagcgataagagctattctgatgaatataaataacgcagctgattcggaaaagccgtctgataaaaataaagacggtggagaagacggcgatgacgaaaatggcggcagcaacaaggaagaaagcggcgaagataaggaagaataaaaaagtataaaagtaagcaataccaacagataattgattaggaatggagaagaatcccgaatgaaagttacggtaagagaagttctgcaaatggatatattaaaagaggccaaagtgctcgcgggggaaagcggtcttgatgtaagaatcaggaacgcttccgtgctggagggtctccgtagcgatgaaatatcttcatatgcaggcaggacaggcgaacttgtaatttcgggttttttccatattaaagacgatatagaagagcagtgcgccatcgtgcgcgcacttgcccaaaaaggctgcgcggcgctggtgcttatgtatgtaggcgatgttttgcccgaggtatccgatgagctcatagatgctgcggaaaaagcagggcttccgcttatttctcttgaaaaagagggagtgtgctgctctgacgtggcaagagatgtttcggccgaactcgtttacggcgatagttttggtaatcgtcttatcagcaacaccgtattccatctgctcaactttgaaaagcatccgaattttcaggaggccctcaaagaagcggcaataaacaatgattttcagataataatactgtcggaggactttaatccaatactttcagtggagacgcgccacagggtcagcatagacgaggctataagaataggaagaagccgtgaaatgaatgactcttctgtttatacactcgtcgaagtggacggcgttttgacctattggggctcggtgctcataaacgacgaaaaacattatatgtttatagtcgataatgaggactgctattcggccaacgagataacgaagcttgctgaaataatagagctcgctatggggatgtggaaatatacgcctgagcgcgacgcgagagcagagctcataaaagcgcttaagcgcggcagtaagagccttgcatatagtctgaaagaagaagcgggcataaatgatgaaaatatactatgcgtattttatgcgcacggtatcgagacgccggaagcgcgcaagataatagatgattttgagcagaatgaaaaattacgcatcatgaaagtggctgagggagatgacacgtacggacttattctcacgcagcttgtcgaaaacgacgaagacgcggccagcaagagaaacaaatgcaatgacctctttaatgatctcaaagctgaaaacgcggtgcgcatattcaacgttataggtgtagaaggcatcgaaggcgcggctgatgcgtacagactgataggagaaacatggtcgtttgtgcagagcgtatttccgtacaagagagtgtttacgaagtacgaaatggtgcttgtaagcaactgcataaatattcagctccagggcgggtacgtcaaaaagaatcatatggatttgctagagccgtttaaggaagtcggcgagcacaagggcagacagctgctggaaacattagaaacattcgtgctcgatgcaggtatgaacagcgccaagaccagtgaatttatgggtatacatacaaacactgtgcagtacaggcttaagaaaataaacgatgtactgagcgcggaaataacaggtaacagagttattccggggcttactatcgcgcttgcgcttaaacgcctcgacagagttgtaaaataatttgcagagcaggcagaatttatacggcaatggaaaagagtacagagaagcatattaaaataaaaaccaatagattattggcagtgacagcgcttatcgtgtgtgtcactgctttttgttctcatgtatatggtgcggagacggcagaagcagcaagcgatttagcaagagacaaaggtgtgagtacttacgcgtgtgcaaatggggacgaactgccgcgagtgattgcgcatggaggaggcacagcgcttggatataagaccaccaattcgcttgaagccgtgcagcagtctatagaagcgggctatacgctaatcgagctcgatatgctcattacggcagatgatgaaattgtaatggcgcatgatttcggctcttcgtggacaaggcaatatatgggagtaaagttcacagaacggccgacagctgaggagtatctttcaaataaaatatacggttttctgacgccaatgtcgtttgatatgctgacagaagtactcgatgagcatcccgatgtgagaatagtgaccgactgcaaggaaaatgctgtcgagctgctttcactcatagcgcgcaaatatccgcattatatcgccaacatagtaccgcagatatatgattattatcagtatgaacaggtgaagcgtctcggttacgaggatataatatttacgctctatacgatgaattatatggactacgatagattgcttgcatttataaaggaaaaagagcttttagcagttacagtaggcgtggactatacgtataaagaggtggcttataggctcgctgaggatgatgtatgcgtgtacatgcatccgcttaacgattttgatgacgctaatgcgctcatagaaaaaggaatatacggtgtttattcaagtgtaattgcaccagatgagctctgcggcgacgagagaacattttacttgacagatccggtgacgggggaaaagctgtcagatgtaacattgccgggtatagcggcggcgtatgttatgtcgattccggtgcacggtgcgggaagcggcggcgttttgtactatatagacggtttttcgctttcgcaaaagctgcttgacaatatgacagagggtattcatacgctgacgataaaaaaaccgcgcggccaaacgagcatagaatatttgatatataaaggtataaagcaggatggaagcaaatatctgcgtgtcgcagagcagaagaatgcgtacaggctgaaaatgctgagaagttatcctgatatggcgaagaagctttctgcatatgctggactcagcagcgatcagaaaacagtgcttatgaactcggtcgtgatggcagcaggagagagtggatattacgatgccggcgttcttaaagagtttaggctgtcaaaggacgagttgatggcacctaaatttgattcttcgggcgcggtcagcccacctgtaaatacttggaccgcaaggccgcatataaattatgaaaatgtactcatttatctgcctgagggaatttccgcagcggaaaatgaaagcatagcatttgggaaagcggtaatatatatatttaatgattgggacagagcaaaggaggaaatctatgctacttgcatttgacgttggcaataccaacatagtcctgggtgtttttaaggacgaaaagctcattcaaaactggagaatggaaacggacaacaagaagagcgccgacgaatacggtatgctcgtaaatcagcttttttcgtatgtcggacttgacacaaaagaagtgaaagatgtgataatttcaacggtagtgccgtctgtactctatacgcttcagcatatgtcgagaaagtatttcggctgcaagccaatagtgatagggccgggagtaaaaacggggctgctcataaaatacgacaatccaaaacaagtgggtgcggacagaattgtaaacgcagtcggcgcttatgccaagtacggaggtccgctcatcatcatagatatgggaacggcaacgacattctgcgcggtgacggataaagcggaataccttggaggtacgattgctccaggacttaagataacgtcggaagcgctcgttgaaaaaacggccaagctgcctaaggtagagctcgaagagccggggcatgtgatctgcaagaatacgatacagtctatgcagtcaggtctcgtctacgggcatatgggtacggtggactatgttgtcagaaagatgaaagaagagctttgcgaaatttgcggtgcggacaagccaataaaggtaattgcaacggggggtatggccaatatgattaaaggcggagtagactgtatcgacaaggtagacggtatgctgactctcgaaggcttgcagattatatacgagaaaaacagaagagagcgcgaaaagagaaaagctgcggaatgcaaatgcttttacgtttgaaatcgtggaaaattgaagagcaggtgtttaagctgcggatataaatttagttcataagagaaaagggaaagcgtatgagtatgcgtgtggaacacggttttgatcctgtatgtgatgaaaattcaagagtgcttgtgctgggaacaatgccatcggtaaagtcgagggagcagggtttttattacggacatccgcaaaatcgtttttggaaggtgattgcggcggctgcggaacgcgtaaatgcaggatgcgaaaacggcatagtctgcctgcgtgccgactgtggagacggtgactgcggcagagaccgcatgggttgtgattttgacaattacagcggaagggaaatcagagtgccgcagacgatagaggaaaagcgtgcgctgctgctttccgcgggtattgccgtttgggatgtgcttgctgcttgtgagattgagggttcagatgacagcagtatcagaaatccggaacctgctgatatagggatggtgctgcgctcatctccaagaatagagaaaattatctgtaacggcaatgcggcttataaactgtatttgaaattttttgcggaagaggcggcacggtataagtggcctgaggcagtaaagctcccgtcaacgagtcctgcaaatgctgcctggaatcttgcacggctcacggacgtgtggtgtgcggaaatagctgtatcagcaaagtgaagattagagatagagattgcttgaaaaatgctgtagataggagcgccgtttggcaggccttgcgcagcatttctttatagtttttgacagtgaggacagtaaacgctgcttctgccgcctataactgtgcgcgttaggatggtaccgcagacgggacacggcttgcctgcgtgcccgtagacattaaggaagggagtgttgcggtattcctgtccttttgtttttaagtattcctcaggtgtaattttatttttttctgtgaaatatgcgagtctctcaggaatgattgcggaaagacgagcaaagtctgctttttctaagctgtctgcgggacgggcaggaaaaattcccgcagcaaagagaatttcgtcagcatagatattgccaatgccggcgactatactttgatccagcaggcatccttttatagcttttcttcgtttcttcaaattggcttcgagatactcggatgtaaacatttcatcgaaaggttcaggaccaagctttgttatacctgtgcacgtatcaggctcgccggcttcaagcgcccagaagcgtccgaagcggcgcgtatcggagaagcgaagctcgcttttattattgaagcggaagatgagatgagtgtgtttttcttcgggaaaatcaggcggtgtcagaagcaaacagccggtcatacgaagatgcataataatgcggatttcactgtcaagaaaaatagtcagaaattttcctctgcgcgacatagcagaaaccatgcgcccttctgtgagcaggcggaatttttcggcttcaggatgttcaataatacgaggttgtctgataacggtttcttcaattataagaccatttatttgcgggtcaagaatattttttattgtttcaacttctggtaattcaggcataacttcatgcgtcctttcttgcagcttttttaattctttcgcgataaaaataatcttacttacttatattacagaggcgtatttttgtcaagatggagtgatgagaaatttgtacctttattttctatgggatttcggcttgtttatggtataatggattggaaaacaaacgacatttgaaaggaagtatttgtatatgaagagggttaagatattggcggcggtactgagctttatacttatatgcgggtctattatcggctgcgggaatggagatagcgctgatggtgatagaaagcaggagaaaacgagcgtttattctgtaaaaataggcgataatttgtacagcgtggatgaggagcttactgctgagatggcagcgttccttatggagacatgcgaagtggagtttgcagaagcagagtcgatatttcctgcatcaaatttctataaaaacagagattttgcaataaggacttggataaatgaagcggacaacggcgaaaatagcgaaactatatattttataagtacaggaacgggaagtacggagagaggtatatctgtcggtaatacactgaaagaggtgagggcggcttatcctgagcttgcatttatatcgggaagctgcacagacgataacggcgagtttatgaacaatacgagaagataccgtttttatgatgacggagatgatacgaacaattatcttgatttttggttggcacgaattgagggcgaggaaagcacagatggcagcgagtgggcggtaacaggaatcgagactgccgatgccctcgatatgagccgtgagcaggatatcgaaacgggcaaagtgtttggcgatgacaggattcatatggaaatgccggatggacttacgacgaggattttccgagaaaatgcggacggaagtgaaacagagataaaatcatttgcgggcgcggcgtcgggcgcggatcttgacagcgatggggttgacgagcttatttgccatgtaaacgacagcggatacaggaacatagtgataatagatattgtaaacggggatattatagagacagatgtgaacagcgagcttggctgcacatggtcggactatgcggggcttatagggaatataaagtcagagtatagaaactgtattaaagctgcgtttgatggcggagatggacgtgcaagcagttatctttatgattatgctgacggtatgcttgagcaaagatgcggcttggatgaagcgttgggcgtttgaatagattaaagactatggcgggagagaaaaaggaaggctatggcaacagaaggaaaaaagaataaagtgctgaaaataggaaacttggagctggaaagtccatttttgctggcgccgcttgcggggattacagacgcaccgatgcggagaatagcgagagagctgggagcggcaatgacgtattcggaaatggtgtcgggaaaaggacttatgtacggcgataagaatacggaacgtctacttgcgatatacgatgatgaaaagccggttgcttatcaggtatttggctgcgagcctgatgttattgaatacacggcgcgcgtgctggcagcgcgtgaaaatgcggttctcgatatcaatatgggatgtcctgtgcccaaaatagtaaaaaacggggaaggctcggcgctgatgaaaaatccggacttagtttatgatgtggtgtgcgcggcggtacggggtgcagaaaagggcgcgcaggaaaatggcgccgcgccgaagccggtgacggtaaaaacgcggatcggctttacgtcagatactgtaaatgcagttgaagttgcaagagctgctgaggcggggggcgccgcggccgttgccgtacacgggcgcacgcgcgagcagtattacagcggcaaagccgactggcgggagatagcgaaagtaaagagcacggtgagtgtgcccgtgatcggcaacggggacgtcttcacgggtgaagacgcccttgcaatcataagcgaaaccgggtgcgattttgtcatgattgcccgcggcgcccttggcaatccgtggattttccgagatgcacttgcgctttacagaggagaagaaaagccggaggagccctctgccgaggagcgcataagaatgcttatgcgccatttcagcgacctaattgcctttaagggcgagtatgccgccgtacgtgagatgcgtaagcaggtaggctggtacctcaaaggtattcgcggatcggcggaagttcgccgccgcgtgaacagcattacagaggctgcttctatggaggctgtgttcacggatttactgcaacaagtataggttatagttttaagtgctttaaaagcaatttttctcttgcaggtaaaccctgcgagtgttatattatatacatataatttctttaaggagacatcaaaatgattaagtataagagcacaagaggaagcgaaagaaggctcagcgcggcgagcgcgattatagcgggcatagccgaggacaagggcctttatgtaccggagtcggtgcctgcgctgcctatggacatagaagatatgcagaaaatgaattataaggaaatagcatacaccattatcagatcgttttttgacgattatacggatgaggaaatgaaggcctgcgtagacggcgcgtatgacggtaaatttgaagcagatgatgtggtgccgattgtaaaggccggggacgcgtattttcttgagctctatcacggcagaacagcggcattcaaggatatggcgctttcgatactgccataccttctcacaacagctgtaaagaaggaaaatgaagaggctaaaatctgtatactgacagcgacttcgggtgatacgggaaaggccgcgcttgaaggcttcgccgatgttccgggtacagaaataatcgttttcttccctgacaagggtgtgagcgaggtgcagaagcgccagatggtgagtcaggagggagcgaacacgcatgtattcgcaatcaacggcaatttcgacgacgcgcagacgggcgtaaagaagatatttaatgatgatgcctttgcagaaaaactcgcggaagcgggctgcaggctttcgtctgcaaactcgataaacattggcagactcattccgcaggtggcgtattatgtatatggttacgccaagcttgccgagcgcggagcaataaagacgggagatccgataaatgtcgtggttccgacaggtaattttggaaatattcttgcggcgtattacgcgaagcagatgggtgtgcctatcgacaaactcatctgtgcatcaaataaaaacaaagtgctcacagattttataaataccggagtttataatatcgacagggaattttatctcaccaactcgccttcgatggacattctcatttccagcaatcttgagagacttctctatcatctcgcaggaaacgacggcgacaaagtaaaggaacttatggacgcgctcgacagtaaaaaatcgtacgctattgatgagaggataaaagcgggaatgaaggatttttacggcggattctgtgatgtcgaagagacaaacgccgctatcggcagaatgttcagcgaaaacggatatcttatggacacgcatacggcggtagcatacaaagtgtatgaagattataaaaaagaaacgggcgataccaagccgacgctcatagcttccacagccagcgcatataaatttgccgagagcgtgtgcgaggcgataggacttccgaagcaggaaaacggttttgccgcagtaagtgcgcttgcggaaaagacgggcgtacgcgtaccggcggggctcaaagacctggagaagaaagaaattcgccacaagagcgtaattgatatagcggatatgccaagtgcagtatatgatgccgtgaaataaattttaattatgtgaaaattaaagacggggcaaatgactttacaaaaagtcggctccgttttttaatctgtaatttagggctataatttcatcatataatatggtagaattgtaaagaaaaagtgtgaaaagggaacaatacagaatgggaatgttggaactattatttttgagcatagggcttgctatggatgcagtagctgtttcgatgacaaatggaatggtgtataaggatttgaaagcacgtcattacatagcgatgccgcttttttttggaatatttcaaggtgttatgccgcttctgggattttttgcgggcagtctgtttgcagaaattttggacagatattcaggcatagtgatactcgttatactcggtattataggcggcaaaatggtatatgaaggctttacgcataaagagggtgaagaccttaaacccaggcttacgctcacggttttgcttttgcagtcggtagcaaccagcatagacgcttttgcagtgggtgttgcttttacagctatgaaagttaaaataattccggtggtgacggtgatagcgctgataacggcggtgcttgtgacagtggccattattatcggcaggaagatgggagatgtgctcggagcaaaggctgaaattctgggcggtatcattctcataattataggcataaaagcaatgctttaacagagctgatgcttaagattaagatgaacacggggagacgaaaatgaagagaattataatcgcatcgcaaaataagcataaaatacaggaaatagaggcgattacaaagaaatttggcatgtttttagtgccgcgcagcgaagcgggaattcctgacatagaagtcgaggaagacggtgaaacatttgaggagaattcatataaaaaggcgtatgaaataatgaagctcgcaggtgaaatgacgatagcagatgattcggggctgatggtcgatgcgcttgacggagcgccgggagtgtattcggcgagattttccggggctggggcaacggacagaagcaacaatgaaaaactgcttgcactgcttaaagatgtgcaggcggaaaagcgcactgctaagtttgtatcggtaattacgatgatttatccgcacggcgacaagatagtcgcgcgcggcgaatgccagggacgaataatatttgaagagcgcggcagcggcggctttggctacgatccgctgtttgtgcccgacggatacgacagtacatttgcggaactcggtgcggaagaaaagaataaaatcagccacagagcgcgggctcttgagatattggagaaagaactgagatgtcgtcaaaaagacttatagcgttattttcatcgggatatagacaactgaacgactcgtactatcagggatttgcagcacaggtggcattttatctgctgctttctgttgtgccgacgatcatcctgctttcacagatactgggagtattttctctgtcgcttgaattgctttcagactggatatcggaatacatgcctgaagaaacagtgcgtcttattctggggctttttgattatgtgccgtcgggcgtgcggagcggattttttgtaatcgttgtgctttggtctgcatcgagagcacagtttgcaatgatgcgcattgcaaactatactttcagcggcggaacgactactggcaaaggatattttatagacagactgcgcgcagtgtttacgatggcggtaacgctctttaccgtcacatttgcactcgtcgtgctcgtatacgggcagattataataaatgtactcgtttcgcatattgtaaaaagtgccatttttcttgaacacttaaacaaattctgggtacttataaggtggccggcggcgatgacgctttattttttgatggtgagctttaactattatatactgccgcttgagcgggtaaaattcaggcggatactgccgggaagcattttagcgtcagtcggaatgctcattgtgacgggcggtttttcggtatatattgaaaatatcgctaattacgatatcgtgtacggctcgcttgcttcaattgtggctctgcttttttggttttatcttttgtcgtggacactgggacttggcatcatttttaacagagcttgggatgaaacaaagggcattgtttagataagtgctgctgaatttgcaagggatgcggtatagcatgctggtatttaaaaacaaatatttgcagtttgcagaaataaaagttgaagtgaaagataacaggagtattgaaagcgatgaaaaatgtaatacttataggaatgcccggaacgggaaagagtacggtgggagttattctcgcaaagcgtataggatatgattttttggatgaggatattgcgataactcttaaggacggcagacagctttcggagataatagagcaggaaggtatagaccggtttcttgaaatagaaggagaagtcggacttagcatagaggccgaaaaaactgtgattgcaacaggaggcagcgctgtattttctgacgctgcgatgcgccattttaaggaaaacggtatttgcgtatggctcgaaacgccgatagcggtgctcgaagaacgcctcataaatggttcgcgcgaggagcggggagtggcggcgcctgcggagatgacgctgtcagatatctacgccctgagagagccgctttataagaagtacgcggacattcgtatagtgtgtgattgtgatgcggacggcgtagctcgcaaaataaaagagaagcttaaagggcagctttaggcagaaacacatttaaaatgcggctttttgttgcgctgataataaaatgataggttgacagaagtccgcagggcgcgcgcatttaattggcgaggttttgcggactttatattataaataaaaaatagaagaagggcgggacagaaatggaaattaaaaaagtgacggctatgtatctgagctgtacgggtactacgaaaaagattgtcgaatatgttgcaaagaatgtagcggaaaggctcagtgcggagtacgaagtatttgatttttcacttccggcagcgcggaagccgacgctcttatatagtgaagatgaacttgtaatctgcggcacgcctgtatatgcgggcagagtgccaaatctttttttgccgtatcttaaagagaagataaagggcggcggggcgcttgcagtgcctatagtgctttttggcaacagaaactttgatgacgctttagcagagctgcgggatattctcgcaggcgacggattttatccgctggcggcgggggcttttgtgggtgagcattcattttcaagggtgctcggcgccggtcgccctgatgccgctgattttgcaaaggcggacgagcttgtagcgctcattgccgagcgtatcgctaataaagagagcttggaggcgggtttgccggcgcttgcagctgttccgggcgcctcgccgcaggataagtactatacgccgcgcgacaggcacggaaaggcaatagatataagaaaggtaaaacctaagacaagcgatgcctgcgcggctgctgctggctgccgcatatgcgctgatatatgtcctctgggggcaatcgactttgatgatccgagtaaagttacgggcatatgtatgaagtgcggagcgtgcgtcaagcgctgtcctgagaatgccaaatattacgatgatgagggctatatataccacaaaacagagcttgaggaaatttatgcacggcgcgctgagagcacgatttactgagagtacgaggcgcacagaaagagataagctgcaggcgcgcagaaatcctgattatttacataatctttatgcattgacatagatcatacgttttatcgggagttatgagcattaacatatagatctgtgcgattggcatgaggtttgaatgccgcttgtctgcgcggacagcaaaaggtttcatttaagaattttttaagaaacgggttaagtgttttgtaatatttcagagatatgatgaaattgcaaaaggggatttgcacgggattcatatgcgagatattagtggcaaaatcataatgaagttatggaaggaacaaatatgaatattctggtatgcgatgacgataaagaaatagtgggagcgatagaagtatatttgaagaatgaagggtataccatttttaaagcgtatgacggccttgaagccttgaacgtactcgataaaaatgaaatacatctcgtcataatggacgttatgatgccgaacctcgacggaatgagaacgactatgcgtatacgtgaggaaaaaaatattcctattataatgctcagcgctaagagcgaggattatgacaaaattacggggcttaatataggtgcggatgattatataacgaagccgttcaatccgcttgaactcatcgcgagagttaaatctcagctcaggcgctatgtgaatctcggaagtatggagattaaaaaaggcgttttcaaaacaggaggtctggaggtcgacgatgaacagaaaacagtgaccgtcgacggacagccgattgtgatgacgcccaccgaattcggcatacttaagctgctgacggaaaatgcaggcaaagtgttcagtatggagcagatatatgaaagcgtatggaacgagcctgcttacaatcctgaaaatactgtagcagtacatgtgcgccgaattcgtgaaaaaatcgaaattaatcctaaaaatccaaaatacttaaaggtggtgtggggaattgggtacaaaatcgaaaaaatttagccagaatataatacttcgtacatttatatttgtctttatgataattatgcttgtgcaggtgctcatcggaagcatgatgatggtgtcgcagcatagcaattcagtatctctggaagcctacgatttatttgaaaataaaagctatatagagagtgaagagcttaggtacaatatgcatcggcagacagaaaatatttttgagctgtttgtaaattacagaagcgaagaggatatactcgcgggacacagtatcgaaaacgaagaaatgaacgagtacatcgaggaactatataacagtggctgggtgtattttaacagcggggagataaccgcaaattatgaatatgatgcctatgagccctacgcagaatttacaggcgatgtacgcaaagcgtttatagatgccaatgcggataatatcgaggaaataaagcaggccttgatagaaagagatctcgaatatttccgcagaaatataaaaaggctcgaggaaatagaaggcctgatgtactttatttctgacggtaaagagtctataacaaacgtacagggcggaaatttaagtgcggatgatttcaaaaaataccaggcatacacggtgtatgaaaacgggatatttgaaagcgagccgaacaatgcttatgcaggcaattatgaaaactattatcacagcgaggaattgatagacgattattacggaggaggcggcgatgatttagtattatgtatcgcttatacagactcttatattgcggctatgaatgaggaatatacgcgtgccagagcggcggtaacggaatggcttcctatggtgctttcgtcgcttgtctgtgctgttgtcgcaatcctgtggcttatgattactacaggaggaaaaaatcctgacggcacaagaaaactgtatgcgatagataagctctggacagaagtgcagcttgcaatttttgggtgcgcgtttgcgggcgcagcagcaagctattttgaagcggttagctattcgtattcatatgcgtatatgcgctacagcggcgtttcggattatgtcggaaaagatatgatttcttcattcggcagcattgcactgatcgcagcctttgcggtgtgcctggcagttgccgcttggtatatgctctcgtttataagacttttaaagtccggcgtattcattaaaaattcgctcgtatataaaatatgcaggtttctctggaagcctatatcaaatgcagtgagcaatgtgataaacggcggcagtactatgcgcaaagcagtgatacttatagtgctcgtatgcctgctttcggcgacagtattcctcgtgcctgttgtgctctgtctgctgctcgtatttgtgccaaagtggataaagcgttttgaagaggtacaaaaaggtgtggatgaggtcaaaagcggcaatctgacatataaaataccgattgatccggataagccgacagatgagctttcgagactggcaaagggtataaacgaaatatcggaggcctcaaatgttgcggtgcagaatgagcttaaaaatcaaaggatgaaaacagagcttatttcaaatgtttcgcacgatctcaaaactccgcttacttcgatggtatcgtatatagatctgctgaaaaaagaagggcttgacagtccgaatgcgccgggatatcttgatatactcgatcaaaagaccgagcgtctgcgcaagctgacggaagatctgtttgaagcggcaaaagcgtcaagcggtgcaatgcctgtgaatatcgaaacggtggatctgctctcgctcataaatcagagtatgggagagatgagcgcgcgcatacaagcttcatcgctcgactttatactaaatgccgaaaaggataagtactatgtcagagccgacggacagctcttatacagagtggtggaaaacttgctcgtaaatgtgctcaagtacgcacaggacggaagccgcgtgtatatagatataaaggaaccgctggccggcatcggtaaaggagcgcttgatatgggtcaggacgcgtttggcagtgcaggtgataatagcggatcctacggtgtgagatcatccgcaagaaaagatattgtagtgcttgagataaagaatatatcgaaacagcagctcaatataaatgctgatgagcttatggagagatttaagcgcggtgatgattcgagaacgacagaaggaagcggactcgggcttgctatcgctaaagaccttgtaaagcttatggatggctggtttgaaatagcaatagacggcgacctgttcaaggtacgcgtagtgctcgacaaagcaccggcgccggtaaagcagaatgaatagataatctcggccttgagcttttcctttggtctggctttggacttttgcccgcggaggcaggtccgcacatgcgaataagggcaaaaggcaaaagataaaaaaagcttcgtagagaaaatgaagcgagagcaataagttttataaggacaaaaacagcttttttgcataaattgagaatattaagcagctataatggcttgagatctgtattaagcaggtgtcaagccatttcatttattaaatccgtttttgcatttttattaaattcgggaaattttcctttagcagcttttctgcgctttatacttcgtatctgtcaattttactttctatagtgtacggcgctttgatgctcggaagctgtttgaagtgcgctgtgttctgatgatgcgtaagggcttcgtcgttttcccacttttcgatgagcagcatttcgttgccgcggtcggcagaaaagaaatagtcatacatgatgttaccgtcttcggcgcgtgatgccgcaggcacacccgaagcgcagagcgccgcgtagtacgaatcgcgctcgtctctattgataaaagtttgttttacatgaagtataatcatattttcctcccatttattttatttctgttagatactttagagcgatttcggcgtttaatgattatccaaaaagtaaaaatcacgcagaaaagatcgttatttgccgatggggcagtaagtttgtgcttgcagcagatgagctgctgcaagctatgtcactaaagccgttcgatttcttcgagccacaggctgctgtcggcgtcgcttggcattctcaggtcgccgcgcggcgagaggcttactgtgcccacctttgggccgtcaggaatgcagcttctcttaaactgctgcgagaaaaagcggcggtaaaatactttaagccatttcttgataaaggctctgtcgtactcgcctgcaaacgcgtgctcggcgatgaaaagcagcttttccggcgtgattccgcttctgagcgtatgatatataaagaagtcgtgaagtatataagggcctacgctgtcctccgttttctgagcgatgctgccgtcctcatccggaggcaggagttcaggagatataggtgtgtcgaggatgtcttgcagagtggcgcggagaagcgcgttatctgagctgaaatccttatcctcgtttgctccggagagcttattatccattacccatttcacgacaaaacgcacgagagtttttggtatgccagcgtttacattatacatagccatatggtcgccgttataggtgcaccagccaagagctgcttcagaaaggtctccggtgccgactacgagcccgttttccattccggctatatccattaaaatctgtgtacgctccctggcctgcgcattttcgtatgtcaaatcgtgatttgcctcgctttgaccgatatccgaaaaatgctgccgtacagcatcgacaatagaaatctcacgtatttcagtaccgagaaggttcatgatcgtaagtgcgttattgtaggtcttgccagtggtgccaaagcccggcattgttatggcaatgatatcggaagccggctttccgagcagtttgtgtgtttctgccgcaacgagcagcgcgagagttgaatcaaggccgcccgatatgccgacaaccgactttgcagcatgcgtgtgctccattcgtttggcgtagcctgccgtctgtatcttaaatatctcgcggcatttgcggtcggtttcgcttgtatccgatggtataaacggatttttagcgtagctgcggataagcgtgtcgctttcgcttgctatcgtgcgcatttctgagagcgctacaggcgtgtacatatatctgtcggaaaatgcgatattgcactctgccatattgtgtccctgacttctgtcaaatttgagtttgctgtagtcgatttctgtgtatgtgatgacgctttggcgttcaaaacgttcgttttctgcgagtaccgtaccaccctcggcaatgatgtggtgccctgaaaatacaaggtcagtcgtcgattcgctgacacccgatgatgcgtatacataaccgcatatgctcttcgcgctctgcactgctacaaggctccttctataatcgcttttacctactgtttcgtcggaggccgaagggttgagaattatatgcgctccgtttagtgcaagctgcgcacccggagtaattggcagccatagatcctcgcatatttctattccgagagaaagccctgacgcatcgtcagtaaaaatgaggttgccaaaagccgtttcataaccaaaaatatttacggaatttacatctctggctattgatttgccagaggcaaaccaccgagcttcgtaaaattcctttgaattcggaataaacattttaggtacaatgccttttattttgccgttttggattagtgcggcacagttataaagattgttttcgagacgaaatgcaaatccgagcacggtcacgaggcggctttcgctgcttgcgtcagctatatgcgcgagcgattcgagctgtttctgatagagaagctcctgataaaaaaggtcgcctgctgtgtatcctgttatagtgagctcgggcagcagcaaaattcctgcgccggcattgtcggcctcgttcataattttgagaatttctttttcgtttgcggcagggtttgccactttgagctgcggcgttgcggcggccgcgcgtatcattccgagctttgacattttttatttcctccaaaaaaagtacttgcaaacaaattatgtaaaatatataataaatatgtaaaaacttgtaagcttaatgactgtttaaattataggtttatatttcccgcttgtcaataatttattatagagccgtacggcgtttatattggactaaagtcctgttttggtgtataataaatttactttcagaaaggaaaagaatatgaaagagttttatataaaagacctgaaaaaggatattgaacttactgatttttttatggttaagagcctggcattcaaaacgggcagcaacggtaagacatttctcgacattacgcttggcgatatgacgggtgagatttcggcgaaaaagtgggatgttttgaaagatgaaaccgaagtgctttctaaaataaaggaaggcgacatcgtaaaggtaaaggcgctcgtcacagagtggaacaatatgcgccagttgcgggtgacgaggataagagctgcggttgagtcggacggacttgagatttccgactatataaaggccgcgcctgagccgcccgcagaaatgtatagttatatacataatgaagcagaagcgatgaccgacggagatctccgaaaactcgcgctgcgcctgcttgatgataatagagaaaagcttatgtattatccggcggcctctaaaaatcaccatgcagaattcggcggacttctctatcatatgaagcgaatgctgatgactggaatgcgcgtatgtgaagtgtatacgaatttaaaccgcgaccttgtagtgacgggcgttattattcacgatattgaaaaaattaacgaaatagagtcaaacgagcttggcatttcgccgggatattcatttgaggggaaaatgctcggacacattattcagggaatcaagactatagacaggcttacacttgaaatggattttccgcgtgaaaaggcgataatgctcgagcatatgatactctcgcaccactatgagccggagtttggaagtccgaaaaagccgcttttcccggaggcggagatactgcactacctcgatattatagacgcaagaatgtacgatatggaggatgcgctcgttgcgacacagccgggagaattttcggagcgggtatttacgcttgaaaacagacagatctacaaaccagtagctgcggataaggaatagctgcagaaatacagacggaaaattgccgggtcttgcagatttgcgcagcgccaaattggaagcacgagcgtttgtgacagggcaagttataagtaatagccgcaatatgagaacaaccaaaggagaaaatagaaatgataaaattgccgagggaaataagacgcataatgaaagaactcgagactgcggggtatgaagtatacgctgtaggcggatgcgtgcgcgattttctgctcggaaaaaatccgctggattttgacctggcgaccaatgcgaagctcgaagaaatgacagctatttttccggaagctgaagttatatcggaaaaatattccgttatcagactggattattcaaatccggaaaatgaggatgaaggcataatcgcagatattgccacctatcgcatagacggtgagtacagcgattacagacggcctgatgacgtgatatttacggaaaaaatagaagaggaccttaaaaggcgcgattttacgataaacgcgatggcggataatccggaaaaagcgctgctcgacccatacggagggcgcaaagatatcagagaaaggctgatacgtacggtgggagatccaaagcagcgttttaaggaggatccgcttagaatgctccgtgccgttagatttgcggcgcagctggattttgagctgcataagagtgtacgcgaagcgatagccgagtgcagtgagtttcttatgcatgtgagcagggatgcggtgcgcagcgagtttgaaaaaataattgtgacagagaatacgggcaaggggctgcatctgcttgcaaatttaaatttaatgaaatatatagtgggcgacgatatagcaggaaggctaagccgccgcgaaatggatagctttgagggacttatcggcggcattgataacacttttcgcgtacttgagcggaggctgggtgcgttttacagctgctttgaggaaaaacgtgcggaacaggctgttgattttctcggattcgataacagaactaaagaaatgctgctcgacgcaatttatttgcgggacaagatatttttctttgcaaacgaagtagacctcaaagattttctggcgcgttacgggcgcgagcgctacgactatctgcacaatctcgctaaggctttgtgtctcatttacgataggtcaaacattaaaatacaggcccgcaatctgatgatggaaaaggtcgagtcgagaaacgatccgatttatattgaagatcttgctatttccgggcaggatctgatagataacggcatagcagaaggtaaaaaagtaggagagctgctttttatgctgacagatgtggtgcacagaaagccgcacgaaaatacgaaagaagcgcttctcggatacgcgcgcaaatactcgagaaacaaatttgccgcggctattagaaatgtcggacttttgaacaagaaatagcaaggcacgtgttgcagtttgcgtcaaacctgatgcatgagcgttatgatgcgtaccaaagaatgtaatttaaacaagaggggaaatatgccggaggaaaaagaagtaacgatagctgaaataatttttcataacgataataatgcgtacacggtagctgtcgttcagagtgacagagaggaatttgtcgcggtgggaagtcttccggatgctgcaaagggacgcacctatgtgcttacgggagtgtggaagcagcatccatcgtatggagaacaatttgttttcagtgaattccgtgaggtgatgccgacatcgctcgagggtataaagggatttttagcatcaggcatgctaaagggtataggtaaaaaaacggcggcttcgatagcggcgaagttcggaaaagatacatttgatattatagaaaaagagccgcaaaggcttacagaaatatcgggtattggaccagctaaggcagaggctatatctgaggcgtttcacgcgcaccgtgaatttgcggaagtgacagtttattttcagcagtacggtataagcgcggaatacgcgatgaagctctataagcagtatggcagcaatactatagcgatagcgacagagaatccgtatcagctcattaaagatgtggcgggcattgggtttcgcagggcggacgcgatggcgcttaagcttggaattgctaaaaacgacgaagcgagaataaggagcggtgtggaatttacgctttggtactatgccggcgagggcaatgtttttgtgccgcagaaagagttgtgtgaacgcacggcgggactgctcgatgtttcatctgatgaaatcgcagagcagcttatggtaatggcgatagagggcgatatcagagttgagatgctcgaaggcagggcggttgtttatcttgctgtttattacaatgcagaaaagaatgttgcagttaagcttgcgcagctgtgcgaatcagagcttaaaggcgtaaataccgatatgaattctctgattgcgctcacggagcgcgagacaggaataacgttgtcggagaagcagaaatatgcggtgataacatcgctgtcatatggtgtgtcggtgataaccggcggtccgggtacgggcaaaacgacaattataaattcaataataaacgtgctgagtcatggcgggcacaagattgcaatagcggcgccgactggcagagctgcaaaacgcatcacagagacttcgggacattttgcgcagacgatacacaggcttcttgaatactactattctgagggggaggatgccatgcgctttggcaagaccgcggaagatccgcttgactatgatgcggtgataatagatgaagcttcgatggtggatttgcttttgatgaacggacttgtaaacgcgttaaagccggggacgaggctgataatggtgggcgatgctgatcagctgccgtctgtcggtgcggggaatgtcctgcgcgatatcatagacagcgagtacgtatattccgtgaagctcgatgagatttttcgccaggcacgggaaagtcttatcgttgtaaatgcccatagaataaataaaggcgagtatccgagcataaatgaaaaggataaagattttttctttatgagaaggaacggtgagcttgaaatacttgaaaccgtaaaacagctatacaaagagcggctgccgcgttattacacgaactgcgagccggtgcgtgatatacaggtattgacgcctgtgcgcaaagggcttatcggcagcataaatctgaacaaagaactacaggcagttctcaatccgctgcgcgcgggacttgttgaaaagaaatacggagacaaggtgtttcgcgtaggcgacaaggtgatgcagatacgaaacaattatgagcttgcctggaaaaggctctcggactttacagagggtgagggtgtattcaatggagatgttggctttatagattcgatagatgttgaatttaacgagatgaccgtagtgtttgacgaggataaatatgtaaagtacgatgtgacaaattttgatgagctggagctcgcgtatgctgtgactgtgcataagagccagggcagtgagtttcccatagtgataatgccggtttcgtggtttccgccgatgcttgcgacgagaaaccttctttatacggcggtgacgaggggtaaggaggctgtcgtgcttgtcggctcggagcagaaactctttgccatagttgataacaatgcaataactaagaggtattcggggctggctgtacgcctgcgcagcattggctgcgacgggatgttgtgacagcagacagatttaaaatcaaatgtattgactataatggcgcgcggcagcattgctaaagagaaattaacaaaggcggcttgcagaaagcatttgcagctgagccttgaagaggctttaagtaaaaaactgcgggaagtgtgagtgagccggaattgaacaggggaaagatgctatgataatagaaaaggcgacggagaaagatatagatgcgctggagaagatgtactatgaggtgacggcacagctggaaaaaacggtgaattatccggcgtggataaacggactttatcctacacgtgagacttttgaagaggctgtgagcaaaggggcgatgtatgtcgcgcggacagaggacggcgaagacggcaaaattgcagcgggaatggtactgaaaagcgaggaagagctggggttttgcgatatagaatggcagattgaagcagaagcctcagaaatctacgtgctctgtacacttgcggttgcacttgattttaacggatgcggtctcggagaagagatggtgcgtttcgcgattaagctcgcgaaggaaaacggcaaaaaggccgtgcgtcttgatgtcacggagataaacgcgccggctattgcgctttacgaaaagctcggatttaaatatatagatataatggacacaggtgaggaatatatgcttgaatacgggcagcgcatttttcgcctttatgaaaagctgatatagtgcgcgtttgagggtgaaatcagtcagacgctgtggaaaaagagctttgaaaggcggtatagtcaggggataaatgcgatttggcatcatggaaaaaagaaacccggatgtaaaatgggcaatgggtaagagaaaatggggaaggagatgaatagagaaaggaagaaatacggcgtcagaatcagcaaagcagtttgcgattttgtgtatcccggcagtctttactgtatcggatgcggtgcgctgatagacaggtcgcgccattacagcctttgtaacaactgccttagtaaatttcattttgcgtcggggcgcacatgtgaaaaatgcggcaagattcttgaagaggggtatcacaaagccatatgccgtgactgcacggtacatgaaaagaaatttgaacgcgggtattcttgtatgctttacggactttacgaaaagaaaatactgcgtgatttcaaatatagtggaaaatcatattatgctccgtacctcggtgagctgatgtacgatagagttgcgcatcttctcgaaaatgaaatttgcgtggatattgtcgtgccggtgccgcttcacagaaagaagcaaaacaaaagaggatataaccaggctgagcttcttgcgcgcgaaatatcaaagcgttcgggaattccaatgaaaaaggtgctggtgagaacgaaaaatacaaggccgatgagctcccttaccggcgcggagcggcgtgagaatctcacaggtgtatttgctgtacggcctcggcaaagttcagaaatagcaaataatcgtatactgctcatagatgatatatatacgaccggaagtactgcaaatgcttgcagcgaaacgctcaaatccgcgggagcaagtgctgtcatcgtgctatgccttgcggcgggaggcaatggcggcagtgaggattatttaaaaaattaaatatatttaatatgctgcaataattgagcgcggcggcggctcgggtctgaggttgaaagtccaagccagctacgggcaaagggatccgcgtaagctgtacccgagaagcgggcagtgatcatggcgtagtttagaagtaagtcctccggaaaccggataaaggcaagtgcggggtcaaagacctggtcagccgagccgccgccgcgctcaaaagtatagaaataaaaaattcataaatgctaaccatcatcaatactatagctcaaggcataagtttgaaaataaaacttttagaataatctgaaaatgctcttttatttttataagaatatggtatactgtaagtataaacaaatattcggtttgaagcgtgatactcatgcagtattgctgcagtgaagtgccgcgcaggtcatgaaaaaggaggcttgagttatgttactgaatattatcggaagaaacctcaatgcaggcgatgatcttaagaatgttatcgaaaagaaatttgaaaagcttgacaaatatttctccgacgatatcgaagcaaatgtagttctttcgcaggaaaaaggccgtcagaaaatggaggcgacgatcaacgcgaaaggtattattttcagagcggaggaaaccagcggagacttttttgacagcgtggataaggtggtagacaaattatctgcgcagatgtcgaaatttaagggaaaaattagaaataggtacaaagacaacaaatcgcttaagtttgaagcattcggagcacctttgccggaggacgaggaagcaatgaatgttgtcaagagaaaaaaattcgtgctcgagccgatgacggtagacgatgcgatagtgcagatggaaatgctccagcataccttcttcatatttctaaatgtggagaccgatactgtcaacctcgtttataggagaaacgataacaattacggactgctcgagacggaatattaaaaaggatctcagccggaataaagttataagtacgagtgagggtgcagataataaatgaaaaataaaggactgcggaattaaaaccgcagtcctttgattgtatgcgcagtattcaagtgtttttgtaatatatatgattatgacctgtaactttgtttgtactggcattatgcgcagacaaaccttgtacagcccaaagctataaaacttttttgagcttgttaaagccgcggtgagcaaatatttatatttttttagctactttgatattgtacacaacaggcgtttttgttacaataaaagtagtaaattttgaggggtaaatctaatgcaggaaatttttaacggcatattttccggaataagaattacagatgtaatagatattttaattgtcgcttttgcaatatacaaactgctggaatttataagggaaacgagggcagcgcagcttgtaaaaggactgctcgttttaattgtcgtgacttttgtttctgaaatttctcatctttatactataaactggatattaaggaatacaatgactataggtgtagtagcacttgtcataatctttcagcctgagctcaggcgcggtcttgaatatctcggccgcagcaagtttgttccgggcaacttcagccagattaacaaggacagggcaaagtacataacgtcggaatttatcagggcggtggaaagcttttcgcagacaaagaccggagcgcttataataatagaacgtgaaacggcgcttaccgatatcatagaaacggggacggtggtagatgctgaaataagttcggagatactcggaaatattttttatgagggagcgcctctccacgacggcgctgttataatccgcggagataggctgcaagccgcaggctgcgtgcttccgcttacacagaacaaggcgctgaataaggagcttgggacgagacacagagcgggtataggcatcacggaaaattctgatgctatagccatcattgtcagcgaagagactggtataatttctatggcgatagacggcaagctatcgagatttctcgatataaagacggtagaaaaaacattgctcaacatatacattgagccagacagcgataacaaacttaacgagctcaagaatatgataggaaggaggaaaaatgtttcaaagtaagacagctatgaaagtgctttccctccttatggcgacaatcctctggggatatgttatatgggaaacaaatccggcgataagtccgacaataaacaatgtaccggtacagatactgaatgcggaatctatagaggagaaggggttaataattttggatccgcaggactatactgtaaatgtaaaggtgcagggaaagaaaaaagatgcgggtaacattaaagcaagcgatatacgcgtgacagcagatcttgatggatacggagaaggggaagccgtgcttgagcttaatgtgacaactccggagaatatttccgtggtggaggtagtgcctgataaaatcgtgctcaacatagatagaatcgtggagagtgaaaaggaagtgcgcgtagaacctgacggtgcgcttcctgctgatgctgaattaagcagtatgacgcccgatgctgaaacagttactgtaaaaggagcgtcaactctcgtagcaaatgttgcatatgttagtgcgagcattcctacggatagtatgatagatggagaaaatacgcagacggtgcagcttgttccggtggactcgcagg

SEQ ID NO: 629 - DNA, 32759 bp, Unknown
  16S sequences of unknown bacteria
attattgctaagcattataaaataaaacaatagattccgtcaaccattctcttaaaacaacaagaaaaatcatgtttcaactgtatcagtatatatagaatatattatatttttttggaatgcaaaaatcgaataaatgtgcggtcatcttcgtgtatcagttgaaattcataacgatatctgccataatcccaagtttcatcatagctcggcattaatgtaaaatccgcagtaatattaccgttggtttgagcctctataaccaaatctttataagtaaaattgtaagggaagtccataggaagaatgacgtatccccctctctctttatcataatactgattataataaaacgaatctacgccgaaaaattcatgcgcaatttgttgaacatgttccatagaaagatacttgcattcgagcgtatattccgtaccgtctcctgctgcatatggttgattgatttcttctctatataaacttggaggatacggatttccttcttgttgagaatttgtaatggaaaaaataaatctccaaatagactccatagacatacgagaaccatctttgataggttcttcacttaatgttgcattgattagaatagctataacagaaggcaattgatttttcgcaatttctaactcttctgctgaaaaagtttccgcagcagaactgatttctaaagaaacttccagctgggatacctctgattgagatacttctgattgagaatgacttccagctggaatacagcctgttagactaaacgtaaatatcacacctgtgataaccattgttaatacttttcctaatgtttttatcataaatattctcctatcatcaaacgataatcctttgtagacagttgtgtgatataaaatcatccatatactactattttaaaggtttctaaataaaaatcaaatataagtaattatcattcgcaaaccttacggatttcctataataaaatggataaaaacggttttccattatactcctactagggatatataaatttactgaagtctttttcttatgtaaattttatagactaactgttttgtttatatggggataaatcaccaatataagactattctttattttcaaacccatggtcatttatgtaatataaatatattaaactgcacaatacaccaataagaccatagacagcatccacaatatctattgtgttcagcagtcgaactatcgtttcataaataaagtttcctgcaacaatgattataccaatcaaaaaaacagaatggataccgttttccatatataaacgacatatagccaaacgatatacacaaaatgaaatttattacaacaatatcgttattcaatgtgtgtgctccttttataagagctaaaacgatacaaaatgcaaaatggtagcaacgcttattgttgtaatttttttggattcttcaagctttgcattgttcgtaacctctttaacatataaatctgtattactttttattgttttcatttatgttacagaaattccaggcaacgacgataaaagtataaatcagaattgagataatacgtagtgactggaaatcaaaaaattttagataagatttatatgcacatgatacgcaataaaaattatcataatctcgtgttgcattttcatcgccatatggaatttttatacccgtaaaattgaatatagtataacaaaaccgcgtaaccaagccatatgacctagttacgcggttttttctatggtgcgaaggatgggacttgaacccacatgttattgctaacactagaacctgaatctagcgcgtctgccaattccgccaccctcgcatattcctgtgtcattttagcatattcctattttgctgtcaatgatattccaaacaaaaattaatatagttttaaaaactatatttacaaattattaataatatattatcagtttatacattttacatcttatacttttaatgatataatatggcctataaaaatgaaatactcgaatggagaaacgatatatgaacgattttatcattatgacagactcttgctgtgatttgccggcacaattagccgataagttagaattaactgttctgcctctttcatttacaattaacggaaaagaacactataattatttggacggtcgggatatttcatcttctcatttctatcgtctgcttcgcgaaggaacgcaatgcaccacttctgcggcaaacacgaatgcgtttctctctgccatggagccggttctgaaaaaaggtaaagatattttatgtatctgtttttcttctgctctcagtaccacctgtgcttctgcacaaatggccgcaaaagaattggttctcaaatatcccaataacaaaatttatattgtagatagcctgagcgcctctttaggtcagggaatgttaacctattatgctgtacaacaaaaacaaaacggaaaaacaatagaacaagtatatcaatggatggaacaaaataagcttcatctttgccattggtttaccgtagatgatttgaatcatctaaaacgtggtggccgtatttctcccgcagtcgcatttgttggctctcttttaggtatgaaaccaatcttacatgtagacgatacaggccatttagtcaatgttggcaaaataaaaggtcgaagagcttctttatctcaattggtagaaaaattagaacaaactgcggtacatatcgcggagcaaaccatttttatcagtcatggggattgtccggaagatgcagaattgctggcaaatatgattcggaaacaactccctgtaaaagacattatcataaacccaattggtcccgttattggctctcactccggtcccggtacacttgctgtatttttctttggaacaaaacgataaataaaaacagccacactatgatagtgtggctgtttttatgttcttggaatgtcagaagtgcctttctctcttaaataagtcgcttctaaatccgccaaatgcagtttcactgcaatcggatatttatcatatgccaaactgatagcaaagttaccggcacgagctgcatcatcaaagccgcccatatgccagcgaatggcaaccgcttctgaagtttttaagcgcaggaagcgttcaatcataaaaacagatttctcgccatgtccgtagggaaaactatcttctaccgtaaaataaggctgcttttcccattgaccagtctgttcatttttgacgtttcgagtggattctttgtagaattgagttttgcaaatatcatgcagtaacccgcatatggcaaagctttcttcactgtccccttcttcaaagtaacgttctctcagtacacggtacacattaatgctgtgctttaataaaccacctttacaagcacaatgaaaccgcgtacttgcaggtgctgtgaaaaaatctgtttttttcatccattccagtaactctgtgctgccctgtcttgtaatgtacgttgtaaaaatttcttcaaattgttcttggtctgtcatcgcaatactcctttataacattacaggccgttcaattgaccacgaaatttccgtttaatcattccttctgtaattggggtgcaacacatcattacactgatgctggcaaccacaaatattacagaacgtacttcatgagaaatggggatgataaaattacataatacaatcaaaccggctaaacatacgccaaatatcatccatattacagcaaagatgcgctgtgcataattccatgtttcctctgtctttaaagaaagatttgtgcggtatccttttgttttattacgttcttttaccggagcaattgtgaagtataaacctaataataaaaatgcagaaggtattaataaatcaatgatccacaaaataatctccacggccgttccctcttttcgaccaattttttctttagtataacacaaagcattcaaaaatgatagtaggacgaaacctctttttatatttaaaatagatacatcaaataaaaagtatatcctattccaatgcaaaatctatgtttattcttaagataatatccatcatcgttccaatataagtttccttgttaacactctgtatttttctagttcagcagcggagttccaaatgcattttaacaaaatcagtatgaataaaatcgttctacggctatttcttacatctaaacacaaaaaaagaccgaggaaacaggacattttgctatttccttggtcttatattttttgtaggacaaaatgtatctcaatccatacctaaactgctcagataccggatatcaggaaatacctgtgcttccaaaaccgcctgtaccgcggtctgtgtcagacaattcctccgcctcttcaaaagtagacattaccacaggtgcaatcaccatttgggcaatacggtctccgggatttacaataaaagctttatcagaactatttttcaacccaaccatcatttctccgcgataatcggcgtctaccacgcctacacaattggcaggtgtaatattatgttttacccccaaaccgcttcttccatatacaaaagcagcatagcccgacgggacttctatggcaagaccggtgccaatcatcaccgtatgatttggctcaatggttacaggctccgtcaaacaagcacaaaggtcggctcccgctgaatcagatgttgctctatgaggcaaaattgcctgctcacgtaatttttttactttaatattcacaataaaactccttattcagagtctttttcttctgcgtttgcttttgctgcaagcgcctgcgctttttgctgcggtctttccaatacgtagtggtcaaccagtcttgtaaccatgctgcctacaccgttaccggccattacaaccaacataatccataaaccggacaatgtccattgttttccggacatcataaaccagtataaattcgcaatactatgctcaaaaccgctttgaataaacaaaggtacacagaagaaaatacccaagtaacccataatattaatgccgccccttgcttttccccttctaaaacaagcaactgcaatatacattagaataccacaataaatacctaaaagaaagaggcttaataaattatcgccttctctggaagcggctgaagaggaagcagcttcgattaatttatttgcatgccttgtttgctgcaaaatagagactgaaattaacatacctacaaagtttcctaccagtcccaatgcaacataacgtaaataggctccggtacgttctgttgccagataaccgattcttccggtgtatagatttaaatcaaattcgctcacgataaataagccaaaacagaacaaaaaggacgcaacaattttattgtccatcatcaagtataccgttgctccaaaactgataataaatccagcagcaattcctctgccaaattcatttgcaatttttcttgctaaattcatacatttcacctagattctttcttgaatttttgctttggacgacaaaatttgccgtttatcaattgtaccgcaacaaatagataaaataaaaaagtgacttttgtttttcaaaagccactgatatggctctgtctttttttgctgcgcgtttacgctttttaaaagtgaaacgtgtttacatactcttcaaagacagagttgtttcggtccaaattgcatgtgcaaattttatcacgaaaattctataattgcaataggaatggtaataaaaatttgtatataattttaaccaaaactgtttaatttttgatatttttgcacaaaccattcattaaaatgctaaaaatatagaaaatttaaatttttattttatatacttttttagtctagctttatgataaaacaagggcaatcctcagaaaaatcatgagggttattccgccctatttttcataacagcaatgagcaattcccgtagcactttacatgccattgctgtagaactaccgctttggtcatacacgggactgagttcatttacatcaaaaccaacgatatttaaatgggacacctgaatcatcgcttccagaagttcctgaaatgaaacacctcccgcttcaggcgtacctgtacccggaaagacggatggatccaatacatcaaggtccagtgtaaaataaacaggtttttcctttaactgatccacaatttctttcagaccatgaaaattaaatttattggtaaatacgtggtcttttgcccaaacaaattcagaacggtctccggaacgaataccgaattgaaagatttttccgtcaccaaccaaatcccacacacggtgcagtactgtagcatgagaaaaacgttcctccaaataatcctcacgtaaatcggcatgcgcatcaaagtgaataatatggacatcagggtattgctttactaccgcacgcattgctcccagtgtaacaagatgttcaccgccaatcatacaaggaattttaccgtcttttaaaatctcagcggtatgttcttcaatttggtcaaggacacgttgcgtattaccaaaaggcaattccaaatcaccggaatcaaaaacagcaaaatcttctaaatctccatcctgatacggactgtaagtttcaatgccgaatgattcacttcgcattgctttgctggcaaagcgagttcccggacggaaagacgttgtggaatcaaacggagcaccaaacaatacgattttggattcttcataagaattgtcacagccaatgaaggtttctatattcggtttcataggtcacgctccaataattcattgatataggtgggcagtgcaaaacagccgcgatgtaaatccgtattataatagcgggtataaataccaagttggttccatgcatctgcctttaagtctgctaccgggtcatattttttggacgcaaaaccaaacagccaatgaccggatggataggtcggaatatgcgcttggtataccttacaaatcggaaacagatttacaatacggcaatgcgcacgccgcatggactgagcaaaagaagtgtaatatgcgttttcatgctgattgaccaaaataccgtcttccgtcagtgctttaaaacagtttccgtaaaactccttggtaaataatccttcccccggaccgaatgggtctgtggaatctacgatgattaaatcatattcattttctttggagcgaatatatcgcaacccatcttcaaaatagaggtgaacccttgggtcattcagcttacaggctgtctgcggtaaaaattctttacatacgtcaacgaccattttatcaatttccaccatatcaatgtgttcaatgaatggatagcgagtcaattcacgtacagtaccgccgtcacccgcaccaattaccaatactctttttatattaagattggtagccatggccacatgaacaatcatttcatggtaaataaattcgtctttttctgtcaccatcatatagccgtccaaagtaaaaaaacggccgaattcttctgattccaaaatatctattttttgaaaagggctttgcacagaatataattgtctcagcactttaattgaaaattttgcttctttggaatgttcctccgtataccacaaatccaaaccttttgcttccactagttttcacctaccacgttaatgttttctatatggatatcttccgtacctgttaaaaaacatcctttttctttcgcatatgcaatataatccagaatctcctgtgtaatgcgctctcccggagccaaaattggaataccaggaggataacacataacaaactcgctgcaaatttgtcctgcactttgctcaattggcatggcgcgcttggctgcataaaatgcctcttgaggtgtcataacaacttccggattgatatattcatggtcatacatccccgctttatccttttgataaatacgcttaatttccgccatagcagagataagacgttccattacaaacatgttatctcctacagaaataatagcgagtatgttgccaatatctccaaattcaatttgaatatcatattcatctctcagcaggtcatacacttcaatacctgcaagaccaatatctcttgtgtggaccgaaagttttgttgtatcaaaatcaaaaatagcatcgccgtcaattaattcggatgaaaaggcataaaatccacccagtttattgatttcttcccgtgcatattgcgccaattcttttacccttgcaaagatttctttgccatgcagcgctaaattacgcctggacaaatccaatgaagacagcagcaaataagaaccgcttgtggtctgcgttaagttaataatttggcgtatatacccttgatgcaagtcaggatgattgctgagtaaaaacgaactctgcgtcaaagaacctcctgttttatgcatgctgacagctgccatatctgcaccggccgccatagcagatacaggaagattttcgccaaaataaaagtgggtaccgtgagcttcgtccaccaatactttcattccatgctgatgagccagcttcgtaatggttctcaagtcggaacaaataccatagtaagtgggattgttaaccaacactgccttcgcatccggattctgctcaatggcttttttcacatctgccacagacattcccagcggaatacccaactgtttattgatacttggattgacataaacaggaaccgcaccgcttataatcagtgcattaatggcactgcgatgtacattgcgcggcatgataattttatccccgcgtttacatacactcataatcatactttgtacggcggaagtagtaccgttaaccataaaaaaggcatgctgcgcgccaaaagcacgagctgccaattcttctgcttctttaattacggaaaccggatgacacaaattatctaacggtttcatagaatttacgtctaccgttaaacatttctcacccaaaaattttgtcaattccggatttccttttcctcttttgtgtcccggtacgtcaaacggaacaatgcgcatagatttatagcgctctaatgcctcaaaaataggggctctgctttggtctgataagttcatagcacaatcctcctacttgtacacattggttccactgaatatctcaatcatctctctgcgcaggcggtcagtaattgccaaacgttcttttggagataattcgtaaacatctgtattaaacagataattctgcaattctatttcttttatcaacagttttgtatgaaacaaattcgcctgatatacattaatatcaattgcgtcatacttttgcagcgtttccgtggcgatataatcttgaatggaagtaatatcatggtcaataaataatttatttccatgattatcacgtgtaaatccacgcacgcggtaatcggcagtaatgatatcggaatcaaaactgccaattaaatagtccaatgcatttagcggagaaatttccccgcaagttgcaacatcaatatccacacgaaatgtagaaatagagttatccggatgatattccggatacgtatgcaccgtaacatgacttttgtcaaggtgtgccaaaacagtatcacgtgaagcaaggtgcccatggttgcaagacttgtccatcatctcttcgggcatatcgttttcactgattaaaagtgttacgcttgcaccctggggctcataatcttgtttgctgatattcagcacatgcgcgccgataatctcagtaacatcacacaaaattctggttaatctttcagaattgtattgctcatcaatgtaagcaacataatctttttgggctcgctcactttttgcatagcatacatcatagatgttaaagctaagtgttttggtgaggttgttaaagccgtataaagtcagcttattttccaacccaaacatcactacctttcaatgaaatacctcaaccatgataatatatgaaaataataaaaaagtcaatatacataggaagattctctattaatacggttattttaacatatttttaatttaactgatgttttcttttgaaatcttttattttctcgtgatttcatttatttttaaagataagttttgatatttatccatcactgcctgcgataaacagatacctttaaataagttaacatttacatcaatttatgaataaaaaattaaaataaggaacagtatttttgctttagagtaactatgttatatgtttcaaatacttcccttacctgtttgaggttaccgcctgcaatcaaacatgagaaagaaatgataaacaatatattttgttttcataagccttgtacatagtattattctgttatttataacagctgtcataaataacaaaaatgttattattcttaacataagtcaaacacaaaatatgaactgatataataatactcagcttttatattggagatataaaaaagaaagaacctctttttttatgagcgattctttctttatgcaatgtaaccaagatatatttttagctatcagttaaatacaacacagtatcatcctgttaatatttgtaatgctcccttaataaggcaatctctttcgcatagccatccaattcattgggcgtttccaaacaaaatggcaagtgacataatttgggatgattgataattgctataatcgcctccaagcctatagaaccttcacctatttttgcgtgtctgtctttgtgactgcaaaacggatttttactgtcatttaaatgaatggcatgcagacgttccaatccaacaatacggtcaaactcctcaagaacaccatctaagttattgacaatatcataacccgcatcatacacatggcaagtgtccaaacaaactcctattttgtctttcaatgtaacgccatcaatgatttggcgcaattcttcaaaacgacttcccacttcactgccttttcctgacatcgtctccaacaggacagttgttttttgttcgggttttaaaatgatattcagcacttcaataatttggcgaatgccttcctctactccttgtcctacatggctccccggatgaaaattataaaactggttgggtaagtagtccaaacgcattaaatcatcctgcatcgtttccaatgcaaactctctggttcgttctgttgcggaacaaggattcaatgtatacggtgcatgggcaaccacatgtttgatttcatgttcatccattaatttcagcagtgcattgatatcatctatatctaacgcttttactttactgccgcgcggatttctcgtaaaaaattgaaatgtagttgcatgaatggataatgcttccttccccatatgcaaaaaaccttttgaggaagataaatgacatcctatttgaagcataattgaaatctcctaatatcttatttctttttttgttttaacaacgtttctttttctaaattcaataaatagcgtttcatatcaagtccgctggcataacctactaaatctccattggaaccaatgactctatgacaaggaatgataatgccaattggattacgatgatttgccatacctactgcacggcaagcttttggattgccaattgcttttgccatttgtaagtagctccatgtttcaccgtaaggaatggtttgtaatgtcttccataccttctgttgaaacggagtccccttcggcgctaaaggcaattgaaaggtctgccgttctccctgaaaatattccttcaattgttggtaagcagtttgaatgagagacgtttcctttttttcatatggaatgatttgattgggctgtagtattcctacttctgcaattgcatcgtcttcttgaacgatgtataacatacccaaatcggtttggtattgatattgtactttcatacgatcaccctctatgggcattatagcataaagaaaattgcgttgcaattttcaactgataaccgctaaaccattcttttaacagcaaaaattttgaatatggaaaggcgttcctttcaatatttattttgttactggtataaggttgttataacataaaaaattgcaacgtaatttctcactatgaattttttgtaacattcttaaaatgtatgatcctatgaatctgtatttaagtttcagttgcagtgcctcaaaacactcagcctcataaattctgttaatttagtgttacgacattgtaatgatgtaaccgtaatatctgaatagaagttccgtgtatatttcagtcatttacacagaaaataaaaatggtgataacacacatataaaacttgaaaaacgaaagaaatatctataaaaaatgataaccatttctatcagataagattacagtcttatcatgcctttataaaattatcatctatgaattctgtttactttatttttcaaaaataggtattcagcaggtagaaatgtgtaccgtaacggaaatgttcaaatccacaaaaaattgatttcaaacggaaaataataaagtggcagataatatttcaaaattgcgtgccaatgattctgcttgaccttacacaacaatgaaaaagaccaggtttggatatatgctatatccaaactctgcctgacggatttacactacaaaataggatatcacaataaatacaagtgaaaaaccataaataaaagccccgaacacaactttgtgcctcgaggctttcgtctggagctactagccggacttgaaccggcggcctgctgattacgaatcagctgctctaccaactgagccatagtagcataagaaagaaggtatctaccttcttttcatatttaactttctgaaattaacattcccattaattgataaccttgttctacatatacaccagtagattctgctgttctctcattatatgcggtaaccccattttgttgcggcgcattgcttctataaagagcaaatggaacaggatcagatgtatgtgttcttaaatttaatggagtagggtgatccggcaacaccataatgctaaagtcttcccctgcttctttcatagcattcataattggagcaataattttttcgtcaatcaattcaatggaacgtactttgttgtcaatatcatgctggtgaccacactcatcaggcgcctctaaatgtacgtaaacaaaatcacttccatttttcaacgcatctatggctgcttgtgccttaccctcaaaatttgtatgaacggtaccggttgcaccttctacatcgatgctgtttaaacctgcacaaatgccaattcctttgattaaatctactgctgaaaccacgctgccttttacatggtatttttcctcaaacggtgttaaatttggctttctgccttcgccccaaaaccatacggaggataccggaggcaatccgcgccttatacggctttgatttaccggatggtctttcagaaactctctggaacgcttcatcatatccagcaataattctgagttttgacctttaggtaaataatcacgaatattcttatccaaaatgtcatgaggcggggttgtttgcgcaccatcctttgcatctttcaataccaaacaatgacggtagctaataccgggatataacgttaaatattcattatgaaactgttcatttaaatcacgaatgatttgtgaagattcctctgttgtaatttctcccgcactgtaatcgaccatggtacagtcctcgtagttttcatcatctgacaaagtaactgtattacagcgataagttacatctgttaaagataggtcaatacccatactaactgcttctaacggagaacgtcctgtgtaatatacttttggatcatatcccattgcagaaagatttgcagtatcacttcccgggggcattccttgcggcacagtttttgccagtccacaaataccgttcgctgcaataaaatccatattcggatgcttcgcacaatccaaaggagttttattccctaattcttttaccggcaaatcagccataccatcgcctaatatcacaatatatttcatttactctcccccatccgtgtataactatcctatcatatcgtattatacgggaatatgcgaatgtagtcaagtgatttaatgtcatatcatttgcaattcagacaaaaaaacatgtaaaaaatgactatatggtgaataaaaatcacataaatttcaaggaaaattctcaccattctataatggaaaacgaagaaagatttcaggaaggaggagtaaaatggccagcataaaaataggcaaaaaattacgtatgctgagagaaaaatttggctatacacaacagcatatggccaatattctaaatgttgatcgttctacttactcctattatgaaactgaaaaaacttcacctgatattgcaacattaatcacgttatccaatgtgttttgcgtagggattgaggagctattgggacaagaaaactcaacaactcaccaattacatgatgcgaagtatgcccctgctgcatcaaaaagcaaagatattacttctaatgacagttttatttataatttatcaggagatgaaaaacaattcattgcattttatcgtgcaatttctccaacaacgaaaagtgttgttttacaactgatgaaagaagaccttacccgccaacgttttcaattgaaaaataaaaagagctgaacataataattttattatgttcagctcttttttgtcatgataaaaacatgttatctaaaagtaagagaaaactactcaatctctatgtatgatgttaatagaaagcctttgaactattactaaatttatgataatatagaatatggaggtgattttatggattttgatgcattaaccggcggtgtagaaccgggaggattgagagtaaaaaatgacatacgtcttttaatttgctatctgctttccagtattaatgctccactctccaaacaagatattgtgcaaattatgcaggaaaatagccttgccaattattttgaagtaatggattccctttcagaaatgattcaaaaaggtactattgatactgtatcttttaaccaattaaatgaaaaagaagattgtgtcatctgtaacgatattacacgcaacatagccaaacagcttgacagtacccttcccatatctgtcagagattgcgcagtatcagctgcatttaaattattggccaaggcaaaacgagaaaaagaaaaccacgttgacattattgagacaaaacaaggttatcaggtagaatgccatatttccggcggagaaatggatttaatgtcttttaaaatatatgttccggacatatatcaggcacgcatggtaaaagaaaaatttcatgaaaatccacaacgtatttatagtattctattggccagtgtaacagacgataaagaattactctctgaattatttcaataatcactcttaacagagtaaaaatataaagcagatactttatatataaagtatctgctttatttattaatccaagatagcttttgcaatcttttcgcaaagatcgtatagctcttgagcagttttgcctaataatttgacagaggtgtctccactctgaataatggatgcgccacccgttacattaggagtgttatcaatgatttctcgaattagatcaagattagaagctttgtcttgcatattaaagaacaataggttagccatatgagtataaccttcatatacaccaatattgttcatctcgccttcggagggatcgaacatggtattatcattataaatcaacttacctgccttacgaactgtgataagagaattataatacctgtattcaaatgtttcaccgtaagcaactctaccactagttaaaatttccatcaaaattaacttagaagtatcgtccgcaagttcagcatgaattgtgctgtcaaatccggaatcataaaatggaatggtaggaagcggactgtatttaaacagtgcatttttacctactttaatggtgcagtctctacgagcattgccaccatccattttgtgaagcttttcataggattgggaaacgagctccatacttgcattgtcacggatatcaaaattaagttcttgagtatcgccttttaagataccagcagaagcagtttgcatcataacagtcatataattcttgttaagatgaaacggtttcataactttaaaaggggaagtgaaataaacatcactaacgtaatttttcccgtccttaacatcagcagttacgtttaaaacacaagtcttagcataattgtttttcgatgtgttttccatatcttttctccctgaattattttaagtcttcaagtagaacgtcagatttaatccagtcaatgattttatctacgccctcgtggcttctaacattagcaaaaataaaaggtttgtcgcctctcattttcttagagtctctctccattacttcaaggcttgcgtttacataaggagccaattcgattttattgataaccaataaatcggaacgagtaatacccgggccacctttacgtggaattttatcaccttcagcaacgtcaataacaaagatggtagcatcaactagctctgggctaaatgttgcagacaagttgtcaccgccgctttcaataaatacaagctcaatatcagggaatttatctactaactcatctactgcttccaagttcatagatgcatcttcacggatagcagtatgagggcagccaccagtttcaacaccagtgattctgtctcttggcataacgctgttctttgcaaggaactcagcatcttctttggtgtaaatatcatttgtaataacaccaatgctgtaagagctagccatttcgcgagttactgcttcaataagggcagttttaccggaaccaaccggaccggcaacaccaatttttttgtaagccatagtttatttcctcctaaaatccattaagacatataaagtctgctgtatagagtttcatgctgcatgcagcgaacatcaaaaccaggtgttgaacgacaaagttctcgttctgtcaatgactcaagacggtctaaaacttcagtgaatgttttatgacattcttttagaatttgttgtccctgggtctgacttagaggaatcgttttaacacagctaacaaccttaccggaagtatttgtgtataagaaggattccatggcacgtctcatatcaataccaacagcagcgcaaaatacaccataagcaattgcataagttggttgttttactttttcaacataacgtgcaaatacatcagagatgtaatctacattcatgctaataacggtttttacaaatctagagccaagcttctgtgcagcagcacgaatctcaaccggagacttgcttgcctcaacaatctcttccaactctacaattttatccagcttgtcctcttttgtatactcataagcaagacgagcaggaagcaattcagagtataagaagctatttttaatgctgcttttcataaaagccaatgcagtttccccactattaacaatattcttttgaatataagtctctaaaccataagagtgagaataaccgccgattggaaacaacgcgtcattaacttgtaacagaataaatagttgattttcgttcatgctttttctctccgcagttatttagcgacaaagaaataccgccatcattttgtcgctgaaaaatgatggcggatttaacttcattgattaatgcgtatgtgcgttaattgaggaagaaattttcttcttaaagtcgaatttaactgttttgcgttcaactttaacgcctagtttttccatcagcgcttttattggaaggtctagtggagtaataaactggtagtcaccttcgcctcgaaaaagtgtagcgtgtttgtttccaatttcgtaacatactttagcaaccatgcgaacatcgttgtccactgtcataactaaagcctcacaagcaggaatgtttacagcaataacagtatcgccatcaacaccaagcacgtcatcctgatttaaacctctggttaaaatctcatttcccagtgagataccaaggtcacgaccttcttgagtttttttcttatgtaactttttgaaagcttcatgccattcaatatctacataatcaaccttcaagtttttaaattgctcatcacttaaagttcccaatatttgttcacataacatatttaaattctcctaatacagcaatggtgaacctcagctgtcaatcgtcagcaaatggttctgttatgcccataataagtgcccccacatcaaccaaatataatagcgtataattgaaacattatacgctattatctatttggaaaagcaactactatgtagttgggccatagtggttacaaaaccacataactacattacgtcattaatcttaagtttgaaacttaaaattagaataggtagtaaagttgtgttaatggtagttctttagcaacttcgcaagttagtagaacgccatcagctttaactacatatgtttctggatcaactgtcaactctggagttgcatcgttgaatttaagatcttttttgccgatgttgcggcagcctttaacagcaacaactttcttttgtagacccaatttctctttgatgccgttatctagagaagcttgagatacgaaagtgatgcatgtatcatatttagcagcaccgtgtgcgccaaacatgtgtttgtagatgattggttgtacagttgggatagaagcgttagcgtcacccattctggaagcagttacagcgccgcctttgatgatgatctcaggttttacgccgaagaatgctgggctccatacaactaagtcagcaaatttaccaacttcaacagaacctacaacatgagaaataccttgtgcaatagctgggttgattgtgtatttagaaacatatctttttacacggaagttatcattaccttcagcatcttctggtaatttaccacgttgttttttcattttgtgagctgcttgccatgttcttgtaataacttcagcaggacgacccatagcttgagagtcagaagacatgatggagaatacacccatatcatgtagaacgtcttcagctgcgattgtttctggacgaattctggagtcagcgaaagcaacgtcttcaggaattctgttatccaagtggtggcaaaccatcaacatatccaagtgctcatccaaagtgttaactgtgtatggcattgttgggtttgtagatgctggcaagatatttgggaaaccagcaactttgatgatgtcaggtgcgtgaccgccgcctgcgccttctgtatggaatgtatgcattgttctgcctgcgatagcatccatagtatcttcaacacaaccagcttcgttcaatgtatctgtgtgaacagcaacttgaacgtcatatttatcagctgcagttaagcaagaatcgataactgctggagttgaaccccagtcttcgtggatttttagaccagctgcaccagccaagatttgctcttccaaagaaccttgagcagagcagttacctttaccgtagtatagtaggttcattggatactcttcagctgcttttagcatcatagctaggttccaaggaccaggagtacatgttgtagcgtttgtaccgtcgttaggaccagtaccgccacctgccattgttgtgataccgctgaatagagaagtatcaacttgttgtgggcagatgtagtggatgtgagtatcaataccaccagctgtaacgatcataccttctgttgcaagagcttcagtagaagcaccaacaaccatgcctggtgttacgccatccataatatctgggttaccagctttaccgataccagcgataacgccatctttgataccgatgtcagctttgaaaatgcctgtgtagtcaacaacaagagcatttgtcaaaactaggtctaggtcacctgtagcacttgttgtgttaacagattgtcccataccgtcacgtagtgttttaccaccaccgaatttacattcatcaccgtatacggtgtagtctttttctacttcgatgataagatctgtatcagccaatctaactttgtcaccaacagttgggccgtacatcattgaatattgttgtccagaaattttcatgatctcattacctccttatgtgaataaaatattcttattttacaaagcctttcaatttagcattgttcatagctttgtctaggtttgcaggaactgcttggtcatttgtcaagttgtttagaccaaaggaacgtttgttgccacccaattctaccaaagtaacaactttctcttcacctggctcaaatctaacagcatttccggatggaacgtctagacggaagccaaatgcagcagctctgtcaaactgaagcattttatttacttcaaagaagtggaaatgagagcccacttgaactggtctatcgcctgtgtgaacaactttaacttggacagtttttttgcccgcgttaagttcgatttctctctctactggaataacttctccgatacgcatgtttctaatcccctctctttaaattattgaactggattgtgtactgtaactagttttgtgccgtctgggaatgtagcttcgatttgaacgtcgtggatcatctctggaacgccttccataacgtcagctctagtcaacatttttgtacccaattgcattagttcaacaacagtcttgccgtctcttgcaagttcatgtagctgagcgcaaagatagccaatagtctcaacgtagttaagttttacccctcttgcttttctttcttcagctagtttgccaatgcagtgcatttgcaacttttcgagttctcttggtgttaatttcatttctgataacctcctatttctgtcgaaaaatttaaacaaaaaaaacgtcttaaaatgagtaattaagaacgcttttgtttactaatttaaaagcttctaagctacgaacacattgtataacaatttcgccttattgtcaactttttttcgttaagaaacaacaaatggtctaaacgcataaaaatttttcttcataattgtaaattatgaatattgcattaatgaaatagggcttttgaatacttttttcggcttaaagcataataaaaagacaccccctggcgattccagtgctgggaaatatttctttatccaatttctagaaataaaacagcatttgtctaaattgcacaaaaaacagtaagcgtgtctttttttaataacaggacatttgttaaaaaaacattatatttttgttttatatcaaatataaagtgtttattgcagtccctaatactacggaatatattgtattcctttttttgctttttttcaatatttttgtttatctttataccttcttttctaacttttatccatttatctataacaaaatataaaataaaaatatttctatttaaaatcaacaatgttatgtctgagttctcggacaagcaataattttaagaaattattttattttcagtaattttactattgccttattcattgattgcttgcacttaacattgttgattttacttaatacatcttcctgatatatttgatgataacggtttgctttattgatacatcctatcgcttgcgctaccgtttctttgtattgtttttgcagctgtgcaatttgctctttatgttcctcatccgtatgttcttttactgcttcctgataaatatctataatttcgtcactatcacgtgatggaaaatattcatgtggcgatgtgctatcaaacaagcagatgcctaagtcgcgaatcacaaccaaatctaaactgttagggtcaaacgcacaatgatagatttcaacatgataaccgtttatcatggcacgttccgcaatctttttcaaaaatgtggattttcccgtacccggtctgccttttataaaatatctcttttcaatatcagcagtaatattttctatataatcaatcggtccgtggatagtagaagcaccgaataagcggttgacactgctgccctttttattttgtgtatgtccgcccaaaatttttaatatagtatcggaagtcaactggttcatcttagcaaaattcatattggtaatatagattttttcccagtcatcatgtatctttaatgcttttgcaaaatattcatgagattttgttaatgcttcctgcatatcctgcacagtctcattatccatcagtttgtaaacggaatatccgtagtcaatgtacgcagggatatttaataagcctgtttttaactgaggtaaaatgattccctctatactattatcaatacaactgtgaataatttcctgctgataacctttttctgttgcaatggaactggcttttcctattaattcttctacaattgcagttggatagttgtccaacttaataacccgttccagaggttcaaaattggatttaaaaaaactgacaaatccttttgaactgtttgtattgataaaataatggattgtattgcccatctcatcactctcctgtttcctatacttgtttctagtatatgtggcaaatattggaatatgacaagctacctaatacagaactgattttttcgtatcagatatatatgcaataaaacactaaacttggacaggtgttaatttatatcatccataaaaaaagaagggctgctgtaagcccttctttctatttttctttatatcttaaagctctgattgcatttaaaattgccaataccgcaactccaacgtctgcaaataccgcttcccataatgttgccataccaaaagcgcccaataccaatgcggcaaacttcacaataaatgccagtgaaatattttgtatgacaatatttaatgtttttcgggaaatgcccatgactgttgcaatgcgagacggcttatcgttcataattacaatatctgcagcttcaattgcagcatcggaaccaagtgcacccattgcaataccaatatcagctcttgcaagaacaggggcatcgttaatgccgtcccccacaaacaccagcttgcccttcttggatttctctgcaaataaacgttccatttgttccactttgtcagcaggcaacaaatcagaatgtacttcatcaatacccaattcattggcaacttgttccgctacagatttgcggtcacctgtcagcatcactgtctttttaataccaagctgtttcaattttgcaatggcctctttggcatcctctttaacttcatcagtaattagaagataacctgcgtattgatgttccaccgctacatatacaattgtgcccactgcatgaacaggttcaaacgaaatttgcttcaattccattaactttgtgttgccggcataaacagtgcgaccgtcaatctgtgcctgaatgccgtggcctgctatttcttccactaaaccaaggcgttccggcgtaatctcttttccatatgctgtttcaatagatgtagcaatgggatgattggaatgatattcggcatatgccgttaattccaacagttcctcttcactcatgccgtttggatgcacttccgttacttggaacgtaccttttgtaagcgttcctgttttgtcaaagacaaccacttccgctttggcaagagcctccaaatagttgctgccttttacaagtacaccccattttgatgcaccgccaattccgccgaagaatcccagaggaatagaaataacaagtgcacaaggacaggaaataaccaaaaacgtaagtgcacggcgtacccattcgctccagacgtctaaggaattcataccaaggaacaacggaggaatgaccgcaagcagtactgctgcaattacaacgacgggagtatagtatcttgcaaactttgtaataaagttttctgcatttgcttttctgctgcttgcattttccaccaaatccaaaattttagcaacagtggaatcttcaaattcctttgtaacctcaatggtcaatactcctgtgttattaatacagccgcttaatacactgctttcaggctgcacttctcttggaacagactcgcctgtcagtgcggaagtatccaaaaaagaagtaccctccagcacaacaccgtccaacgggattttttctcccggctttacaacaatggtctcgcccacttccacttcttccgggtcaactgtttccagctttccgccgcgcatgacgtttgcaaactccggcgcaatatccattaattcggaaatggactttctggaacgattgactgcatacgactgaaacagttctcctacctgataaaacagcattacagctacaccttcacggtaatcctgcaatacaaaggcgcccacagtggcaatcaacattaaaaagttctcatcgaatatacggcccctggctatgttgcgcagcgctttccaaataacatctccgccaattataagaaaagagaccaaaaagataccaaacacaatccaatgattgattcctgcaaatatgtcaatcaaaattgccgccgcataaatgaccgcgccaactataatacgaatcagcctcttttttaacataggaaaccttctttcattatgcttttggcttcatgactacatccggttcaatttttttaatgattttttcggattccgcaatcactgcgtccattttatcctcatctgcttttaaaaccatttttgtagtcataaaactgatggatacgttttccacatcatccagtttgctgatagcattctccatttttgctgcacagtttgcacaatccaagttttccaatataaaaatctttttcataataaagtcctccaatacactattcttcaatatgttccaaaccttgatttaaaatggtatttacgtgagcgtcagccaacgaataaaatactgtttttccctctctgcggtacttaacaagctgcgcttgcttaagtacccgcaattgatgagatatggcggactgactcatattcaaaagctgcgcaatatcgcatacacacatttctgactgaaacaacacgtacagaattttgattctggtagaatctccaaagactttaaataattcggctaaatcgtaaagaatttcttcttccggcatttcttcctgtacttgttcaatcaccttttcatgtaaatgcatataatcacattgctctaaaacaggttcttgttcactcatatcaacttcacatccattcatatgaataattgttcatatgtttattatatgcagataacataaaaaagtcaactgatttttttatttgcatgaaaatttatgcaggcaacaaatcacttttatatgacaataaaaaaagagccgcctgacacgactctgttttttctcttctcaatgaatttattatgcctgtgcaagaatggacagcactgtttgtgcatctgtgtccggctttactttttcaaacacatgtgtaatggttcccgcttcgtcaatgatataagtagaacgaaccacacccatatatgtttttccgtataacttcttttcctgccatacatcatatttttgaatggcatccaaatccgggtctgcaagcaaaacaaaaggaagttcaaatttagcagcaaaatttccatgagattttacgctgtctttgctaatgccaataacaaccgcattctgttttgcaaattcaccgtattcatcgcgataaccgcaggcttgtttggtacagcccggcgtattatctttaggataaaaatacagcacaaccttttttcctgcaaaatcactgagagaaaccatgtttccgtctttatcgggtaatgtaaaatttggtgcttttgttcctactgttaacattttcacttctcctttatcttctgtttataattctgttaattcataaatatatgcattcttttgtttttccacacgctgtaccacacccagctgatataaaatcagcaatgctcgctgggcagaagacagtgagatatgaacggctttactaaactctttggaagtaaacttcttaggcaaagtattgggtataatagcacggtaatcttcctctgtcatgagataaatcaattcaaccaactgaattggaatgcggtcataacgggtagaccctttctttttatctttgctccacccattgagcaaacggtattcctccaagtcaatcaaggcggcacaaacacaaaaattaggatgcgtcaaaaaagaccgcaatggatacaattccctgaacaaatcccaagcactgcctgttttgggagatttccgcctgcctgtcacagtacctgtctcttcgtccacccagcataagtatttggtatgcgcaatgggataaataattgtaacaggcacgttctgcaaaaatacttccagcttacgttttagtttgcccaaacttctggtttgaatttcaatgatgccttcagcattgcaaatgtcggcaacaaatccattgactttcacttcatgaaaatccgaattcggttcaaaatagaatttcagtcctgcatgcaatactttttctcccagcaaaccaatactgccgcgtttctgctctctactacacaaatccgcacaaatttgctccagtgtatgttcattctgtttcaatatacgtaaacctctttacctgtttgccttgataattcactatttcattccacatagaagcaggacgtacccaaataccgcgttctccgtataatgcttgatacaccaccatatcctccaaggtttcggagtgttttgccaagtacaatacttgataatgatttcctttataatggcggtacatcccgggcaaaatcgactgcattgtacttcctcccaatatgatagattccagcacacaatttgacaaatttctctgcattgtgtgattaaaattataatcagaacaaaagataaagtcaaaacatatttctactttgttgtaacttgcttgaaaacggtatatactgtttttaaacaatctattggaaagaacggtgaaacccatgaatattacagaacttgtacagcaacagcgagatttttttcatactgataccacaaaatccgttctgttccgcaagcagtctttgcgcaatttggcaaagtggatagacagacatgaacatgatatttatactgcgctgaagtctgatttgaacaaatcttcatttgagagttacatgacggaaatcggcattgtaaaaaatgagctgagacatacattggaacatctcaatgaatggacaagaccgaaaagagtgcccactcctatggtacaattccctgctgtcagttttatcataccggaaccgcttggcgtaactttgattatggccccttggaactatccgtttcaattaaatgtggttcctctgattggagcaattgcagccggaaactgtgctattttaaaaccctccgcttacgcaccgcatactgccaaattaatggaacaaatggtatcggaatgtttttctgaaaaacacattgccgttgttttaggcggacgagaagaaaatactttattgctggaagaaaaattcgactttatcttttttacgggcagtacttctgtgggtaaattagtcatggaaaaggcctccaaacatttaacgcccgtttgtttggagcttggtggaaaaagcccttgtattgtggacgaaacggcaaatattgctttggcggcaaaacggattgtattcggcaaactgttaaatgcaggtcaaacctgtgtagcacctgattatgtgtatgtacacaatactgtaaaagaatctctgatttatcatatgaagcagtatttaagtgatttcttgggaagctatcctctggataatcagaactatcctaaaattatcaatgaaaaacattttcaccgccttatggatttgatggacggtcaggaaatcataacaggaggcgtaggcaatgaacatggacaaattgcgcctaccatcttggacaacgtacaccctgattctcctgtcatgcaggaagaaatattcggcccgattcttcctcttttgacatatcatgacatagaagacgtcattacttggatacgttcccgcccaaaacctttggcattatatttattcagcaactgcaaaaccacacaaaaacgaattttacaaagtttatcttttggcggaggctgtatcaacgacaccattatgcatttggcatctcatcatcttccgtttgggggtgttggtgaaagcggtatgggcagttatcacggaaaacaatctttccttacattcagccatcaaaaaagtattttaaaaaaatccaaccgtttggatattcccattcgctatgcgccttatacgtctttcaaagaaacattgctgaaaactttcctaaaatagataaaaagaacctctatgcatattcgtctcttatgcatagaggttcttttctgtatctcatgtttatttccacaagctattttgcaattttttgtttttttcacggcgcaggtctgtttccttctggtcaatggaaagagtgccgtcatctttgatttcaataacatggccctcttttgctccctgcggcaattctgcaatttcaattgcaaaaaacttttggtctttgtcctcacaaatggcataggttccttcaaaacggtcgattacaatttttctgctcatatgattttctccttttattgttccgttgcaacggtaatgtcagcgccatcgctcataaaaataacagttcctgaactatctgtacgatatgtttttacattggatttctcaagtctttgcagtacttcggattttggcagttcatttttatccggtcctacggaaatcactgccatatcgggctgtactgcatttaaaaactcctgcgttgtggaagtcttactgccatgatgtccaattttaatgacatccgcttgtaaattcgcaccactgtttatcaaatcttgctcttcctctttttctgcgtcacccatcattaaaaaggaagtatcaccgtaggttagttttaccacaacagaattattattcattgtatcataaaactgtaacggcgctaaaaactcaatctttaattcatcaagccaaaccgtctcattggatactgcttgtttgattgggacatctttttcctgatatacttccattgtcgatagatattcatctgtagaaggcagcaaatcctgcggcaagtccggcacaatcatttgattgacggtaaagtgctctccaacttgctttaagccctgtaaatggtcgttatccgggtgggtattgatgaccaaatcaatttgagaaacatccatctgctgtaaataggtcgtcagcgtatctccgccgtctgtggttccgccatcaataactatagttttatcctgacaggaaacgaccatagcgtctgcttttcccacatccagcacatgcagagaaaatggtgcatctttcgcagtctgcgaaaagtgacctaatcccacccaaccgaaaatggtactccaccggcctgccaatgcaaagctaagtacaacggccacagcaaaacctatggcaaccaggatgtaaatcagcgtccttttttggactttttggcgtgaatgttccgcagcggacttcttttctttttcttccatgattcagcctgtccccctttggacgcgctttgttgcgggtgcattggacgcaccaaacactttgcatcattaccgattaagtcagaacgtcccgcagctttcaacgcttcgattaccaacgctttattttttggattaaaatattgcaacaatgcccgctgcattgctttttctttgtctgttttgggtacgtaaaccttttccaatgtatatggattaagctctgtatagaacatacatgtagaaatggtacccggagtcggataaaaatcctgtacctgttcgggatgcagattttcctgctttaagaacaaagccagcgccacagcatcttttaatgtacttcccgggtgagaggacattaaatacggaaccaaatattgttcttttccaacggattttgtgatttgataaaaccgtttctgaaacgctttataagcttcgatatgcggttttcccatatggtccaacacattggcggaacaatgttcaggcgctacttttaactgtccgctaacatgatgctgcaccagttctttgaaaaagctttcatcggtatcctgcatgagataatcataacgaattcccgaacgaataaacacttttttgactttcggaaccgcacgcaactttctcagcatatgtaagtattcggaatggtctactttcaataatttacatggggttggcgccaaacatttttttgccttgcacaatccatgtttgatttgtttatcacaagaaagacttctaaagttagcagtcggaccacctacatcatgaatatatcctttaaagtttggcatttcggttaatgcttttgcttcccttaatacggatgcttcacttctggctgtaatctctctgccctgatgaaatgcaatggcacaaaaattgcaggcaccaaaacagccgcggttatgagtaatggaaaactctacttcctgaatggaaggtacgccgccctctttttcataacttggatgatacgcccgttcaaacggcaattcatacaccttgtcaaattcttcttgagacagcggcggcataggtggattttgtaccacaatcatatccccatgtcgttgtatcaatttttttccgcgtactgcgtcctgctcatcctgctgtttgcggcaggaaatggcgtactcccgctttgattgacatacctgctcataactggggcattctactgccggtcccggtttatattcgttggcaggtacggcataacaagttcctttgatatccgtcagtgtgcaaatcggttcgccttgcaacaaacgagaagcaatttctatggtctgtttctctcccataccaaaggaaagcaggtctgctccggattcaatcaaaacggacgggcgaatttcgttatcccaataatcataatgggcaaaacgtctgagggaggcctccaaacctgcaatcactacaggggaatcgggataaacttcttttatctttttggtatacaccgtaacggcacggtctggacgttttcctgcctttcctccgggggaataagcgtcgtcgttgcgttttcttctggcagcggtatagtgggcaaccatagaatcgatattgcccgcagttaccataaagcctaatttcggctgtccaaatcttgtaaagtcacggtcggtacgccagtcgggctgtgccaaaatggcaattttataaccgtaactttccaacaagcgagaaataatcgctacaccaaaggtcggatggtccacatacgcatctcctgttaccaatacaaaatcaggcacatcccagcccagttgctcgatttctttttttgtggtcggtaaaaatgccatttccgcacacctccttttttattcttctgtattatcatttgcagcatcattcttttgcatggtcatttccagccattgttgataggtaatcaacacttgacgcggcttagaaccttcatggggacctacaacgcccatttgttccatttcatcaatcaaacggcctgctcttgcatagccaaggcgtaaccgtctttgcagcaatgaagtagaagcttgtcctgcttctacaacgcatttgattgcttcatccatcatagggtctgtgctctttgcatcggtattatcttcatcccctttggatttttccgctactgcatttttctcaatgccttctatgacagattggtcatattccgacggttttgatttttttacaaaattcacaatggactcaatttcacggtcatccacatagcacccctggacacgaagcggcttttgcgaacccattggagcaaacagcatatcgcctcgtcccaataacttttcggctccgcccatatccaaaatggtacgggagtcaatctgggaagaaaccgcaaatgcaatacggcttggaatattcgctttgataatacctgtgataacatcaacagacggacgctgtgtggcaatcaccaaatgcatacctgccgcacgcgccatttgcgccaaacggcatatggaatcttctacttcattgggcgctgccatcatcaggtcggccagctcgtcaatgataatcacaatctgcggcattttctttaaggtaacgccgtcatcacgcacgtattcttctttgtcgccaatcaaacggttaaaggaagccaagtcgcgcacattgttgtcggcaaacattttgtaacggttgagcatttctgtcactgcccatcccaatgcacccgccgctttacgcgggtctgtcacaacgggcaccaataaatgcggaatcccattgtaaatgcccaactctaccactttagggtctaccattaagaatcgaacttcatcaggcgttgccttatacagcaaactgataatcaatgagttaatgcagacagatttaccggaacctgtggaacccgcaatgagcaagtgaggcattttggcaaggtccgctacggtaacttgtcccgaaatatcacgtcccagcgcaacggtcaatttactcggtgcagaacaaaaacgattggattctaccaagtcacgcatacgcacaacacctacatttttgtttggaacttcaatgccgacagcggcttttccaggaattggagcttcaatacgaactcctgacgcggcaagattcatggcaatatcgtctgccagatttgtaattttgctgattttcacacctgcggcaggctgcagctcatatcgagtt

SEQ ID NO: 630 - DNA, 4433 bp, Unknown
  16S sequences of unknown bacteria
ggcgccgtcgaacagcttcgtcgtgccgaggtaagccttagcgtacgcttcggcggtcgagccgatatcgttgcgcttgacgtcgagaatgacgtacagaccggcttccttcgcgtaggcgattgtcttttcgagagcgataagcccctcgatgccgtacatctcgtagaacgcggactgcggcttgacggcggggatgaggtcggcgacagaatcaatgagagctttgttgaactcgaggatagcttcggcggcggctttgaaggtgttgccgtactcgttcgcggcgcgcttcttcatttcctccgggatgtaatcgagcaccgggtcaagacccattacggtaggattgtgcttttcggcgattttttcgataagggtatcaaacgacatattgacagttcctttccatatatatatattgaacggcgtgaaaccgttgttttcgtgtcagtgtgcgaagaccttccgcccgctgacgaatgtgtacatgacctgtgctccgaaagtcatgccgataaacggcgtgttgtgcgactttcccctgaggtcttctctttcaagtctgtattttgcgtcagtcgagacaagtgtgaaatcagcggtcgagccgacctcgatgcttccgagccccattttgtcaagcccggtgatctccgcgggattcttgctcataagctctgtcagcttcggcaggtcgatgtacccgccctgaacgagtgtcgtataagacaccatgaaggatgtctggagaccgattataccgttcagcgaatcggcgagcccgcggctcttctcctcgtccgagtgcggcgcatgatcggtcgaaatgcagtcgagcgtaccgtcgagtatgccatcaatgacggctttcacgtcgtctttcgtcctgagcggcgggttcatcttcgccatcgcgccgtatttttctatatcgtcttccgagagcgcgaaatagtgcggacaggtctcggcggtgactctgacgcccctcgcctttgcacgacgaatggcttcgaccgagccgcgcgtcgacacgtggcagatgtgcagtctgcaccccgtatactccgcgaccgcgatatcccgcatggtcccgatatcctcgcatacgcgcggaatgcctttcagaccgagcttttccgaaacgatcccctcgttcatcgctccgcccgcgagcgacaggtcctcgcagtgcgacattataagaaggtcgttttcagcggcgacgcgcattgctttcataagcgtctcagagtcagcgacaggttttccatcgtccgagaatgccgccgccccggcgtttttcagcgcagcgaggtcacagacctcgcgggtaccaagccctttcgatatcgctccgaccgggaagacgcggcagtcggcgtccttcgccctgttcatgacatatccgattgtctctggcgtgtcgcagaccggcttcgtgttgggcatagcgaaaacagacgtcacaccgcccgccgccgcgcactttgagccggagattatgtcttccttataggtaagccccgggtcgcgcagatggacgtgcagatcgatgaatcctggaagcattgtaagtccgtccccgtcgatgacctcatcggcttcgtgttcgcatggtttcgtgtacccgacgatccgcccgtcagagatgagcgcgtcgagcactggcgagccgcagatgtccccgcggcgtattctttttatcacaagatcgtatctcacttgaaactcctgtttatatcagagaaatctgtgtcggactctcgtccggctttgcgaccggaatcaccgcgtccgaaaccttgtcgtccggagcgtagacatagccttcaccacgtctcgagcgtatcaggcgcagaccgaacttctcgtcgagctttgcccgcaggaatcttatgtaaacgtcgacgacgttggtcccgcgctcgttctcgtccttccagattgtcttcagcagctccgagcggctgatcgtgatgtacggtctcgcgaagaaataagagaacagctcaaactcgcggtgcgtcagctgcgatatattgtcgccgtacccgaccgagagctcgtccggataaagcacgatcgtgttctcctcgctccccggcacgtcctcgagcccggaaacaaactcgcggaactcggtcagcgcgaacggcctgtccagcaccttgaccgttatcttttccggaagtctcgcggcaagcagtccgcagtcgatcagcaccgccgccgaaagccccctcgagcgcggaagctccgtctgtccctccgcgacgcagagactgaaatccgcagacccttcccgagcctcggtgagcccgagacggtcgagctcaagcttcagcatccgcgcgtaaacttcgtccgccgcgacgactctgtatttcatggcagaattttcctttcagatcatatttcggtgatacaccggacatttgtgcaatcagatattgcccgcgaggtgtctcatcagttatcgtcgtcaataagctcgcccgcgaggtccctcgcgaggaacgtctctatgtccgcgcctctgaaaccgagagaatacgcgatcgacagcttcatgtacgcgcactcgcttgtcagcgcccagaccggcttcgctcctgacttgcaaagatcggcggttgtggaatacgagcccttgtacgggtcgaacccggcgggcatacctccgagccagaagtctatatccttggcgcggcatttatcgagcagagtcagcgccgagtatttcgtgtaaggctcgtccggctcgctcctctcgacgcaggcggtcgcggagtgatagcttccgtgcagtacggcgcgaatcccgtcgtccggctcaatcatagagtaatcgagaccgacataaggttcgaccttcatcacacagcactcgagcttttcaagcgccgacagcggcgggtaatcgacgaaagtctcatacggaaccgcgcgatcataaggcgtcattcccctcgagaagaagtccgacgtgtagttgcggcactgttcgagtctcgcgccgcggtgcaggtaagttataccatccgagttgcggtacggaacgtagacgccctttccgaagcctttctttataagctcagccgccgccgtgaagttggcaagcccgttagcctccggtctgtcaagcgtgtagttgctcgagacgatcataaccggaagtgagaaaccggtgagcagcagagcgagcaggctcgacgaataagcgagcgtgtcggtcccgtgcgcgacgatgacaccgtcatatggcagtgtctcctccgatatcagcccgcggaagacatcgagcagcttcccgagctttgtgaaagtcatgttctcggtcaggacattgagcgcctgatcgacctcgaactcggtctcatagtcggcggtgcgctcgcggtatttctcgacgagcataggcgcggcggtctcggtgtcgggcgatattgtgtcgcctatcatgcgggagcttatcgttccgcctgtcattataagcagtatcttcatttttgttcagaacctttcctcagtgtatgtaatctcacttcccgcggacaaggtcgtatttctccttcagcgccttcatatcggtgagcatatcctctttcttcctcgggtccctgagcagcgcggacggatgatacagcgcgcacatctcatatccgccgcgctcgaaccacactccgtgctcctttgttattctgaagtccggcttgatgagccgcatcgcggagatccgcccgagacatacgatcatcttcgggcggacgatcttcacctgctcgcggagccagtcgatgcaggcgtcctcctcggcgggctgtgggtcgcggtttttcggagggcggcatttcaggatgttcgcgatatagacctcctcgcgctttatgtcgacagcttcgaggtacttgttgaacagcttcccggcggcgccgacgaacggctcacccgacaaatcctccttctcgcccggcgcctcacctacaaacatgaggtccgcgttttcgtttccgacgccgaaaacgagattggttcgggttgcgccgagcccgcatttctgacagttttcacactcatggcggagttcttcgagattcattttttcgaccgtgtccgctgatggcggaaccctttcaagtgatatacagcgactgaaccagacgccattctttaccttatattataccacattttcccgcaacattcaacccctaataaacgacaattttcatattgcccgggaaacaaaatacatcggttatcacatatccgaaagaatcctgacagcgctcgtctcacatacgcacgaacagtgctcgcatatataagcttccgcgtgcagactgtcggtgttccgcccgaactcgccgataaccgcctcgatccttcgcgacgatatgccgtcaagatactcccgacagcttatg

SEQ ID NO: 631 - DNA, 2127 bp, Unknown
  16S sequences of unknown bacteria
ccacggcccctcgtgccattttgggaagatatggcaattatgttgactgaaagcgcacttgctgggaatcgatacccaattgcatgaatagctgaatgtctcactcggtgaaattcgtcctattggcgtaaagtcaatttgttcgagaggtacgaagggccaccagatagcgtaatgagaagagcgatttcccaactgagatactacctgcaaggtggtcttacggatgaagagtacgcccagctgtccgcagagattcagcgcgacaaccgcaaaaacctcctcatcttctccgcggtttcctttctgctgtttctcacgctcatcggcgtctcgttcttcagcagcatcgccggcaacaaccgctacctctatctcttcgtccttgtccccgacatcttggtctttacagtggcaaggcagagcgtcaaggacaacagcaagctgctgcaggcagacatctacgtctttctgagcctgctgctcatcttcggaatctggctcggcacagcccatatccccgacaaaccggcggtaacctttatcgcggtcctgctcatagccccgctcctgttcacgctcaagccctcacgtgtcatggggttcatcgtgttctacgccatcgcgttcattatcgctgcaaaaaccttcgagcccgaatgggtcgcacgcaccgacaccctgaactgctgcgtctacgccaccatcagcatcatcgtgagcacgtatctcacaaagctgaagtttcagcgctacctgtacgagagccgcgtcgagtatctgagcacgaccgacctcctgaccgggctgcgcaaccgcaacgcgttcgagcgcgaggcacccgcacatgccgacggctgcgcgcactccctccactgcatctatctcgatgcgaacggcctgcacgagatcaacaacgcgcagggccacgcctcgggtgacgcgatgctcaagttcatcggcgcggcgatgcaagaggaattcggaaagtcgagcacctaccgtatcggcggagacgagttcgtcgccttcgtctccgacaagagcgcagcgcacgtgcagcagcttattgccaactttgaagcgcggctcgagaaggaagggtactgctgctccctcgggtacgcaggcatgcagcgccccgacatcgacgtgaacaagctcgtcaacgaggcagagcgcaagatgcgcgccgagaagaccagcttctaccaacagccgcagagcaagcgtgaaacgcgctagaccctacggctattcctcgccgtcgccatgacctttgatgacgagcttgacgaacagcgtgagcgcggcgatgaccacgccgcacccaagacccatccacaggatatcgagcccgcgggcgccgttgagcacatagccgagaaaatacacgccgagcatgacgctgatgacgctgaccagccgctccttaagatcgtcgaagtcgtggaacgtgagccagcgcggcaaggcgatcttgtccgtgacgaacaaggtgatcagcccgagcgcgaggatgtagagcacgaccgccagcaagaacaaatcggcgaactccacgaagtcgatggcgagctgcatgacctcgatcttcccctcgatgaactcgagccccgcctcgatgacgctcacgaaggtgccaaccgcgagaacaagcgcggcgatgaagaagccgaccgcgggcacagtggcgatgaggcgcgtgtaaccggtggtgcggcggacggaacggcgcagcttggtgtcgccgtgcgagggtacctgcccgtctgtgttctgcggtgtttccatacgtgagcctcctgcgccagcgacgtttgcctgcgcctattatacgagcgcctgcgacacgctcgtgccacaggcgctcgaaagaatcaggttagaacgggaatcccccggctctcctgcctagactgcggtgtagccgccgtcgaccgcgatcatctggccggtgacgtagctcgcctcttcggcacccagaaagactgctgcagcggaaagctcgccttcatggccgtagcgttgcatcgggaccgtgttcttggcaaagttctggaagtactcggtgtcgagggtctcggtggtcagctcggtgtagaagtagcccgggcagatggcgtt

SEQ ID NO: 632 - DNA, 31535 bp, Unknown
  16S sequences of unknown bacteria
ttatcctacatcaggggggattttgtctattgtccagtttttctggttctgtccacagttcaggtaccgggggtttgttcaatttaccgccgcatacacggttctttctcctaatgcgcggtgctgatcgtcgatggtcgtcgccgtcagcatgatgcggtacgtccggctgtctatgggatagagcgaccggatggtcgccgtatgccgtccgtcgtggagttcccattgggctcgggtgtggacattggcccagccgccatcctcctgataaacctgcaaagtcagctcaagcctggcggtgaagtccggcctcgccgtgcacgagccggtcactgtcagcgtaccgccgctcgtcgtctggtcgatttttaggtcggtcggcgcatagactgcgcgcgcggcgtctacaggcagcgcccggatagggcagaagcagagaaaaagcagggagcatactatacaaaggaatttcttcatacaggttcacctcttttattatcatccaactataccataccataatttccagtaaatgtaaagccaatggataccgaaatccaccgcaccccatggctgcgtcggttttttcttttctcaagctaataataccatacatgtttatgaggatcaacccctatatagggatttttctacaaatagagcattcctcaggacgcgtataactggtatgctatccgtagaaaataccccaagataggtggtgatgccgatgaaccgcaaacgcctgggaaagaaactgcgatcctatagagcgtcctgtggctggagcctgaaagagtgtgcggaaagaatcggtatcagcacgaggtatctggcggatatcgagcgcggcgataaagtccccaagctcgagaccttcgtgcaaattctcaacacattgtccgcctccgccgatgatgtcctgcaggacagtctgcttgtcggctacgaatccaaaagcaacgacgttctcaggaggctggacgctctcgacgcgccgcgcagaaagcaggcgctggatattttcgatagcgtcatctcttccctgaaagataattgaaacccttcgctcgccggctgtgccggccagccagtaagcccgccgcagcttccgctgcggcgggcttttattctccaggaaatggcgcgggacatcttgaatagtggtaagtttccataaaatttgcaaagacccgccccattccgcctgctatgataagagtagaagaatcctatgaaaggatggacgctccatgcctttgcttcccgctcccaaggaaatgcataccgtccccggcgtttcacccgcccggggctttaccgccaccaacgccggccccttcgccgaggaacgcctggccctccggagcctgggcgccctgtccgtgcaggcggacggcctgtattacgccgtgatcgccgcgcaggcggatgccaccctgcccgatctgcccgctgtcctgcgccggcccggccgggaagagggctttttcctctcggcggacgaaggtctggtctgcgtgctgtcggcccacccccggggcgttctctacggcctgcacgcctatgaacaaaccctggccgacgatggatccttctgcggcacagtaatcgattaccccgacaccgccttccgggcgtttcatatggatatgcggtacggctttcccagcgtttcgcggatgctggccattctggaggagctgtccgccgcccggttcaataccttcctgctggaatatgagaaccgcttccccttcgaggcctatcccgatattgccgaccccgcccatttcacccccgccgatttgcggcggattcaggagcgggccgccgccttacatatcgagttaatccccctgcagcagaccatcggccatctggaatatatgctcaagctcccccggtatcaccatctgcgggagatgcgggagttccccgagacgcccctgccctacagcttcggccccaccggcttcaagcactataaccatatcgatgaaatctgcgcgagcagcgacgaggcctgttccgtggtggagaccctgctcgacgaggtcatggccgcccatcccgccagccggtacgtccaccttggctgcgacgaggcctggaacctgctcagctgccccgactgcctggcccggtatggggagaacggcaagaaccgcctgtatctgggccacatcaaccgcctggccgcccgggccctggccgcggggaaaacccccatcgtctgggacgatatgctccgcagcttctccgacgaggagctcgagctgctggacaagcgggtggtggtcatgatttggctgtattacgagagcaactacgccctggccgtcaagctggcccgccggttcaaacaggccggcttcaccgttctgggcgccgccgccgccaagtgcggcgagggcccagaaccccagtacctggatatgccctggtatgagctgcgcctgggcaacgtagacatgtggggccgcgtctgcgccgaggaagggctggatggcttctgcatgaccgtctggtcgaactacagcggcaccatcgctccgcctcacccctttttcgacaccgtgtggtatcccgtcctgttcgccgccgaaaagctgtggaaccggcaggccgtccgggacgggttcgatacccgcttcgccgccgcctttttcggggtggcggaggaagcccttttccacggccccaccgccgaccgctacgcccgcatcgagcgggtcagccgcctggccaagcgccatcggtatgaggccgaggtcctccgcgtcatggagcttaccagcgtctaccggctgaaagccctgaccatcggccgggaactgtataagctgcgcatgcccgttaccgacgcggaaaagaccatcgtgcgcaaccgggcggccgaggtcgccgccctgcgggagctgctgaagccccaggtgcgccggattgtggaaacccattacaccaaggacgacgcggacgtgtttgtccgctcccgcttcgacgcggacgaggccctgttccgggcctttctcgacggaaaggatgagtcatgatcatgcataccccctacgcatcccgggctgtcggcctgttggccgccctggttctcggcggcatggtgctgctcgctggctgcggcggccgggaggagcccagcgcccctctgtcctccggcgaagcctccggatccgcggaatcctccgctccggaaagcacggttcccgacgcctccggcgaggacgcatccgatgcttcgtccgcttcctcctccgcgcagacggacgacacccgcccgaccggcggcgcttcctccaagcccgggggatccaccgcggggggcggggcctcgacggcgtccacccgtccgaacaattcctcctcgggcgcggcctcttcctccgcccccgtgaccacgaccaccacctcccggaccaccacggctcccgacggcgccaccatggccttccgtcagccgggcgacgccaataccctgggcgtctggtggtggaacgtcagccaggtgaagaccgccaaggccgacacctatctcgacttctgccagaaaaaccgggtgagcgagatttatctgtgcatcgacgggatgaccgcttcgggttccacctccttcgccgacgtgcgcgcttttgtcaaaaaggccgccgccaaaggcatccgggtggccgccctcaccggggactatcgctggatcaatcccggaaacaccggcttccagacctatgtggataagtttggcgcctaccagaaggccgcctccaaggaggagcggttctatgccatgcatctggacgtggagccgcaccagcacccggacttcaaaaccggcgccgacgggcgcgccaaggtgatgcagctgttcgcggatttcaccctccaaaaggcggtgcccgccgccaaggccgccggcaccctgctggagtgggatattcccttctggatgaccgatgtggtcaaggacggcagcggggcctccatcgtcctggccgagctgatggcgcgggaatgcgacaccatcgctgtcatgtcctaccgggacaccgccgccgccatgtgggatgtctccaaggaggagatcgcctacgccaagaaatacggccataaggtcatcctcggggccgaaacctattccaaggaaggcgacgccgtctcctatatggaggaaggcaaaaccgtcatggtgtccgagctgaccaagctcaacgccaagctgctgagcaatctccccaaccggaatttcggcctggcggttcatcagatcgaccgctggtacagtctgaagaactgacccgtccgccagatgaaaccgttagcgaaaggaatgtgaatatcgatgagaaagccctgtcgccgcgcgttggcggccgttctggctctgctgctggcgctggccgccgcgggctgcagccgggagcccgccccttcgtcgtcgatcccggagagcagctcgtcccagagcgcttcgtcctccgcgccggatgcgtccggagacggcgctgccagtactgaaaacacggaggatagccatatgagcaccacagccgccacacaaccggccggcggaaaaaccaccgccgccaaaaccaccgccaagcccactcccaccacgaccaccgccaaaaccccgtccaaaaatcccggcgccgcccaggtgggcagcgcggacttcaagcccggcagcctgtacaagggcccggtggtcaacttccgcaaggatggggacgccactaccctgggcgcctggtggtggaccctcaaagggattgtcgagccgatagacggcgtgtcggtggacatggtcctcgatatgctcatcgccaataaggtgacggaaatctacctggatgtcagcgccatgatgccttgggatgaggaagaggcccagggcggcctgaccgacgacgacaaggccgccggcctggtcagcgagcggtacgtgcgcggcttcgtcaagaagtgcgccaagtacaacatccgggtggccgctctcaccggcgcttcgggggacagcgtcctgcgctggatcgacccggacaagaagaattatcaaatcaaggcctttgccgagaagatcgccgggtatcagagccgggccgccaaggatgaaaagttttacgccatccacctggacgtggagccccataccatgggcagcaagtgggataacaaccgggccaaatacacccagtggatggccgacatggtggtggaagcccgcaaacagtgcgacgccatcggcgtgcagctggaatacgacgtctggtcctggtttaccgaggcggacaaggtgactgatgagtcgggcgccacggtgaacatcctcgacctcatgaccaagaaatgccacgccctgggcatcatgtcctactacaacaccggcgccggccagttcgaccgggccaccaacgtggagctggcttacgcgaaaaagaacaactgccgcctcatcgccggcaccgagaccatcaaaatcacccccaccaacatcacctactactactccggcaaggataagctggtaaccgagcagggcgtcctgcgccagaagctggacggcaccggctacaacaagctgggcggcgccatccatcacgtctattcctggtacgagctgatgacgaaataaggagccgccgcctatcgcgggggtagatggaaaggaatgggttttttatgaaaagcattcgtctggcgtccgccctggccggcgccgccatagcctgcgccgctctgttgggaggctgcgcctccggggagggggcttcctccggcgccgcctcgcaggcgccttcctccgccccggccaccacggccgccccggcgaagaacaccaccgtcgatttccggaagcagggggatacggataccctgggcgtctggtggtggcaggtggccaccgtcaagtccgccgacgcccagctgaaattcctgcaggagaacgcggtcagcgagatctacctgtgtatcgacggcatgtccgaggcgtccaatgccaaggccacctttgccgacgtgcgggcctttgtcaagaaggcggggcagatggggatgcgggtggccgccctcaccggcgactatgcctggatcaatcccgacagcaccggcttcgaggcctatgtggaaaagttcaaggcctaccaggccgccgccgcggaggatgagaaattctattccatgcatctggacgtggagccgcaccagcaccccgatttcaagaccggggaagagggccgggccaaggtcatgcagctctttgccgatttcaccctgaaaaaagccgcccccgccgccaaggccgccggcaccctgctggaatgggacattcccttctggatgaccgacgtggtcaaggacggggagggcaaggacgtcgtcctggccgagctgatggccaagacctgcgataccatcgccatcatgtcctaccgggacaccgcggccaaaatcctggacgtggccaaggaggaaatcgcgtttgccaagcagtacgggcataaggtgatcctcggcgtggaaaccaaatcctccgaaggggatcaggtctccttcatggaagagggcaaggccgtcatggtggaggaaatggccaaggtgcacgcgtccctgaaggaatccattcccgacgggaactttggtctcgccgtgcatcaggcctccgtctggtattccctcaaggactgatcgccccgtccgcgtacggcagccccgctcccacgagagcggggctggattccccgggaacagtaaacggttgctgttctcctgcacagatgggttactgaatggaagaaactagaaaccaaagaaagggagaggagcatggcggagaaaaaggtgaccatctatgacgtggccaagcactgcggcgtgtcggtggcgacggtgtcccgcatcgtcaacaatgtggattatccggtgagcgccgagctgcgcaccagggtgcaggcctccgtcagggagctgaaatataagcccaatatgctgggccggtatctcaaatccaaccggaccgacgaggtgggggtgatcatccccaacatctccaatttctattaccccggcctcatcgcgggtatcaacgactccctgattcacagcggctataatgtgctgctctgcaattcctaccgaaacccggaatatgagaaaaagcagtttctctccctgctgcagaagcaggtcaagggcatcatcatctccaccgtcagcgacgacacctcctggattgaggaggtcaataccgacgatgtgacggtggtggccatcgagcagcccctgcacacccccacccaccgggtctgcttcaactattacggcggcggttatatggccgcccggtatctggtgggcatgggccaccgggatatcgccttcatcagcccgcccctgacctacgccagccgccgccagcggctggacggctttctcgcgggcctcaaggagagcggcatcgagctggacgccgatcatctgcggatttccgactatgagcgggatgacgagaatgtctacgagttcaacatcggcagccgcctggccgaaaagctgatgcagctggatacccctcccacagcgatattctgcatcaatgacatgatggctctcggggccatccgcgccctccagcgccggggcatacgggtgccccaggacgtgtcggtgcttgggtttgacaacctggccctgtccgagatgatcacccccgcgttgaccaccgtcgatcagtgtacccgggagatcggcgcgaaggccatcgagctgctgaccaaaagcttcgccgatccggcggctcccctggagaccgtccgcttcaagcccaagctggtggaacgggaatcggtcgcccgccgcccctgattccgctccgcccgaatcctgagccgtcgccgcccctgactttgaaccactcgtgccccgatccgccgccggctctccgaacgtcttccccgcgccacgcatcgtcatgcggggaaggccggcgtccgcttccggatcgccgcgggcgggggaggggcggccgcccggcggctctttcggtgcgaaaatgtgcgaaaccggcgcggtttcctgcgaacgccacccccctccggcccaaaaccgtgcggaaatgtttgaaaaatttcgacaaaatcaggcggtgtcactgaataatagaagtttttcataagatatgctaagcaaaaaccggacagattcgctataataaatgtgtaatatgaccagatctcctcaaagagagggtaaaaaggagtacgttccaccgtattcctacctttttcatgggaaacagaaaacgtttactatcattttccggaaccttcatccaaaagccgaacgaaacgccgagacggaccaatatgtaagaaaaattggggcaaagcagacgtgccgaacaggtcagaagcgactggaaaaatttttaatagcaaggcagaaaacgatttctgaaggcttcaggaaccattttcttctctttgtatagatttgccaggacatatcgtaacttttatacattataatggagaccccagacccgtggtttgtacaaaaggggccagcgtttaagcgcaaccggaggtgaccgaaagtggatgtaaacggcatggtggtgttcacaaaatgcatatccatcgcctgcggcggctccatgccgctctccttctcggattacgcccgcatcgcagcggagaataaaccggaaaatatcctggccatctgccgcgtccagcggggcagcggccatatcacgctgggcagcatctccaccgaggtgaacagcggcagcctgctgcttctgggcagcggcgagagctacacattcaccgcctcggaaaacattctggccaacctcatcgtcttcgaccggcggctgttcagcagctcctacgcctacacccttgggcgggaggctctggcccccatgcaggccctggcccgcgggtgtgagctgattaccgaaaaggacgcctgctacggcgaggtcatggccacggtggacaccatctggcgggcggccgaggcaggggagaccagttcgccgatcatggcggtggctatgctgtggcagctggcggcccagctcaagcgggagaccgaacggcggggcgacaccctgggttctatccgggagacccggaacaaggaacggctggctccggcggtcaactacacttaccagcattacgatcagaaaatcaccttggcggatttggcccgggaggccaacatgagcgtaccgaatttcagctcggtcttccgcgagacttacgggattccgcccatggagtacctcgcccgcatccggctgcagaacgccgccgacctgctgcagaacacggacaagaaaatcatcgacatcgcggaggaatgcggcttcttcagcatttccaacttcattaaggctttcaacaacggcatggggatgtccccctcccgttaccgcaaggaatgcggcgggccggataaggccgataaacccgcagacgattaagtcccatgcggcggtttcaaactgcctggcgcatacaaagggaacccttcgacttatctatacagaactggaggaaaacgaaatgaaactggctgtcacccgtatactcgcggccactgcctcggcgctgtttctcaccgccatggcggcgtcctgcggcgacaacaacaagggcggatccagcaccccctcgaaggaggagcagagctacgacttcggcggcatgaaaatcaccttcgccgacacatggggcaaggatttgacccccggcaaggacgcggctaccgacgcgctcattgccaaaatcgataaggttaagcagaaataccacgtcgatttcgaatgggtcaagatcgattccggcccctactgggacaacatggcgagcgtcatcatgagcggcgagccctacggcgacatcatgtactccttcccctggatgatcaccgactggattaaggcgggcgccgtcaaggacgcgggcgcggtggccaaatccgtgggtatcgactttaaggacggcacctggaacgacttcatcgtggacgaaaccacctatggcaatacgatctacggcttctccaagaaggccaacgccatccagtccggcatgctgtacaacaagcggctgctcaaggaggccgggctgaaagatcccaacgagctgattaagggcggcggcaagtgggattacgccacgctggaagagtacgcccgcaagctgaccaagctggacgcgtcgggcaacacggtgcagtggggcctgtccaccatggactcctactggctgatgaccgccttcgccgtcaacaacggcgcggatctcatcgactacagctccaacccgcccaagttcaacatggattccccgaaatccctggcggggctggaagtctttaacaagatgctcaacaccgacaagaccatctatctgcggccggccggcggcgactggaaggtcaccgtggacgctttcgccaacggtaaggtggggctgttccgagcagaagaatgggttatcgagtacatccgcgacgtcatgaccgaaaacggcaccaacgaggattacggcctgacctacttcccccagggcccggattccaccggctttgtggacgagagctacggtggtaactcctacttcatccccgcctccatcagcaatgagaaggcccaggccgcgctgttggtttaccgcgacctgatggatccctccgacgacggctacaccaaggaggagcgggtgcgcaacaccggcgagtccctgttccccgacgaggcgtcggtggaggtgtacaccgacctgatgttcaacaacaagatcaaatccaacggcgtgtgccgcgtgggtctgcgggaggccatgatggaactggccggcagcttcatggacaacgccggcacccctcagtcgattctctccgaagccaagaaccggtatcaggccgtgattgacgacagctcctacacagcggtactcaacgagcaaaaatagcccgacagcttatagtccggacaggtacgccgccctcctccaaacggcggagggcggcgttttgctccgggaaacaattttggcggttttccttgcggccagcgacctctgaaagtaagcgattactagaaacgagttggatggtcggaaggaaaaccgcggaaaggcacggttccgatatgccgcgtaaaatgttgaccctgctgctcagcgccgcgctgctgctctccttgacgggaacggctttctccgccgcggcgcaagagaccgccgggcgcggggagaccgccccggccggcgacaacgccgaggtgaccggcgaggaaatcgccgcggcccccacctatacggcgtttctcaaagaccacaacatcacggatgaaaacgccgccccggccgccgggcaggccatccgcctggacagcggcatgctggcggcgggaacaggcaagtttacggccgggacggacagcgtcctgctggacgaggagggcagcctgacggtagccttccagggacagccggggctgtataatctggtcattgaatacgacccggtggcgggccgctcccgggatgtggagctgggcgtccgcctgggcggcaagctgcccttccaggaggcgggcagcctggtgctcacccgccgctggcgggacaagggtggaaaaattgagacggatctcaacggcaacgatatccggccctcccaggaggaaatcaccaaagaggaacgggattggctgacttatacagcggaggacagctccggctttcacacccgggccctgctgttccctatcgaggcagaaaacacgctgaccctgtatgcttcccgcgagagcgtacatatccgctccattaccttgcggccggccaccgagctgcccacctacgcccagtacaaggcgcagcacgcgggggcgaaggacgccaccgtttctctgccgctgatacaggcagagctgccggcgtggaagaacgacgccaccattgtggcggcctccgaccgggtatcgcccgccaccacccccttcaagggggcgaaaatcagcctgaacaacatcggcggcaacacctggtccagccctggcaaggaaatcgcctgggagttcacccccacccagacgggactgtatgaaatccggctgcgcacccggcagaactacaagcggggcttttacgccacccgcaccctgaaaatcaacggggaaatccccttcgcggaggcccaggacctgcgctttacctaccacaacggctggattatctacaccgtgtcggcgggggacgaggcctgcaagttctactttgaggcgggcaagacctacacgatgtccatgaccgtgaccttgggcgatttcggcgacaccttgggccgcacccaggaatcggtttcggtgctcaacgacatttatcgggagctgctgatgatcatcggctccacccccgacaccatgcgcgattacaacctggataagcagattcccgacaccatcgagcagatgctgacgcaggcggagaagctggaggccattgccagcgacatccaggaaatcgccggcttctccggcagcgagctggccagcctgcggaaaatggcgactcagctgcgggagttccataaggatccccgggaaatctccaagcggctgcggtatttcaaggacaacatcgccgccctcaacacctggatgctggatgccaagagcctgccgctggacgtggacacggtgaccatcgcagcccccagcgagcccctgcccaaggcggatgccaacttctttcaaatggcggggtacatgttccagatgttcgcggcgtcctttgtggaggactacaactccctgtccggcaccggcggagccaccgacacccagctgacggtgtggtccaccaccggccgggatcaggccaccatcctcaacgatctgatccgctccacctacaccccgaacagcaagctgaccgccggcaaaacggtgggggtcaacctgcaaatcgtgcaggcggacgccattctgccctctgtggcggcgggcaacgggccggacgtgctgatgcacgccgggatgcagctgcccatcaactacgccacccgtaaggcggcggtggatttgaagacggtggcggacgccgccgatttcgagaaggtgaccgcccgattccgggagagcgccctgacgcccttgagcttcaacggcggggtgtacggcctgccggagcaggagacctatccggtcatgttctatcgcacggacattctctccgagctggggatccctgcgccctccctggataacccctggacctgggaggacgtgatcaagtatctgccggtgctgcagaaaaagaacatgagcttcctgatggacaccggtacgagcgtgggcgccgacgtcagcgtgggcatgaccaccttcgccatgttcgtttaccagcggggcggccagttctataaggatgggggcatcgccaccgctctggacagcgaaaccgcggtggaggccttcaagttctggaccaagttctacaccagctacggcctgcccaccaacttcaacatcgccaaccgcttccgcaccggcgagtcccccatcgtcatcgccgacatgaccctgtacaaccagctgatcgtgtctgcccctgaaatcaaggggctgtggcagatgagcgtggtgcccggcaccaagaaggacgacgggacggtggatcactcggtgcgctcctcggtatcggcctgcatcatgctgtccaccgcgcaggacaaggcggcggcctgggacttcatgaaatggtggacggacaccgacacccaggtatcctattcgagagaaatggaaagcctgctgggcacctccgcccggtatccctccgccaacgtggaggctatgaagcagctgccctggtccacccgggacttcaaggtcttgcaggcccaggcggcctgggccaagggcgtgcccgaggtgcccggcagctactacaccccccggcacatcaacaacgctttccgggcggtgtgcatcaaggaggacgcggacgagccgcgggagaccatcctgcagtacgcccggatcatcaacgacgagatttacgacaagcggaccgagtttggcctgcccaccgaaaaacgataggaggtacgttcgatgtccctgcaaaccaacaagccccaaagccggctgggccgggtggggcgcaagctgtggcacgaccgggtatcctatgcgttcctgctgcctttcgcggcggtgtttatcaccttcacggtgctgccggtgctggccagcgttttctacagctttacctacaacaacattttcgagccggtgcgctgggtggggtttgaaaactacatccgcctgttcacccgggacgacgtgttcctgacggctttgcagaacaccctggtgttcgcggtcatcaccgggccgggcggatacctgctctccttcgtggtggcgtggctcatcaacgagctgtctcccttcctgcgcactctgttcgtgctgattttctattcgcccaccatcgccggatcggtttacgtcatcttcggcaccctgttttccggcgacatttacggctatgtcaacggcgcgctcatcaacctggggttcatcaccgaccccatcgaatggctgaccgatccccagtacatcaagatcgtcatcattttgtgcgtgctgtggggcagcatgggcgcgggcttcctgtccttcgtggccgggtttaaaaacatcgacaagcagttttacgaggcggccgccatcgacggcctgcgcaaccggtggcaggagctgtggtacgtgaccctgcccatgatgaagccgcagctgctgttcggcgcggtcatgagcatcaccagcgctttctccatccacgaggtcacggtggcgctcgcgggcttcccctccaccgaatatgccgcgcacaccatggtcaaccacatgtgggactacggctaccagcggtttgagatgggatacgcctccgccatagcggcggtgctcttcctgatgatgctcgtgtgccggaagctcatcaacctgctgctcgagcgggtcggccggtaggcaagcgaccccctgcttcgaatgagaatactgtgaatgaccggcaccgcgtgcgacaatcggtcgcaaggccgccggagaaatggagcccgacatggaagccaatgtgaaaaagcctcacccggcagggacggttttcggcacgatgggccgcggactggcccgcgcgggcagcgctgtctaccggtttttccgcaagctgctgggcgtgcggagtacccgcagcctggctggtgatatatgcaatatcctgtttctgaccattctggccattttcatggccatcccactggtttacgtggtctgcaacgcgttcaagcccatcgacgagctgtacctttcgccgccccggttcttcgtgcagaacccgacgctggacaatctgaaggacctgatgacggtgatgaacaactcctgggtgcccatcacccggtatttcttcaacaccctgttcatcacggtggcgggcaccggcctgcacgtgattttcgcctccatggcggcttacgtgttggaaaagcaccggttttacgggcggaacgcctttttcggcctggtggtcatgaccctgatgttttccccgacggtcacctccatccccaacttcgtcatcatgtcgggcatcgggttcgtggacacctatctcgcgctaatcatcccggccatcggctcgtccctggggctgttcctgatgaagcagttcatggtgacggtgcacgactccatcctggaggcggccaagatcgacggggcgggagagctgcggatcttctttaaaatcgtcatgcccacggtcaagccggcgtggctgaccctcatcatcttctcgtcccagaccctgtggaactccacgggcggcgtgctcatccgcagcgaggagctcaagcccctgccctacgccctcaaccagatcatggcgggcggcttcgcccgggcgggcgcggcctcggcggtgggactcatcctgatgagcgtgccgattttgatttttattttcagccagagccaaattctggacaccatgtccacgtcgggcatcaaggaataggaggaatgaccgatgagtaaactagcggctttcctccgcaggggggcgcccgccgccctggcggcgctgctgcttctgggagccgttcccgcggcggcggaggaggccggcgccaaggtatacgcgccggagctgtccttccgcagctacacctacagccggtggggggatccgatcgcctgccccgatccgtacacggtggaaaaggtggtcaccggcgtggacttgggcgtcggcgattttaaaaagcccaacgatatgtttgcctccgcggacggctatctgtacatcgcggccagcggcgacaccgcagccgacaaccgggtggtcaagctggacaaaaacctgcaggtggtcggcagcttcagcggctacatcgacgcggacggccagacggtggcctttaaagagcctcttggcgttttcatcacggcggaaaacgatatctatgtggcggacggcacctccaagcagatcatccacatggacgcggccggcaagctcaagagaatcatcgccgccccgtcgagcgaagacagcgccatcatcgacgccgatttcgtggaacgctaccggccgtccaagctggtggtggattcctcagggcggatccatgtggtggctatcaacgtcaacgagggcatcgtggagtttgacccggacggcaagttcgagggcttcctcgccgccggcaaggtcaacgccaaccccatcgaggtcatctggaaaaagctgtccacccaggcgcagctggaacggatgtccgatttcgtgcccattgaatacaacaacgtgtccctggacgatgaggactttattttcgccacctccgccgccatcgacggaaaggtggtggtttccgagctgcgcagcggcaagggcaccgagcagggcgcgctggtgcgccggctgaacatgctgggcaaggacatcctgcggcgcaagggcttcggcccgccgtcgggcgaccgggaatttgtgggggacacggacaacatcgattctccttacatcggcacatccaaattcgtggacgtggccaacgggccggacggcacctacacggtgctggacagcacccgcagccggctgttcacctacgattccgaggggtatctgctgtacgccttcggcgggccggacgtgacggcgggagggttccgcaccccggcgtccttggcgcagctggacgactgcctgtatgtgctgggcagcaacacccgggccatcaccatgttccggcgcaccggcttcggcgacacggtggccgaggccatcgcctggcaggaaggcggcgactataaaaagtccgccgagctgtggagtgaggcgcttacgcagaatgccaactacgacatggcgtattcgggactgggcaaggcctcctaccgggacggcgattataaagaagccatggggctgttcaagctgggcaacaacaccgactggtattcgcgggcttacaaggaataccgcaagaccgtggtggccaagtggtttgcgcccgccgccgtggcggtggcggtgctggcggtcggcatcctggccgccgtgaagatacgaaccaaacggaaaaccggcagctggagagggaggaggaatgacccttgaagaagataggaaaagggctgcgctactccttcaccatcatgacccatcccatccggggcttctatgaaatgcggtttgaaaaccagggcaacgtggtttcctgcctgctgctgctggtgctgctggtgctggccttcatctgccagagccagtataccggattcattttcaacgaggtcaacctgaaggaattcaacgtcatccggcaaatctgcggcgtggtgataccggtcttgctctggtgcgtggccaactggtccatcaccgtcctgatggacggggagggccgattcgtggatattttcatggcgacctgctacgcgacggtgccctacaccatcgccactttcattggggtgattatgagccgtttcatgacggcggacgaaagcaccttcatcggcatcgtcaccggcctgggtgtggcgttcacggcgctgctgctgttctgcggcatcctgaccgttcaccagttcacggtgaccaaaaacgtattttccatcattctgaccgtggcgggcatggctttcatcgttttcctggcgctgctgttcgccagcatattcgacaagctgttcagctatgtggccggaatctttaccgaaattcagctgaggatgtgacgacatgcgaaccaatcgaattttccgtgcgcttgccgttcttctggcggctgtgacggtactgtctttcgcgggctgcggcgagatggcgcttctattcaccgagctgccagcggcggatgtacagcaatggaagaccggcgatcccatcacccagaccaaggagatgctggggctcgagaaaatgaagcaggtggcctcccaaggcgggctgaccctgtatatgaacgagaaaaccaccgagatcgccgtcaagaccgccgacgggacggtgtggttctccaacccgcagaaccggctggatctcaacgcgtcctccctggggcggtattcctcaccgctgctggtcacggccattgattcggccgagacctccaagcagatgaacgcctttgacgacagcgtcaaatacgggcagtacaccatccagtccatccagaacggcgtgcgggtggaataccatttcggccaggtggtcaagacgccgctgtatccccaggtgctgaccaaggagcggttcgacgagctgctcgaggggctgaccaaggcggaacagaacaacatgaagcggtactacctcgaggtcaattacgacacggtgaccgatcagcaggcgctgaaaaacctcgaggagcaatacacgaagatcaaagaagtccagcacatctacgcgctcaagcaatcgccgtcggcgctggaaaccaaccggattacggcgtatttcaccaagctggcatacacccaggagatgcgggacgcggatcacgcggccgtaggatataccgacccggacaaggccaagggcaacttcctgctgccggtggagtacaccctggccgacgggaggctgaatgttcgcattccggtggcggatatccgggtgacgtccaacctgaagctggacacggtgacgctgctgccctttatgaacacggccgctgggctgaccaacagccaggcggtggtgcccgacgggtcgggtgctatcatccatctaagccaggtgcgatccggcaacacggcggagtacgccgaagggttctacgggcgggattacgccctgtaccagctgtcccaggcggcggtgaaaaagaatctgtacctgccggtatacggcatcaccgccgaggagggcgccatgctggccgtcatcggccaggcggatgccacggcgtcgctgtacgcggcggcccggggctccgaacaggatatcggggccatcggcgcccggttcaagctgctggattacgcccaggtgaagctgacgaacaccgacaccaacacggtcaacagctaccctgacaagtccatcgaggacgacatcgcggtggattacaccttcctggacaagagccggaaccaatggacggacgtggcggcgacctaccggatccgcctgcagaaggaaggcaagctgacgggcagcgccggcgccactctgccggtgatggtcaacctggtgggggccatcgatgataaggcgccggtgttgggcattccgagggagatcctgcggccgctgaccaccttttcccaggcgggggacatcgccgaccggctggccgaagccttcggcggcgaccggctggtcatccggtattccggatggcgcaagggagggctgaagtcctcggtactgaccggatttgacccggagggcaagctgggcggagcaaaagggcttggggccctggctgacaagctgcagggcatgaatgcccggctgttccccgacgcggatttccagtacgtctaccgcgacaagctgttcgacggtttcagctcgtccaaagacgtggtgcggttcatcaccagcgaatcggcttacaagcccgcctacaataaggccacctttgttcccgacgcggatgggctgtttggatatattctagagcccacccggatggcggggcacgtggacagcttcttgaaggcagtcaaggacaaggggctcagcgggttcagcctgccgtacatcggggcggatctgtccagcaacttcaataaggacgccttcatgacccgcaacgcggccgccgcctattcagtggaggtcatgcagaagctgcgggacgcgggctacggaattctctccaccggggtcaacgcctacgcgctgcccctgctcgacgtggcggtggcgattcccaccgactgcaacacccatccgatgctcagccggtcggtgccctttacccagatggtgctgtccggcagcgtccagtatgccgccgaggagcttaaccgggcggcggacgaccggtactacctgctcaagtgcatcgagaccggttcggccatgtatgtgtcggccatcgcggccgccaattcggaggtcaaggacacggcgtacgacgagcttttcgccgtcaacttcgatacgctggagccgtggatcaaggaagtgggcagccagctcatcgaggcgctctcgccggtttacggccgcgccatggtggggcacacgcagctgaccgacggggtcgtgcgggtggattacgagggcggcaagagcctgtatatcaactataaccaatcggaggcggccaccgacgcgggcaccgtgcccgcggccggctggctcctggcagagaaggagggctgaacatgggcaaggagaagaaaagcgccgggcggcggcgttccgacctgatgaccaggcggaaccgcaccggttatgtgttcatcgccccgtttctggtgggatttgccgcgtttatgctcatcccgctcattcagtcttttattttcagcttcaacgacattaaaatcgtggaaaacgggtacacgctggtacccaaggggctttacaactaccagtacattctcaccatcgacaccgatttccggcagcggatcgtcaactccttcatcatgactctgcgggacaccatcgtcgtggtgccgttcagcttcttctcggcgctgattctcagcaaggaattccacggacgcacctttgcgcgggccatctttttcctgccggtcatcgtgtccaccggcgtgctggcgaccatggattccaacagcgtcatcagcatgatgatggaccgggacaccgcctcggcggccaacagcatgcagcagacgttttcggcttcggggcttatcaccacgctgtttgccgacagcctgcccacggagatggtggatttcatcagcaccgccacggcgggaatttacgacatcatcatcaagtcgggcctgcagatcatcatcttcatcggcggcctgaacaccatctcgccgtccctgttcgagtcctccaacatcgagggggccaccgcatgggtgaatttctggaaaatcacgttccccatgtgcgggccgtacatcctgctcaacgtggtgtacaccatcatcgactctttcaccaacctgagcaatccgctgatagccagaatccgcagcgacctgatggggctgaaaaatttcggcgtcgcgtccagcgcggcctgggtgtacttcatcgcgatattcgcggtgctgggcatcgtgttcgccgtgctgcagaggagggtgttctatcatgaataacagcctgtccaccccccgcatccgcaatccgaggcttcgcaagctgctcagcaagaagacggcggcgaaatggatgctggccctgttccgcacggtgttcatcgtcggtatttgctttaccatcctgtatcccctgctgaccaagatttccatgtccttcatggacgagaccgacctgtatgaccggacggttaaggtcatcgccaagcatttcaccccggaaaactacctggaggccgccacctatatcaactacggcaagctgctgctcaacacggtggggctgtgcacggtggtgtctctgctgcaggcgctgtcctgcacggtggtgggatacgggttcgcccggttccacttcaaagggcgggggattctgttcgccctggtggtgctgtgtatggtggtgcccacccaggttattctgaccccgcaatacctcaatttcaaggccatgggcatgctgggcagcttcgcgccgttcatcgccctggggctgaccggggtggccccacgctgcgggctgtatattttcctggcccgccagttcttccggggggtgccgcgggagatcgacgaggcggcggccatcgacggcgccggaccctacaagaccttcacttccatcatgctcaaaagcgccatcccgattatggtgaccattttcctcttctcctttgtctggcagtggggggaaaacacctacaccaacctgttctacagcagcttccagaccattgccaaaacgctggacagcctggggtacgccctggcggacatccagcagagcagcggcagcgttgtatccctggccgctcagatggcctatcagtccatcctgcgggcgacggccaccctcctggcgattatcccgctgctggttctctatgtattctgccagaagttcttcatccagtcggtggaacgcaccggtatcgtggggtgatgaccgctatgaaagggaggaaacggccatgcgtaagcgaatgctgtgcgggacgctggcgaccgcgctcgtcatgacggcggcggggtgcgcggcggatcccctggcgcaggatcggctgcctgaaaagaaggaggaaacgccggtacagcgcagcgagacctatccagagctctggcaggaggatgggtcgctgttcgacgatttcaccaacggcgtgaatccggagatctggacggtgccggacaccaaatggggctacgacaaccggggagtgaccagccggaacgtcagctacaccaaggacggcatactggtgctggccgccaacggcgacctgtacaagggcgacatcatggggatgagcgacgggggccagccggccaccaccggcacgcgcaccggcgccatcgtgcgcagccattactatttcggccccggcagctacgaggtgaaaatgaaggtgatgccccggttcggcgggtgcagcgccatttggacctttttcaacgatgggagccggaaccatgagatcgatatcgagctgcccggacccagcaagtacagcttcgactatgccggcatgaccaactatatcaccgaggagaagatggactcggtgaagaccaagaccatcgccaacaacgacggcgaatggcatacctaccgcttcgactggcacaccgatccggcggatccgcgcatcgattactacatcgatggggaaaagctggtcaccagccgccggaatattcccaccgtcaaaggctatttcaccatcggggtatggttcccgaaggggtgggccggcgtggcggatttcgagcgcaattacatgtatgtggactggttccggttcaccccctacgacgaaacggggtgggaggccaatccacgggaaaacctggagttcgacatggaggggctggagcacacctatccttcccaaacctctccgctgccggtcaacaatttctttgcaaacggaagctttgaggacgggctcgagggctggacggcggagggggaggcggcagcctccacggagcacgccaccgacggcaagggcagcgcggccatcggcaagggcggcagcctggcccagctggtttccggtatctcgtccaaggtgaagtacaccctgacggtcaacaccaaaaactccaccaaaaaggcggacgcggtgttggaggtggagtacaccgacgcctttggcaattccctgctggaaaaatcggtggtgaccgaaaagctggagaacaccggcacctggcagcataccctgccattgaccccgccctcccaggcgaaaaaggtgcgggtcaccctgcgcaacaacggcggcggcaccctgtgggccgacgaggcggtgctggttccggccggcccggccgagggttgatacggtttcataggataggggaaatctccgataaattatgcaaagagaaccccccgcgaccgtgcgataataaacttgtaacccgatgaaaaaggaggaacagcagctatgaaaaccactctgcttcgaaagggagccgttgtgtttctgtcactcttgacgacggccagtctgatggcgattcccacagcggccgccccgctggaaaaggatccgcccaagggctacgcgaccaaggttcccggaaagaatgacgccggggtactaacctatcaggactttgagtcggatacgctgaacgacgagggcatgattggaaaattctccgccaccgagccggacgatacttccatttcgccggccaaaatcgaggtggtcagcaatgtggcccattccggcaaaaaggcgctgaaggtttccgcccgcggcaagagcgcggatggcagcccgatgggctacaacaccttgacctataaagacattggcattgatattgccgaaaagttcgtcaaggatgcttccaacaacaagaagaccgacacgtattttatttccgcctgggtccgcaatgtggatccttcgatcacccagtatttctggctgcagctgcaatatggcggttcggctgaggtgtggctgcctggtcagacctatttcgaggtcaagggcgacgcctggacccaaatcggcatcgcggtcgtggacggcaagacctattacgtccccttcattgaggacaccaccaaatcgggtatttacgcgccccgcaacggcgtgtccacctggtcggccctaaagtttattaccaagaatcccaaggtcaatcccacggacaccaatgagaaagtcgtgcagaccaacggcgatttctatgtggatgatattgtgatttggaaagtggacgacgcgtcccagctggttaaagagttgccgcagcccagcagcggcaccaccacccagaagccggtgaataccaccaccatctccaagggcggtggagccaccaaggacgagtcctccagcaccaccctggcccctgcggacagcagcgcgcccaccgacaccaccgtttccacacaggagggcgccaccacggccccgaccaatgaggcctccagcggctcggcgacaaccaccgcgccggagaacaaggaggacggcggcggactgggcgtgggcgccatcgtcggcatcgtcgtcgcggcggtcgtggttctgggcggcggcggattcgctctctactggttcaagttccgcaagcactaatcggcaagaaccggccggccgccgacgctccatgtgggcgccggcgagccgccggtaagaaataggaaacacaagtaaggaggattatggatgaaacgatttttgagcgtggccctgtccgcggcgctgctgtgcggcggcctggcggtcaccggcgtttcggcagaggacacggccaaggtgcggcctacggttactctggtggaaagcgggttcgagaatgggatggacgcgccgttctctgcgaatgagagcgacgccggcaagaaagccaccattacgccggtgtccatcgccgattcggtcaatgcctatctgcaccttaccgatcgagaggcaaataagcgcagcgcgacggtgatgcagaatgtcaaggaacagctgaaggccaacggcgccgcgggtaaatattatatcagcgcgcgtatcaagttggacaatccggatgaaaccgcgtatttcgttccgtttattcagggctctggcgggatgcagcttcagaccggaggcggtacacgcttcgccgtaacggatgaatggacgactatcgggaaaaaacgggatggctcctacatggatttttccctggttaacggcgcctttgatccggcggctttaacctgggccaagttctatttcctggcgttcaccacggaaagtggggcgcagacgccctatgacggcgggtattccatcgacgacgtgacgctctggttcgttcccaacgacggggcgccggcttccgtcacggaaatcggaaccaacatccttaaagacggcgatttcaacgccaaagtcgaggatgccaattattacaatacccagaaggccgaaggcgatgcctggtatgtggccaccagcaatgatgccgccaccggtgagcccctggttgccgccacggtggaaaaggaaaccctgtccgctgtggacacgacgatcgtgcataacggcaccggcgccctgcatattaccaatcgccccggcgtacagcagagcatcgcggttgatttgaaagatgtcgtaaacagcgttggcaagctgagcaaagacgagcattattatatctctgtgtgggtgcgcgcggagacgggcaccatcaaggtgcagcccattttcggctgcagcctcagcgccaccatgggcaacggctatattctgccccgcagcggcggttatgtggaggtcggcgaagagtggaccgaggttggcattgatgtaccgggtgagtatttgcccttcctgattaacggcagtgccgacgcgggtaacttcgatcccttcggcgccacttgggcgtccatccgtctggctaccgaagacacggccaatttctatgtggatgatttcaaagttatgggcccgcggcccgtggctgacgccgtggcggcgtttgtcaaagccgttgaggatctgccggcggcggatgcgattacccgcggcgacgaggtggccatcacggcggcggaatccctgtatgaaggtctgaatttggattcgctttccgctgagcagaaagcgactgtcgcggccgccaaaaccaagctggacgcggctcgcgcggcttttgacgcgctgcccccggaaaaaaatgcgtttgttccggaattcaagtatgagaataaggctaatttgattgctccctatggcgatctggaaagcttcactgccaacgattacatctggtctgaggccgacgttgagggtgggcatcccaagtacaccctgattaccgacaaaaatatcgcgcatggcggtaacaactgcctgctgatttcggatcgaaccagtaagtacaatgcggcggctttcaccttgaccgaggttatcaagagccagggaggcggcaaatactatttctccgcctggctgcgtaccaagaaccccggcgacgtgatgaccgtgacccctcagctgtatatcagcgctctgggagatccggccggcgtgtatgaagcggaacctgtcgagatcacgaatgagtggacctttgtcggcgttgcctacgacgatctggacggctatctgcagtatcaaggcaatgagattccggagtatacgcagggctatatttctctgcgatttcgcggccagaacgaactctgggagagtgacgcggacggcgctgcgttccccgactactacatcgacgatctgaagttctggaaagcctttgacggccaggaagactatgaggatcccgacaatcccaagcccgctcccactccctccgaacctggcgacaatagctccaccggtggcgacaacagctccaccagcggggacaatggcaacccctctaaccccacgaccggacacagcctgcctctggcgctgccggtgctgggcgtgttggccctgggcggcgtgctgctgacccgtaagcgcaagtaatcaaggcaatgttccctgtgtccggggcggcccatgaggccgtcccggactctgggatcgggcccgcgatagtcagaaaggcgtgaacaagacgatgacagaccaaccgtatctgaatttaggacgtccgctgggctcctgggtctggaatgtttcctattatgtagtcaatcccgacgagctgttccggttctgccggaaaaaccacgtgaccgagctgtatttttccatcaaccgggacgtaaccgacgcccggtacgcggatcttatccggcactgcgccgcgtatggcatccgtgccgctgctctgtcgggcgatccggtctggattatgccggataaacggcggccgtatcaggagtacctggagcgggtggacgccatcaatgctctgtgcggagacggccctcagttttactctctccatctggacgtggagccccacgtactgccggaggtcaagcgggacggcatggaaggctacataccccgctttgtggagcttatccgggacgccagggcgcaggcggataagcgcggcttgcagctggaatgggatattcccgcctggttcggcaaattccatgacgcagaaaacgattgctctctgaccgaaaccattttccattactgcgaagcagtggggatcatggcgtacagcgacacggccgaggggcagtaccgtgtggtgatgcccaatgtggaaatcgccaagaagactggcaagcatctgatgatcggctgcgagaccatggatctggacgaggcgcgccgggaggacggcaactgcgcgatttcctattttgaggaaggcaaaatctacatgtacaagtgcttgcagaccattatgcgggacgtggcggaaacctatgatgcgttcggcttcgccatccatgatgtgaagcgctggatcgccctgcagccccacgtactcccgaaatacgcggaggtgtatggcaaatgaacgcattaaaaaacgccgctcggctggcggctatggccgcgagtgcatcggcgggagaattggacgccgccgccctgcccgggcgggcctggttcgccggagacaaggagatctttacccgtccgcgggacgacggggactgccggtatccttatggcagcgacggcttcaatttctgggcgtacacctccgggtatatgcacagcaacgagggcattttctccccttttctgcgcagcgccgaggggcaggagcccaagctgtgctggtttgcgggcttcccgaccgaggcgggcaataaaattgtccctctgctggcggtgccggaaacggaggacgacgcggtgcggtataccgtgttcaacaaatcctttgtgacctatatgtgcgaggccgagggactgcgcttgagcgtgcgcgtgtatgtgaccggtgaccgaaccactcgtttcacgctgggggtagaaaatttaactgaaaaagaaatcgatttctttatttcctcctactgcaacccctttttgctgcacgatgtgtttgaaaacggggaaaaccgttggttccgcgaggtgagcgtggcggcgggcgagagcctgcctgatttcgtggtgcggtgcaacgagagcatcagccgcacccggcaggtttccaactacggcgtgctgacccggacgctgaccctgaacggcggcgcggcgctgaaggggcatgaggagaccacctcccgggccgcttatgtgggcggcgcccgttcgagcctgcatcatccccggggcgtgctggccggcaccttcggtgcggcgccgacggtcaccaccttcaccgaggtggggatctgcggggacatcctgcgcctgaccatgccggccggggcctcccttcgggtggacagcgccttcgcttaccgcgtccactgtgagaatggcggagcggtggaagagctgcgggccctgcggcccgctcccgccgctttcgacgcggatttggccgctctgatacaggccgaggaggccaaaagcggcggcttgaccatgaccttcgaggacgggaaggaagacagcctgtccgccgaagtgatgaacgcgtttgtcgaacagctcaagaagcaggtggagttttgcgccaccatcaagggctatattcagctcagcgccggatcgctcatcggcatccgggacgtgttccaggcgctggagggctatatgatttggcagcccgaggcggcccgcgccaagatgcttgaagcgctcagcttcaccgatccctccgggcggtgccctcgccaatacgcgctgccggtgcgggagggcgcggcgcccgccatggatctgcgccccttcatcgatcagggtgtgtgggtgatttccaccatcgtgacctatctcaagctgaccggggacttcggcttcttgggcgaggtctgcgggtactatgaaatcgtggacgaaaaaaagcggctggtcaaaaagagcgaggagcaggatacggttctcgatcacatgctgcggatcatgaactggctgttggacaagaccgatccgcgaaccggctgcatccgggtgctgttcggcgattggaacgacgcgctggacgggctgggaaccagccgggatccggacaaggaatacggcagcggcgtgtcggtgatggccgcgtcccaggtatggcagaacctcaacgagatgatggccctgctctccctgctcaacgcggacaaatactcggacaccatcaccgactattccgaaagggccgaccggctggccgccgggctgcagaaatacggcatcgtgtacaacgacgagggacaggcccgcatcagccacggctggggcgacgagttgtcttatcacgtgggcggctggaacgacccggacggggtggccagacgcagcctgacctccaacgcgttctgggtgctcagcggcctgtacgatcgggataccggtctgcgcggcgttatcgagaaggacatcctggcgctggattccaaatacggcctgcgcaccttcgagcctcattttgaaccggacgccaagggtgtgggacggatcccgaagttgcccgccggcacggcggaaaacggcgcgccgtatatccacgcgtcggtgttcggcgtgatggccctgttccgtatgggcagccccgaggcggcctggcaggagctgatcaagtccctgcccatgacgcacgacaccatttcggtgtccccgtacgtcatgcccaactcgtacggctataacccggagaagaatgtggacggccagtccatgatggactggcagacgggcagctccaacgtgaccctcaagctgcttgtccggtttgtggcgggcgtccgccccgaatacgacggcgtgtgggtgcagcccgccgcctactgccccttcggagctttcacggcggaggtgccggtgaagggcgcggtggtgcgcatccggtacaagcagaccggggccgggaaacgtcggtttacagtggacggcgagcccgcggagggccggtataacgacatcctgaaggcacagcgcctgtggattccggccaaccgcctcaagggaacgatcgaggtcacggtggaagactgacgacggcatagaaaggagaaggcacatgataggatttggaacgggcggctggcgtgccgtaatcggggaagagttca

SEQ ID NO: 633 - DNA, 15402 bp, Unknown
  16S sequences of unknown bacteria
tgaaaaatcggggatgcttcgcctttggccgcagattcaccagacagacggctttttcatttgtgccatggagaaaataagttgaagttatacgattatacatacgaacagattcaagcactgttgctgtcatggaacgagcctgcattccgggcaaaacagatttttgcatggtgtgctaagggcgcgcctgtcgagcagatgcataacattcccaaagctttgcggcaaaagctggcgtcgctgagccttggcggtatgcgaattgagcagacgcatagatccgcagacggtaccaaaaagtttttgtttcgatgtgaagatgggaacgcagtggaaggcgtgttgatgaaaaatcatcacggtggaacgctttgtatttccacacaggccggttgtcggatgggatgtgcgttttgcgctagtacacagctgggacttgcgcgcaaccttaccattggagagctgtgtggacagctttatgccgttcgccgacaagagggagaggacagctttacccacgtcgtattgatgggctgcggagagcctttggataactatgaaaacgtcgttgcttttttgcgaatcgtatcggatgatagggggatgggtctatctcttcgccatgtctcgctttctacctgtgggctggtgccccaaattgataggttggcagaggagcagctgcccattaccctatgtttaagtctgcatgcgccaaacgatgaaatacggcgtagtatcatgccgatctccaagcggtattccatcgaggagaccatcgcggcgatgaagcggtacgaagaaaagacctcgagacgggtggcatttgaatatacgctcatcaacggcgtgaacgacggcctatcacatgcaaaagaattggcgtatttgacaaagggcatccgaaagcatatcaatttgatcccgctaaaccagggcgttggtgcttttcagccgccttccagagcaaaggtgcaagcatttttgaaagtgctgacggatcttggtgtttctgccactgtgagaaggcgccaaggggatgatgtggcaggggcatgcggccagcttcggctgcaaagacaacgagaggagcaggcatatgattgaatatttcgcacagagccatgtgggcctggtccgtaaaggaaacgaagattcctattatgcgccgtcgcaaagccgtccgaaagacccgcagttttttctttgtgtagcggacggcctgggaggccataatgcaggggagatcgccagccagctagcagtgcgtaccatggttacttctatgcagaccatggaaggcaaaaatcagatgctggatcatccctttgaaacgatgcaaaggctgttttttgaggccaatgataagatccatatgctgtctacagaaagtgaaaagatgtatggaatgggaaccaccctaacagcagcagtttgtaaaaagcatatggtttgtattgcccatgtaggtgacagccgggcctatctattcaatgaagatgggcttgtgcagattacgacagatcatacctttgtgcagacgctcatccaaagcggtcagctgacggaaaaagcggcgctgacccatccatatagacatgttatcacgcgggctgtgggcatcgagcaatttttggaagttgattttttcgaagccgactggaagcttggcgatacgctgctgttatgcagcgatggacttaccaatatggtcagcgacgaggagattgcggatattttcaatcataaaaactcgttggaagatcagggcagcgctctactgggtttggctctggagcatggtggcaaggacaacattacgatatgcttggccaggagagagggggattcaaaatgagtcagcttctttcaaaccgatatcttttggaagagaaaatcgggtcgggcgggatggcgtttatctatcgggctcgcgatctgcaaacaaagcaaacggtggcaatcaaagtgctgcgtgaagaatataccaaagataccgaatttgtttcacggtttgatcgtgaagcaaaggctatgcagcgtgtgcgccataataacattgttgaggtttatgccgtaggcaatgattacggcatcccctatatcgtgatggagtatatcgatgggcctacgctgaaggatatcctacggatgaggggtaagctgcccgtgcgccagtgcattcagattatgctcaatctctgcgaagcgatccaaaccgcccatgataacggcgtaattcatagagacttgaagccgcataacattctcgttacgccggaaggagaagtaaagatcacggattttggcattgccaaatttgtgggatcctccaccatgacaatgggaagcgacaatgttttggggtctgtgcattatattgcaccggagcaggccagcggcggggaaacggatgagaaaaccgatgtatattccctgggaataacaatgtatgaaatgctgacagggcgcctcccgtttgaaggggatacgacggtttctgtggcaatcaagcatatacaggaatctgtcccttctccgcaaagcaaaaacccagaaatatcccatagcctgtccgcctgcgtcatgaaagcatgtgccaaagatccgaatgtgcgctatcagacgccgggtgactttgccagggatttggtacgcgctatgaacgatcctgacggcacttttgcagacctccctcgcgacacccaagagatgccctaccaggcgccgccagctagacggcggaacgatagaagcatagaaagcaatcgaaaaaccaaaaaaaatatccacaggatcttatgggtgctcttgggctgcatcgtggttttggttacactgtttatgattggacgggccatttggcagtcctccaatgatgatatgattgcaatgcctgatctgcggggcaaaacaagcgccgaagcacaatccgcgctcagtgatcttggattatccatttcctttagctaccaaatcaatgatgatgtgccggaggatgtggtgtatgggcagtccatttcaccgcaaacgatggtcaaccccaaaacgctggtcacgatctatgtaagcgatgggccggaaaaaataagcgttccttctgtgcaaggaatgacattggatgaagcgactagaaggctcagcgaagccggacttacgccgggtataatcaattatcagttttccgcgaccgaagcggacggtactgtcatacgacaggtaccggctgctgatgagctggtggctaaggagtcggaagtcaatttggtcattgcaacttcgactgcgccttctacaccgcagccaggagtatagatgaaaacaggaacgatcttaaaaggtatcggcggttattataccgttcaatacgaaggaaataaacagtgcgtacttaggcccagaggaaaattccgccataaagaggagcgccctctaccgggcgatcgtgtgcgttttgatgtgccgccgcctgggacggaaggcttctttgaggagattttgcaaagaaagaatcaaatgctgcggcccgctgtagccaatgtggacgaggtttgggcagtgatttgcatgcagaaaccggccggtgatttcttgcttttggataagctgttggcaaattgccgcagggaaagcattccagtgcgcgctgttctcaataaatgtgacttggcttccgaggagcaaaagcagcgttttcgcaaaagctattgccggtatagtccgctcttggtttccacccatactggagagggaatagaagcgctgacaaacgcattttcgcgaaagatcatttgcttatcggggcaaagcggagtgggaaagaccagcattacaaacgcgcttttgcctggcacatcctacgagacaggggagcttagcaaaaaaacaagccgtggcaggcatacaacgcgccatgcagaactgctctgcggtcctcatggcagtatgatcgtggataccccaggttttagcttgatggatctgccgctcatggcccctgaaatgcttagagacctatacccggaatatgatgattatgccaatcgatgtaaatttgatatgtgcgtgcatcaaaatgagcccggttgtgcggtcaaacaagcggtagaacaaggcagcatagacacggacagataccaccggtatctacaaatattgcagcaagtacaagaaaaatggaggaaacgatatgaatagaattttggtgagtccgtccatcctatccgcagatttttcctgcctgggcatggaagtagcctctctagagcaggctggtgcggattggatccacgtagatatcatggatgggcattttgtgccgaatatctcatttggtcctgatgtggtagcagcttttcgcccgcatactgatttgccactggatgtacatctgatggtggaagatgccattcggtttattccggcctttgccaaggctggcgcggatatcattaccgtgcatatggaggcagagcaggatgtacagaagagcgtagatttgatccatcgtcttgggctgaaagcgggcgttgcaatttcgcccggaaccccggaattgattttgatgaatatgcttacacaagtagaaatggtgctggtcatgacggtagagcctggctttggagggcaaagatttatgccggatgttgccaaaaaggtacgcgcgatccggcaaatgcaggttaatccttctctgcatatcggggtagacggcggcatcaacttggataatgtaaaaagtgttatacgagatggagcggatgtcatcattgcgggtagtgccgtattcaatgcaaagagcagggcgttggccatcaacgcgttgaggcggggatgaacgggctgatctataccggcggagattggccggatcttgctacggcaaagatgttgtctgaaagagcggatttgtccatctgctgtgatggggctgcagaagaggcctatcgttacggccttccttttcaaactctggtaggagatatggattctatccggccggatcttttagagggttaccaaaatacatacgaggggctggaaatcatccagctttccgttgaaaaggactggacggatacggaatacgccgtttcgcatgccttggatcgcgggtgtacgcatattaccttctgcggagggctggggaaaaggatggatcattccttagggcagctacaaattttgtacggcctttgtaaacggggcattccgcatacgctatatagcaaagatatgtttgcctgtatgatcaacggcgaatattcgttgaaaacatttccacagcaaacattttctctcttgccgtttgcacaaaattgttgtataacgattgaagaagcaaaatatcctttatatcatcagcctttgcccctggggaagacattgggcatcagtaaccaagctttgggagagcaggtttctattcaagtgcatgaaggcatcgtattattgattgcattgcagtccgtataaaagaggactttatcactttctataaaggcggcgtagttatggcagtagaaatttgggctcatagaggcaatagttttcaatttccggaaaacacgatggaggcgtttgcgtcggcgctggcgctaggggcagacggcttggagcttgatgtgcattttaccagcgatcaacagattgtggttacccatgatgagagcatcgagagagtctcaaatggctgtggccgcgtcgttgaccaaacattggcccagttgcgcagctataattttcataaaacaaaaccggaatcggtacaaatggcaaagattccgctcttggctgaagtactggaactggtaaagcctacgcaggctatgatcaatattgaaattaaatccggtattgtgttgtacgagggcatagaaaaggccgtttgggctcttgttcgtgactttggcatgcaagaccgtgttctatattcttcttttaatcatttttcactcactaccttaaaacaaattgattcacatacaaaaatcggattgttgtactctgaagcgatggtggatcccgctctttatgcaaagcatgtacaggcagaggcgatccatccctttttcccgacctgttttgcgccgggcgttatggagggctgcggggtagaacatatcgatgtaaatccatggacggtggacgacgctgaaatgatgcgatccttgcaaaagcttggcgtccacgcgatcattacaaacgatccttctttggcgttatccgttttgcgttaatttctagaaccaaaaacaaagaaagacgaaacactatataatattgattcgtataatattatatagtattatataaatactcagaagatctggtatttggtcttctgtatataaattttaggaggtagttttatgggaaagagggaactgacggaagatcagcgctatgacaggaaaatcagggttgcattttcctgggttagcatcttgtttgaaacggcgattacaacctcggctttcaatacgttgttgctgcaaaaagagggatttagcagcacacaggtcggcgttattttggctgttttttctattatagggatcatagcaccgcctttttggggatatttggcggatcgaatccggtctattcccaaggcatttatcattgtgttgtgtattcaaggtgtcgttgttacctttttaccaatgagcggtgggatcaaaatcggcggactctcgttgttggcaatctccatgccgctgtccaattttgtgcgccaacctacattatccctggtagacgcctggatggttcaagctgtaaatacgactgaaggacgagtcgcttatggttctgttcgcctctggggctcggtcggttgggctgtagcttgtctgattatgacaaagattgcggactggacaagtgttgttgtccccttctatttatgtgggctcatctgtatatccgtggcgttctggtattccgtgttggtcaaaaaactgccgctgcgccagcctgaagaggaaaatgcagagccggtagatcacatcaatccatttgtattgttcaaaaattattatttcgtttggattttaatatttaatttaatcttgacgatctcctccaacgcttccttcaactttattccgtatatgtttaccgaaatcggggccgatccaaacctaggcgcagcatcggtaggggtaaaggcattgatggaagtaccgttgatgtttgctggcgtctatttggcccgcaggtttagcatgccttccatgatcgcaacggtagggctgatgtactttgtggagcagtcgctgtattctctggcatcaagtgctacgatgattattggtgttcagctgatccaagggttagcctatggcctgtatgtatcctgctcggtggactatgcttacaagctggcgccaaaatccttaacggcttccgctcaatctttcatgtggatgtccaatgcggtcggaacggtactgagcaacctgatgggagggtggctgatcagcgtaattggcgccggtggcctttatcggtttaactcctttgttgttttggcagggtttgtccttttcgtgctctctttcccctttggggaaaaggtattgaagatccctcgcccggcagcggctctatccccgcgtaaaagagcacggatggagcaggaataaaacaagagattggcttatatatatctcatctaaaagataaaacattcgcatatggttgtttcaaaggttctttttgtttgtactttgccgcggagtaggggctgcggttatattggggggcattttctatggagcaacaaccgaccttagccgaagagatacggcttcggaaacggatacaaatcggcttttctactgttatcggcctgttttggatggggatggcttcttcggcctataatgttcttttgctggatagccagaacttttcaaccgctgaggtagggatcatcatggccatttattccgccatagggatcatagcaccgcctttatgggggtatgtggcggatcgaatgcattccgtagccaaggcatatatcattgtgtttgcgatttgcgcttttttggttgcgttcatgccgatatttggcattataaagattgcagggttttcatttttggccatcgcgctgcctttgacaaactttgtacgaacaccggcgcaaaacttgatggacgcttggtccatgttggcggtggcgcgcgccaagcgtgtgccgtttggcgttatgcgtttatgggggtcaatcggttgggcgatctcttgtgtgctgttatcatttgtagcggaaaaagcagggattcccgttgtctttatgctgagcggatttatcagtatgggtgtctgcatttacagcgtacgcctaaatcataggattccccttcaacaagagccgaaggagggagaaaaacagcaacgtcccaaaatcaatcctgccctgctgtttaaaaactattattttgtcgtacttttaatttttcattttttgattcaaatgatgtcaaactcctctgggctgtttttgccgtatattttccgttctgtgggaatggaagccgatttggccggcgctgtaacgggaatcaaagcgttgatggaagtgccgttccttttggctggtggtcttttggtacggaagtttaagctaccccccatgattgctgcagtaggatgcatttatgcgctggagcagttcctgtatacgcaactatcctctccgctgctttctccgcttgtctcttgtatggggccggcgctgattctgtgtatccagatgttaagtggattggcaaacgggctgtatctattcacatccgtgcagtatgcataccgcttagcgccgccggagctttctgcctctgcgcaaacatttttgggtatgtccatgtcgatgggtgcgatctgtgcaagtctattgggagggatcctcatcgaaatcactggtgttaccggatattataccttaacatccattgtcacattggttggcgttgtactattcggcctatcttttgcctttggagaaaaggttttgaaaattccacggcccaaagcagcctccgctactgaagagtaggaaaaaagctggaatgggagaatttatttctcccattctttattttttgaatgattttgcgtgttcttgctgaaatatgttataataaccgaaaccaacttgtacgaatgtaagaaagtaggaatgtatatatggctcgaaaaaaccgcaggagacctaccaagcgtttttttataacggtggctgtgttggcatgcgtgattttattgaccgtatttctaatactgcaaggccctaaggaggccctcataacagaagggaatctttttgtagaccgggatgttgaaacgctgattgttcgggatgaaaaggtctacaattccgacaactattccacggccaccttctttgcttcagaggggcagaccgttacaaagggcgcaacgattgcccaggtatacaaatggggctataacgaaaaactgatgaccgattatgtgacgacgcagcagcagatccaggattatcaggaaaataccatttggcgtgaagtaatcaataaagatttaaacacacacaatggaaagatcacaaatacaatccaggagattgtggatgtggtacaggggaaaagcagcaacgatttggttgtattggaacgaaaactgcgtgaaaatatggaaaaaaagcagcagtttttaaaagccaatgtgcaagcggacgataagctgaacggtttgtacgccacagaacaagaccagttgaataagcttgcaaattggcgtcaggatgtgcaggcagaggacgacggtattgtcagcttttatatggacgggtgggaaacacagctcacgccatacaatttagataccttgacgcgagcggatattttggctgctaaaaaaggcgttgtcagcagcaaaacttctgatgacagcaccaccagaccgttatatcggcttgtcaataattatcagtggtactgcctgattcttttggataaaaacgaggaaattcctgaactgcgggagggaggcacggccaatatgacctttgaaggttattttgaccggccctattctgccaaagccacctctgtacgcagtgtagacggcgggggcacgctgtatgtattggaaatgacagaggatattggcccgatgctaagcgtgcgcactgcagatgcaaagatgcatttggattttactggaatgatggtgccagaggaggctatctttacacagggagatcaaaagctgatcaaactggtgcagggtgatgtggcaagcctaattcccgtggatattttgatttccgatggggagaactgcattattcagtctttagatcctgacacaactttgtctgcaaaccaaaaggtgctattgcgatagaaggtagagaatattgatgaatgtacaggcgatccgtgaccagattcagagcgcagcagtaaaagctggacgtgatcccagctctataattttgctaggcgcgagcaagtatgcggatgtagagcaggtgcgccaagcctatgagcaagggcttacctgttttggtgaaaatcgttcagaaggtctgcttgcaaaaaaagatttgcttccggatgacatttcttggcattttattggacaattacagacgaataaggtaaaatacattattgataatgtggaattgattcattcgttggacaggctctctcttgcaaaggagctgcagaaaagagccttggcaaaacaaactaccgtgcatgccttggtagaagtgttgatggatgatagagaatcaagggggggcgtgctgccgaaggatatcccttcgtttttggatcagtgtgcgcagtttgataggctctacattcacggactgatgtgtgtggcccccttggggtgctctgaaagggaaacggaagcctgctttgccaaaatgaaagaccttttcgatgggctttcccaccgtatcccggacaatgctgaaatgaaggtgttgtcgatggggatgagtcatgattttccgctggccataaaacatggcgctactttggtgcgcgtaggttccgcgctatttctaaacaaataactatttggaggtgcgcaatggcacaaaagaaaatattcggaaaggtcctagatctgatcggactggaagaatctgccattgatgaagaggataactacgaaggttttgatgattacgaagatgagtatcaagatgattttgatgattatcaggaggaagaatacgaagagcctgttaagaaatctagtagaaaaagtagagcgagtaaacgcgcggaaaaaaatagccgcaaaaacaaccgtgacgattttgactacggatacgaggatgaagtggaagaagaggatacagaatatgcaggccttggcagaaatgggctgctaggcagcaataaatccagtaggcgtagcacggcaaccacgctgcgcagcacgagggaaagggatcgcgaagtggatcagagcagcaaagtagtaggtttcaatccgaagatcaaaatgattgtctatcagccgatgagctatgatgacacacaaaacatcgtagacaacctgaagcgcaataagcctgtgatagtcaatctggaagcggtggataagcaggaagcacagcgcactctggattttatctccggtgcgatttatgcaatcaatggcgatattcaaaagatcaatagcgctgtctttgttttggttccggccaatgtagatatttccggcaatattccggatgatttgaaaggaaaaagcttttatacgttagacaatcagcgtagagattattaagtcttcatcttaggagggatgcgacgtgttaactgcacagcaaattcatgaaaaaagtttttcccgggataaaaagggatataacatcgacgaagtcgatatcttcttggatgaagtgattgtagattatgatacacttaccagggagaatcaggaattaaaaacaaggatcgaagctttgaataagcagatcgaatcgtaccgtggcatggaaaattccatgatgcacaccatggttaccgtacacaaagcggcggaagagattgaagaaaaggcaaagaaggacgccgaagagatgtatgcgaaaacacgtgcgcaggctgatgcgatggcggatcgtgcacaaaaagaatacgatcagattcttaatactgccagcgcagaggcggatcgtattgtacgcgacgcaagaaaagaactgaaagaaaagcaggaagctattctggagctacatgagctccttgctgagtttaaaactggcgtgaaggattatgcttccgagctcattgagtttgcggataagatcaacgatccagagcccattcaggcaatcttgcctacctttgatgaggaagagtccgctgaggaggacagccagcaggagagtttagaaggtttgtctgctagcgaggtcgtagatagcttggtggatgatctgaaaaagcaagaaaagaaggattatgttgcagagtatgtaaatggtgtagagcgcagcaaacagatgcaagagcaggctgagcaggctcatcaggaggaccctgaggaagagaatcaggcggtattttacggcccagtggatgccgatgatgggtatgacaataacttctaacaaataaaaggagctggcttgtacagctccttttttgtatattttctgttcatatgcataggatacctggtagggtgatgcgcatggatcctgaacagaaaaagatgtatagagagctgcaaaaaacgctgcgaaagatacaaatcgttttatatgagctagaccctacactggtagattcccagcatagatggcgtcgcattggcaggcagtttgggcagggcgtgatcaaagggcttggcggcgcggtaggctttacaattttgggtgccattgtcatggcgatacttacttcgttggcagcgcacaatatccctgtcattggagattttatagcaaaaattatagagattgttaatgcaacagcaaaataaaatgacggatgcatccttccatgatataataattgttatactccatgggaggtttttttatgttagaatccatcatcatcatagttggcatcttactggatcggttaaccaagctatgggcggccggcccgctgaaagcagtgggaagcatggattttattccaggcattatggaattccattatgtagaaaacagaggagccgcattttctatgctttggggaaaaacttggatttttattattcttacactgctaattgttgcttttctaattggatatcttttgaaatacagaaatacggatggaatttggatgcgtatcgcggtttccagcatcattgcaggcacgattggaaacctgatagaccgcctgttgtacggatatgtggttgattttttgcgtcctacctttatcaatttcgcggttttcaatattgccgatatttttgttacttgcggcgctattttgtttatcatcgttctgctgtttttcaataagagggaaaaggacatgccatgaatacgaatcgcgtagtcatcgataagaggctggagggaacccggctggatgcttgcttatcacaggtaagcgggcttacccgttcaagatgcagccatttaatcgaagagggacatgttttgttggatggttgcccttctaaaaacaagacaaaggtaaaggagggccaacagcttgtttgggaggttcctgaaccatctcatctgtctttggcgcccgaaaatattcctattgaaatcttatatcaggatgaggatattgcggttgtcaataagccaaggggaatggttgtacatcctggagccggtgtagagagcggtacgctggtcaatgcgctcctgtatcagcttgatcatctttctggtatcaatggcgcgctgcgtccgggtattgtacatcggctggataaggacacttctggcgccttattgattgctaaaaatgatttggctcatcagggattatcccagcaaattgctgaaaaaacggcttgcagggagtatatagcgctggtgctcggaaatattaaggaggagcaaggaacgatagatgcgccgattggacgccataaaacacagagaaagaagatggctgtggtagatggcggacgtgaggctagaacgcattttcgggtgatttatcgttttggcaatgcaacgttggtaagttgtcgcctagagaccggcaggacgcatcaaattcgcgttcatatggcatacattggccatcctgttctcaacgaccctgtctatggccctaaatctacaaaacacgagaaggggcagctgcttcatgcggcccgcattgcttttatgcatccaagaacagcgaagcgcttatgtttttatgcgcctttggatgaatatttttcaaaacaactcaaaagtagggaaattaacacagaaacactatacaaaattatttggccatgatatagttattcccccaaagaaataatttcttttgagaaaagggaaggtgtccgttgatgggaaatcaggtaaagatcatggatgctgcacaggtcgaccgtgccttggcacgcatggcccatgagatgatcgaaaagaacaaggatttatccaatgtagcgttggtaggcatacatacccgcggcgttccgctttctaaacgcttagcagagcgtatcgcgcaatttagcggccgatgggtagattggggcagcctagatattacacgttatagagatgattttacgcccgttgcagacggcccaattgtacaggataccaatatactctttccgctgcgcggacggacagtgatcattgtggatgatgttttgttcactggccggacagcacgagccgccatggatgcgattatggatatagaccgcccaaaatcaatccagcttgctgtgcttattgatcgcggccatcgagaactgcccattcgtgccgactatgttggaaagaatgtgccgtctgaatatcagcagaaggtgaatgttcggcttttggaatccgatcaagaagagggcgtatacttgataagcgaataaaaaatttttcttttgtgtataaaagcaggaatagggggcatgataggattgacctcacaataacccccttgagagagcctcgcagagaaaacagagctgcggggcttttttctgtcttctattcttaaaataaaagaaaaatcggagcaagaaaacttactccgattggtacgggtgttcataacgacactttgacaaagaaaaaatccgagtgttcttatgaacactcgaattgaaaaggtgtgacaaaaaagattggcgccgacaggcgcacccgcaaaaagttggtagagagccaattggcgtgaaaacggcgcatttacaagccgttag

SEQ ID NO: 634 - DNA, 32759 bp, Unknown
  16S sequences of unknown bacteria
ttttgatgttatacttgtcatagaaaattcacctcttatggtactttgtttttgtagttattaacatcataccatatttgagatgaattttcttcttttttttgttacctatctattgtaccataacattttaatgaaagagcttggcgctgagcaggtgtttatagaccgtatgagcggaaagaataccgacagacccgagcttaaaataatgatgagttttgtccgtgagggcgataccgttatagccgctttgcaagaaacacaaaggatttatgggagtttgtagggctcttcttcaaattatgtgtaaagtccaaagtatggtataaaaagcaaagtgatacttaactttttctttagtgcaactacgaaaaattcatatgtttttttgctgatatcattaagtagagtatcttcgggaatatatttgtaaaattgcttaaaggattgctgataatgcttaatagtagcttctctaagatttctttgaaagcagttgtcaatatacatttcaaatccgtctttaagggttaaaacattcgattttttaatacttaattttttcactttgaatcatcccacaaatataaaaagtcagacacatttgagaggaaatctcaaaaataatgtgtctgactctttttatacttaaattaggctttaaaaacccgaatgcttacttattaagcgcctgctgaacggcaaccgcgcacgcaacggtcataccgaccatcgggttgttgcccgcgcctataagacccatcatctcaacgtgagcaggaacggaagaagaaccggcaaactgcgcgtcggagtgcatacggcccatggtatcggtcataccgtaggaggaggggcctgccgccatgttatccgggtggagggtacggcctgtaccgccgccggaggcaacggagaaataattcacgccgttttcaacgcaccatttcttataggtgcctgcaaccggatgctggaagcgggtcgggttggtggagttgccggtaatggaaacgcctaccttttcaagcttcattatagcaacgccctcgggaacgttatccgcaccgtagcacttaactgctgcgcgcgcgccctttgagaacggcttttcataaacaaccttgacctcttctgcgtaggggtcaaactcggtttcaacataggtgaagccgttaatgcgggagattatataagccgcgtctttgccgagaccgttaagaataacgcgcaggggcttaactcttaccttatttgcgttaagagcaattttaatagcgccctcagccgctgcgaaggattcgtgacctgctaagaagcagaagcactcggtttcttccgaaaggagcattttaccgaggttgccgtgaccgagaccgaccttgcggttttcggcaacggagccgggaatacagaaggactgaagaccgataccgatatttgcggcagcggcagcggcggatttatcaccggtgcgctcagcctctttgaaagcgatggccgagcctacggtgtaagcccactttgcgttttcaaagcagataggttgtgtttcctgaacggtggtgtaggggtcaacgccgtattttgcgcatatatccttgcactcgtcgatagaggagataccgtaatttttaagaacgccgagaatctttgcctcgcgtctctcataaccttcaaactgtgccattatactgtacctccttattcttcacgcgggtcaatgtatttgaccgcaccgtcttctttattgaagcgtccgtagtgacccatggactgcttgtaagcctcgttcggctccataccttttttaataaggtcggtcattttgccgagggagacaaactcatagcctataacctcgtcgttttcatcaagagccattcttgtgcagtagccctcggtcatttcaaggtatcttacgccctttgacttggtgccgtacatagtacctaccattgagcgcgcgcccttaccgaggtcttccattcctgcgccgattacaagaccgccctctgaaaaagcggactggctgcggccgtaaactatctgtaaaaacagctcgcgcatagcggtgtttatagcgtcgcaaacgaggtcggtgttaagggcctctaaaacagtcttgccgggaagaatttcggcagccatggcggcggagtgggtcatacccgaacatcctacggtttcaaccagagcttcttcaattatgccgtccttaacattaagcgacagcttgcatgcgccctgctgcggtgcgcaccagcccacgccgtgggtgtaagcggaaatgtccttaacctctttcgcctgtatccacttgccttcctccggaatcggagcggggccgtggtgcgggcccttggcgacaggacacatattttctacttcctttgaataaatcatatatgtactcctttcgtgcgggacttttaaatccacacaagtatgcacttattatatcaaacgccgagtaaaaaaacaaggggttatatcaaaaaaataagaccgacagctcccggcgcggataaggagcacagggagctgaaaatataatgtcacttttcggcaatcggtaggctgacggttatctccgtaccatagcccggtttgctttcagtcgatattttaccgccgagactgagcgctatatgctttactattgaaagcccgagccccgtgccgccgctttgctttgaacggcttttatccacacggtaaaaacgctcgaaaatacggtctatatgctcgggcgctatgccgatccctgtgtcgctcacccgaataaaggcgctgccgcccgcagaacctacacagacctttacgctgccgttttcacggttgtattttaccgcgttatcacaaaggttgtagatcatttcaaatatcagggattttccgccgtttacaagggtgctgtcaccctctgccgtcacggttattcccgcctttttcgctacgcccgatatgctctttacagcatcgtttgcaacctccagtatatcggccatttccgccttgtcggtatcctcggcaccctcgtcaagctctgaaagccttataatatcgttcacaagggcaagcagacgcgccgcctcgcggttaatatccccgccgaagcccttaacgtcctccggcttcacaatgccgttcataagcatatcggatattccgcaaattgaggtgagcggggttttaagctcgtgcgatacattcgccgtaaattcgcggcgcagcttttcgcgtttttctttttcggttatatcaaccagcagtataaccgcgccgcagggctcgccgttttcatcgtaaaccgggtttgcggttatattgaagtattttccgtccagcggcagaatatcgtcgcccgagcgcttttctttaatatcatcaaatatttttctgaaaacctcgctgcggttgagggttaaaatattgctgccgtttatatcgtcctgtgttccgaagaacctttcggtgcccttgttgtgggttaaaatattgccgttaatatcggtaagcaccagcccctcgctcatattctcggcaatagcctcaaattcgcggcggctgcgcgtgagctttgctatctgacggtcgattttgcggttctgcgcatttatttttgaaataagcggcgaaagctcgctgtatgccgagtcggcaacgggtctgtcaaggtctatttcgtttatcggctttactatttttttagctataacagaggcaaaaacatttgcaagcacaaacaccataattgcaatggcgcaaataggcggtaaaagctccagcaccaccgcccaaacagtaagcgacgcgtccgcaatacgcaaaatgctgccgtttttaagcttttttgcgtaatagcaggtcttttgccctaaggtttccgagcgccgcgtatcatacccctcgccgtcagcttccgcctcttttacctcacggcggctcgagtggttttccatagcttcggggttgctcttattatcgtaaagcaccttgcccgaggggtctataagggttattctctcgcttatatccgaatattcggaaaggttgttttgctctgccgcaacgcttattatttctgccttactgcgcagctccttgtaagatttttcatcgtatatctgatactgcactcccaccgtgaaaataaggcaggcaagcattgttataacggttgaaataagtattcctctgtaaattttcccggtcataataataccccttttgtcaaactattttatagccgactccgcgtactgttcctataatatctccgctttccccgagctttgagcgcaggcttcttatgtgcacgtccaccgtgcggttttcaccgtcataatcgtagccccatatatcgtttaaaagctgatcccttgtgagcactgcgccgcggtttttaagcagcaggcacaaaagctcgaattcctttaaggtaagctcagtttccttaccgtctaccgttacaatatgacgatgcttgtttacataaagttttccgacggtatattcggtatccgtttgtgcggttctgcgcagcagcgcctttatacgggatataagctccattgtgccgaacggcttggatatataatcatcagcgccgctgtcaagccctgttaccttatcatattccgtggttttggcggttaacataataactggcagctgctttgtatcggggcgggaacgcagccacttcaaaacggaaattccgtcctcctcgggcagcattatatcaagcagggcaatatcgggctttttatgcgcaaccgcctccctgaacagcgacggcagcggaaagccctccgcctccattccggtctgctttaacgcataaattacaaaccgacgaatactctcgtcgtcttcaagcagatataccatttttccacgttccttttttattttatctgtgcgtgccggtaattgagtattccacccattcggctatattcaccgcgtggtcgcctatgcgctcaagatattttgcaatcattaaaagatctatgcaaaattcgccgtttgccttatcctcggttatcagctgcacaagctcatcctttacacaatcgaaaagattatccaccttatcgtcatacgccataaccgcgcgcgccaattccacatcctttttaacaaaggactcgacgctgtcggtgaccattttggtggcggcggcagccatatccttaatgtgaattttgcttttaacgttgctgtttttaatgaatttcgctatttcggcaatgtcatatgcctggtcgcctatgcgctccatatccgaaatcattttaagcgcggaggatatgacccttaaatcgcgcgccacgggctgctgctcaagcagcagcttcatacaaatagactcaatatcccgctccttgcggttaatttcatcctctgcttcaaccgcttttcggcagagcgcgtcgtcatcatccaaaaagccctttaccgaggcgcttatggcgtcctcgcagagtgcgcccattgttataagctctaagttcagcttttcaagctgactgtcaaatttatttctcataatcaaccgaaccttcccgtaatataatcctcagtgcgtttatcctgcggggttgagaacattttctcggtctcggagtattctattacctcgcccaaaaggaaaaacgccgtgtaatcggaaattcttaccgcctgctgcatattgtgcgtaaccattattatggtgtacttctttttaagctcaagcgcaaggtcttctatttttgaggtagagatagggtcgagcgcgcttgtgggctcatccattaaaagcacctcgggctttacagctaatgcgcgtgcaatgcaaaggcgctgctgctgcccgcccgacattgcaagggcgctctttttaagcacgtccttggtttcgtcccatatagcggcgtcgcgcagcgattcctccacaatttcatcaagccttgcctttgagcgtatgccgtgggtgcggggaccgaaggctatgttatcgtatatcgacataggaaacgggttgggcttttggaaaaccataccaacgcgccggcgcagcagattcacgtccatattgccgtaaatatcctcgccgtccagcagcacctcgcccgtaatacggcagccctcaaccaaatcgttcatacggttaagggatttaagtaatgtggatttaccgcagcccgagggacctataaaggcggttatgctgttttcctgcataccgagatttatatttttaagcgccttaaagtcattataccataaatcaagattttttacagtaaatttttccatagtttttatttcccctttgccgtaattcttttagcaataagacccgacagcatatttattataagcaccagtatcagcagcaccaccgccgtggcatatgcctcattcatataaagtccctcgcttaaaagcgcgtacatatgaacagagagcgttctgcccgagtgcattaaatccttgggtattccggcaaccgtgcccgaggtgtatataagcgccgccgtttcgcccacaattctgccgaccgatagtataacgcccgagagtattcccggcacggcggagggaagcaccaccttgaaaaccgtgcgtaatctccccgcgcccagcccgaagctgccctctctgtatgcgtcgggcacgccgagaagcgcttcttccgtggtgcgcatcatagtgggcagtatcataatagccagcgtcagcgcgcccgaaagcattgattgatgaaaatgacaggcgataacgaaaatcaagtaaccgaaaagtccgtaaactatcgacggtattcccgcaagcgtttcggtagtgacccttaccaccgaaaccagcgtgttgccgcgctttgcatactctgtcaggtagactgccgagaaaatgcctatcggcgctgccagtaaaagggacagagccgtcattataaccgtgtttattattgcgggcatcattgaaacattttcgctgttgtactgccatgcaaaaagcgagggcttaatgttcggtacgcccttaataagtatatacgccacaagaaaaaccacaaccgccgccgtaagcaatgccgcaatccaggttataagcagcataataagcgagccggggtgatttttgtaatttaaaaatttttgctttaaggagattttatttgcagcttccatttactttttctcctttttaacaagtgagaacaagaggtttattataagaataaacacaaacagcacaaccgaggttgcgataagcgcctctcggtgtaaatcggcggcgtaacccatttcgagcactatgtttgaggtgagcgtgcgcacaccgctgaaaatgcttgtgggtattatagcctggttgcccgcaaccatattaaccgccatagcctcgcctatggccctgcctattcccaaaataacgcccgccgtaattcccgatttcgccgcgggcagcaccgttctgtaaatgctgcgctcgtgcgtggcgcccagtgccagagcgccctcgtaatagctttccggcacggcgcgtattgccgcctcggaaacgcttataatggtgggcaaaatcataattcctaacattacagatgcggtaagcacgcttttacccgagccgccgaacaaattctgcattgccggcacaattaccaccagcccgaaaaagccgtacacaatagaggggattcctgcaagcaaatcaactgcgggcttgaatattttgtaaagcccttttgggcaaaagcgcgctaaaaacaccgcgcataaaacgcctatcggcacgccgataataatagcgcccgccgtaacataaatgctgcctattatcatcggcagtatgccgtaaagatcttcaagcggcttccagcgcttgccgagaagaaagttcgcaaagcctattttgcccatggtaggtattccgtttgaaaagagaaacacgcatattaaaattaccgatataatggaaacgcaggcgcagagcataaacacaatgcgcattgccgtttcctttatttttgaaattgttgtgttcataaatactcctgttattaagctttaaacggcttttggctccctctgacgagggagctgtcgagtgaaacgagactgagggagagaaaaaacaaaattttttctgtcattaaagcctttctctccttccgtcacggcttacgccgtgccacccactgacggtggcggtcccctctgtcacttcgtgacatctccccacactgtggggagcaaccctcctcagagggaggcttttatgcaattattcttaatgtgacagccattcgccggaaagaggtgatttttattttatttcgctccactttgtaagcgatccggtgtagatgttcttgatctgctcgcttgtgattgaatcaagggtgttattcttgtttactattaccgcaataccgtccagcgcaatcttaatagagttaagtcccgcttccttttcgctgtccttaacatcgcgtgatgccatacctatatcgtatataccgtcaatcgcacccttcatacccgaggatgaatcgttctgctgaacatccaccgtaacattgggattgagctttacataagcctctttaagcttttccattacaggtgttaccgaggaagaaccgcctatggtaatcttgccgttctgaccggaggctttgtaagcgcctgtgttgccctcgcttatatagccgttcttttcaactaccgcctgaccgtctgcgctgaggataaacttgataaagtcgctcgcaacccccgtagtgtcacccttggtggcaatgttgaagggacgtgaaaccttatattcgccgctcttaacattatcggcggcagcttccgcgccgtcaacctttaacgctttaaccttgcttttatcaagcgagccgagcgaaatataaccgatagccgccttattgccctgaaccgttgtaatcataaccgaggtggaattagtggtttctgcggtatcaattgttttatcaacctttttaccgtcggcgttcttttcctctattcccaaaagctcaataaacgcgccgcgcgtgcccgagccttcctcacgggtcagtaccgatattacgtctcttcccgtgcctgttccgccgttattactgtctgcgccgcagcctgcaagcgcgaataccgtcataagggctgcaagacctaaactcaagatctttttcatttctttttatctccttttcaactttctgcccttattataatgtccctatgttaagtctgtaatcaaagtaatgttaaatccgtgttaaacagcacaaatataaaaagtcccgcaggggtgcgatcacctctgcgggacggaataccgattttttcaatttttgccgcccgatttccccgtgattcggaaggtggcttcagtcattattatcataagcgcgaaaaacgcgagcagatacaccggcatgaccgaaaagccgacggcgttaccgaacagaccgaaaagagggggaataaatgttgagccgacataggcacttgccatttgaatgccgatgattgcgcccgaattttccgcgccgaaattagccggagtcgaatgtattatgcagggataaatcggagcgcagccgaagcctatcacgagaaaggctgcgaacgctgtcatatacgatcgcacgggaatgagaagtatcattattccgcaagccaggatccccgttccgagaagaatcattctgcggtcaccgagcctttcggtaatgaagccgcttgcaaatcttcccagcgttatgcctatataaaacagggctgcaaaggacgcggcgcggtcgcccgaaatacctttaacctcggtaaaatatgtgcttgcccaatacattgcggtcgcttccgccgcgcaataagcaaaaaagccgataagcaggaagggtacgcctttaattttaagcgcggctgttaatccgacacgctttgtgtcggcagtgctttccgttttatttatcttccataccggcaaagtcacaagcagcaaaagggcaatggcaagctgaataaaacctacaattcggtaaccgctgttccaattaagatttttaagcgcaaagctcataataaacgggcttataatcgcacccacgccccaaaagcagtgcagccagctcatatgcttcgccttgtaatgcagcgcaacataattattgagtgccgcgtcaatcgcacccgcacccagtccgtaaggcacggcaaatatgataagcatcgaaaagctgcccgaaaacgaaaaaccgaacagcgctgcaaccgttaacaacacacttgcgaccgttacggcgcgcgtgccgaatttatgcgtcagcttatccgataataggcttgaaactatcgttccgccggatattaccatggaaataatacccataaacgaaacggacacgccgagttctgtatgcatgaccggccagcccgcgccgagcagcgaatccggcagtccgaggcttataaatgccaaatagataagagccagtaaaaatgagtacatttacaattcctccgcaaaaccgtttacatccgctttattttatcgcagacaagaataaattgcaacaactttcaggcttaaaaaataaattttctgcagcggctcctgtcggccgatggtttgtacaggagctacggttttgcacatctaatatctaccgtctaaaatccaaggcctaaatcggcgagtgttttcataacacaacaaaaaacctcttgcacgaggcaagaggtttttgcaggttcaaattagtccgcaaggtaagcgtactggaggtaccagtagccatacgggctgtgccatgtgcccttgaggctggtgctctggagccagaaatcgttatagtaagcaaccgggataaatccgtaatcttcgcttacgatcttctctgcctcgtggagagcggcaaagtgagcagtcttatctgctaccttagagtcgtttatagccttatcaaacgccggattgttgtacttaccgtcgttgttgccgttggaggaaacaaacagctcgatcatgttggatgcgtcattgtagtccataacccaaccgttgcgagccatttcgtactcaccggcgcggcgcttgggtgtaaaggacgaccagtcaacaatgtcaatattcatagtgatgccgagatccttataaaccctctgcaaatactcagcaacagccttatggtagcctgtatcgttggtagaataggtgatggtcgggaaacccttgccctcgggatagcctgcctctgcaagagcctttttagcttcttcaaggttagctttgtaatcctcgctgatataggtcttgccgccgtttgctgcctttgagttctcaaggaacttaccgggatcaacatcgtcaacaccggtacctacatagttgtaagccggtgaatatgtgccctgcattatagtgttggcaacatagtcacggtcgatagcaaggcttaaagccttacgaacgttcttgttgttgaagggagccttgttgaggttcatgctcaggtaataggtaccgagaataggatcaacaatgaattcatccttcttatccttcttaagggtcgggatttcctcggtcggaacatcctttataagctgtgcggtgccgccggtgtaggcagtataggaagcgcttgaatcttcgagcaataagaatgtgagcttatcgtttacaatcttgcttgaatcccagccgcccttgtaattctcattcttcttgcaaacgatcttctcgctgggcgtccactcggtaatggtgtacggaccgttgcagacataggtttcgggttttgtagcccaggagtcaccgttcttttcaacggtagccttctgaacggggctcattgtaccgaaagcaacgatcttatcaaaataagagcaggggtaagcaagcttaactgtaagagtcttaccgtcttcgctcgccttaacattgagcttgtcggggttcttgctgtcaatagcgtctttgtagccttcgatcataccgataacggtttcggcatacggagccgcaacattggtatcggctatacgcttaaaggtgtactcaaagtctttagcgttaaggtcggtaccgtctgaccatttaagaccgtcacgcatagtaaaggtccaggtaagaccgtcggggctaacctcgtacttttcagcctgtccgggctgaactttgttgtcctgatcaataatgagcagggtttcaaacagggtaataagcatattaccgccgtcaacagcactgttaagagccgggtcgagcgtttcggggttcgggccgatctgaacagtgatgccatctgccttcttcttaccgcagccggcaaaggctgttacaaaaagagcggcagacaagaaaatagccagcattttcttgaatttcatttttgatctcctctttcttaaattttacggctttaaccgctttattatatccattgcgcctgagcgcaataaataccgtgttaattcaccttatcaaggtggtggcaggcagcgtaatgccccgggcttacctctttaaattcggggcagacctccgcgcacttttcatccgcataggggcagcgcgttctgaagcggcagccgctcggcgggttgaggggcgacggaacatccccctgcaaaggaatacgctttgaggcgcgcgcagcaattgggtcagcctcgggtatggcggaaataaggctcttggtataggggtgaacgctgtgggaaataagctcataagcttccgccagctcaaccagtttaccgaggtacataacgcctattcggtttgaaatatgccttacaacgcttaaatcatgcgctatgaacaggtaggtgaggtttaagtccttttgcaggtcctcaaacatatttaccacctgcgcctgaattgaaacgtcaagcgcggaaacaggctcgtcgcaaactataaactcggggtttacagccagtgcgcgggcaatgccgactctctggcgctgaccgcccgaaaactcgtgcggatagcggtttgcgtgctcgctgttaagtcccacacgctcaagcagagaaataatgcggtcatgccgctcctttttatcggaggcgagcttgtgaatatcaattgactcgccaactatatcgccgatagtcattctggggtcaaggctcgcatatgggtcttggaacaccatctgcattttgcggcggtagggcagcatatcagcctttattttcttttccttatcgaaaataaccttgccgtcgtaaataattttaccgtccgtcggctcatacaggcgcaaaagcgttcttccgaccgtggttttaccgcagcccgattcgcccacaagacccaaggtctcgccgcggcagatatagaacgaaacatcgtctaccgcctgaacgacctgctttttgccgccgcttcttgcgggaaagtactgctgcaagtgctgcacttcgaccagtttttctttctcactcacagttttcctctcctttcaacgcctctttctgcaaaagccagcaatagctgtaatgggtatcgctgagttcggttttcgggggcattttattaaggcagattttcatacattcggagcagcgcggcgcaaagggacatcccgcagggggattaagcaaatcaaccggctgaccctcaatgggaacgagcctttctattttttccgcgtttaatttcggaattgatttaataagaccctttgtgtattcatggctcgggttgtagaaaatttcatcagccgtgccgtactcaacaatatgaccggcgtacataacggcaattttttcgcacatattcgcaaccacgccgaggtcgtgagtaatcataatgatgctcatgccgagctttttgcgcagctcctgcataagctccaatatctgcgcctgtatggtaacatcaagcgcggttgtaggctcgtcggctatgagcagcttgggctcgcaggcaagcgcaatggcgatcataacgcgctggcgcataccgcccgacagctcatgcggatactgcttaaggcgctttgcaggctcgtttattcccacaagctccaaaagctcctttgccctttcgtaagcctcttttttggttttatttgtgtgcagaagaataacttccacaatttgatttcctatagtataaaccgggttaaggcttgtcatagggtcctgaaatataatggaaacctcgtttccacgaattttgcggaactccttttcggtcattttttcaatttcatgaccattaaagcgaaccgtaccgccgaccaatttaccggggtatgcggtaagccccattattgagtaagccgttacggatttacccgagccggactcgcccactataccgagaacctcgccttcctccatagagaaggaaactccgttaagtgccttaacttcacctgcgggggtgaagaacgagagtctttcgtcctttatttccaaaagcttttcactcaatgctctcaccctcccttaatttttaagcttggggtcaaacgcgtcgcgcagaccgtcgcccaaaagattgaacgcaaggatggtaacactgatgataatcgccggcaaaaacagcaggtgcgggtatgtgttcatacccttaaccgcgtcagtcgccaaagaacccagcgacggcataggtgccgcaacgccgagacctaaaaagcttaaatagctttcggtaaatatggcggacggaatctgcaatgtggtggtaacaataagagtacctatgcagtttgtaagcaggtgctttcttataatcctcgaaccgttagcaccgagtgcccttgctgcggtaacatattccgattcctttaaaaccaaaacctgcgaacgcgtaatacgtgccatacctacccagtaaagcaaaacaaaaactatgaacattgctatgaggttcggccctataagctgaatccaattaaatccggcaacattggcaagctgctcaagtcgaggtcttaaaaccattgaaagcactattataagcagcacatccggtattgtgtagagaatatcggttatacgcatcataatattatctatccaaccgcccaaaaatccggctatcgcaccgtaggtggcgcccacaagcagcacgagtgccgcgcagataagacctaccgtaacgctgactctggtgcccatcataaggcgcacggcaaagtcgcggcctaatttatcggtgccgcagatgtgcgggaaaaccttttcgcccgcatcgattttttcctgctccacctttccgtattcaaagggggctaaattttcgctgtacttgatctgctcctcgtagctgtaaggccaaaaggcgggcagaacataggcgaatatcattataagcaaaacaaaaataaagcttaccattgcaattttattcttgcgaaggcggcgcagaccgtccttccaaaagtttacgctttcgcgcattattacaagactttctttttcgtcaggcgtagcgggaagaaaatcttcggggttgagctgaagactcggaaacttcttgttcattttaacttctcgtcgctccttactttaggttaatgcgcgggtcgattatcttataaagaatatcaactataacgttcgcggtaataataagcgttgcaagcactattgtagtacccattataagggtgtagtcgcgctggtttatggcgcttacaaagtctctgccgagacccggaatggtgaatattttttcaactacgaacgagcccgtcataaggcttgcaagcataggtcccacataggttactaccggcagaaccgcgttgcggagcgcgtgcttgaacagtattttaaagtttgaaagaccctttgcctttgctgtgcgtatatagtcctgccccataacgtccaaaaggcttgaacgcataagacgggttatatacgccgtggggtaaattgcgagtgcggttacgggcattatatatgaagacattgtgttaagcccgacagtcggcaatatattcagcttgctgccgaaggtgtataacaaaataacgctgcttataaagctcggtattgctatgccgcaggttgcaaaaactattataatattatcgcctaatttccctcggttgtacgcagaaagacatcccaaaggaatacccacaagcaccgccacagctacagcaaagcctgcaagtctggccgaaacagggaattttgaaaagataatatccgacacggtacgcccgcgctgacgaaggctaagccccatatcgcccttaacaaagtcagtcatataggtggcgtatctttcaagcagcggtttatcaagaccgtatttagcctcaagcgccgcctgcgcctccttacttattgatttttccgccacaaacgggccgccgggaacaaggttcataagaaaaaacgtgagcgttgcaactataaatatgctgagaactcccatcgcaacacgctttataatgtatttacccaaccgatttcaactccctgattttttaaacataataccttttacccgcctcggattactttccgctgagcaaaaaaagtatactatataataaacagtttagcacattaaagccgaaattgcaagaaaaaattacaggcagataagctctttggggctgtttgttaaatctatgcagccgttttcggtaacatataccatatcctcaatacgaacgccgtatttattttcaatgtaaattcccggctcgaccgtcatgaccgtgcctgctttaagcactgtatcgcagcgcatgttgaaaagcggtctttcgtgaatttcaataccaacgctgtgaccgagcccgtgaccgaagcagccctcatatccggcagaataaataatatcgcgggaaatcttatcaacatccctgcacactacgcccgcctttacggctttgatgccggcaagctgcgccttaagtacggtatcatatacctttttctgctcgtcgtcaatactgccgagcgctaccgttcttgtcatatccgagcggtagccgccgaccaccgcgccgaaatccattgttatgaagtcgccgcgttcaaccttcttatcggtcggcacgccgtgcggaagcgacgagtttttgcccgaaaccacaataaaatcaaaggagacaccctcgctgccgagccgacgcatataaaattccatatcgagcataatttcgcgctcggttctgccctcttcaatgcgggcggttatgtatttaaaggtctcatcggtcagcctttgagcctctttcattaaagaaagctccttttcgttctttaccgcgcgcatatcgcgaagtaaaatatcaaagcggtcgcactcgggtatttccacctgaacgccctcggaaagctgacgtaaaagactcattgaaacatactcattttcaacataaaggcgctttatgccgttttcctcgcacaattcctttatttccttaaaaggcgaagaagacaggcgaacctcgcagctgccgacaatttcctttgccttttcaacatagcggaaatcaataagaaaatacgccttactgtcggttattagaacatagccgtcgcttgtttcaaggccggtaacataaaatctgttcggcacgcttgcaataagcagcgcgctcccgttttcgagctcgttttgcaattttttaactgttgcgtttctcattttcaaagctcctttaaaacattgcgcaaaaattcgtatactctcccggcagacgacaccgaaaggtgctcgttagcggtgtgaatatcccacatatcgggtcctaacgacaccgcgtcaaatcctgctatcttttcgcccaaaagcccgcactcaagccctgcgtgaacggtttccacggttggctttctgccgtacattttctcaaatacctcggtcattttattctgcaggcgcgaattttctctgtactcccacgcggggtaatcgccgtgaatcttaagctctgcgccgtaagccgccgccaattcccgtattccgtcaagcaggcgctgcttttcgggttttacgctgctgcgcaccgacataacggcgttaaaatacccgtcagaaatatttgcgataccgaggttctgcgagctttccactaagcccggtatattttggctcatagccataacgcccgatttaaagcccgataaaaatttcaccacatcggcggttgatttgtcatttaagcacttatctgccttttccgctttttcggcggtgattttaagccccttatcactgtcgagcacattgctttttgtaaactcggctaaataatcgcttattttgctgtttgtcgctataacgcactcgcaggcgttggggataacattatccttaaacccgccgcaaacggaaacaagacgaaattcgcagttcaagttatcaagcagccgtcccataagagtatcggcattaagcctgcccttgttaatatcaattcccgagtgaccgcccaaaagccccgaaacggtaattttaacgcagggatctgtgttttcgcaaaactctactggcattttaaaatcagcctttgcgccgcccgcgcagcctactgttaaaacgccctcttcgcctgaatcaaggtttataagcgtgctgcccgaaagcgccgatacatcaacaccctcggcgccgtacattcccgtttcctcatcggtggtaaaaagcgcctcaatcggcgggtgcgcggcggcttcgtcctccaaaaccgccagtatcatggcaacggctatgccgtcgtcagcgcccaaggttgtgccgtcggccgagagcatatcgccgtcaagtaccaagcgtaagccgtccttgttaaaatcaatatcgcagtcggcggttttttcgcagaccatatcaaggtgcccttgcaaaatcacggtcgggcggttttcgtaccccgcggtcgccgcttttttgattattacattattaagtgcgtcctttttatattcaagaccgtgctcctttgcgaaattcacgcaaaattcgcttattccgtcggtatttcccgagccgtgcggaatggcgcatatattttcaaaataatgaaatactcgcaaaggttcaacattttcaagcatttttgtcactccgttttaaatttaatcgtcaaggtccttgccgcagcagcgcttgtattttttaccgctgccgcatgggcaaagcgcgtttttgctcactacgcccttacctcttacggtaagcggcttatcgcccgcgtttgtttcctccgcaaccttttcacgttttacttcttcattgcggcgaacgcgaacggtaagcacaagctttgcggtctgctcgcgtattgcgttggtcatagcctcgaacatatcgtagctgtcgttgcggtattccacaaccgggtcatgctgaccgtaggcgcgaagaccgatgccctggcgcagctgatccatagcgtcaatatggtccatccagttggtatcaacgcatctgagcagcattacgcgctcgatttcacgcataatatcgctgccgaattcttcttcgcgctgctcatagcgcgcatgtgccttttccttgaggctttcggcgacctcttctcttgttgtgttgccgagttcctcgggcgtgaagtgcaaatcctcgggcgtggttacccagccgaggaaatattcgcgcataccgttaagatcccagttatcgtgaactgcttcgtcggcaaggtatatttttgaatattcctcaatcgtttcgtctatcattttcagtacggtatctttaaggttttcgccgtcaagcaccttgttgcgctggctgtaaataagctcgcgctgcttgttcattacatcgtcgtactgtaaaacattcttacgggttgcgaagttcatgccctctttcttcttctgcgcgctttcaatcgtgcgggagagcatggagctttcaagcggggtatcgtcgtcaacctttagtgtctccatcatattggaaatgcgttcgccgccgaacaggcgcataaggtcgtcttcaagcgaaacgtagaatcttgtggtacccgggtcgccctgacgacctgcacgtccgcgcagctggttatcgattcgtcttgaatcgtggcgctcggtgcctataatgcaaagtccgcccgcctgccttaccctgtcagcctcgggagcgatttccgccttgaatttatcgtaatattccttgtattgctcgcgcgcggaaattatatccgcatcatcggtttcggcaaagcccgttgcctcggcaatcatttcttcgcttaagccatcgtgcctgagcgccgctttcgcaaggtactctgcgttaccgccgagcataatatcggtaccgcgacctgccatattggtagcaatggtaaccgcaccgggcatacccgcctgtgctataatttcagcctctttttcgtggtgcttggcattgagcacattgtgctttattccgcggcgctttagcataccggagagcagctccgatttttcaatcgtaaccgtacccacaagcacaggctgctccttttcatggcaggcgattatattatcgattaccgcgttgaatttagccttttcggttttatagaccacgtcgttttcatctacacgcgcaatcggcttgtttgtgggtatttcaataacgtccagcttgtatatttcctggaattccgcctcctcggtcatggcggtacccgtcatacccgaaagcttgttgtaaagacggaagaagttctggaaggtaatggttgcaagggtttttgactcgcgcgcaaccttaacgccctctttggcctcaatagcctggtgcagaccctcgttgtaacgtctgccgtacataaggcggccggtaaattcatcaacgattataacctcgccgtccttcacaacatagtcaacatcgcgtttcataacgccgtgtgcgcgtattgcctgatttatatggtgggctatcgctatattttcggtatcgttaaggttttcaatgccgaaatactgctcggcttttttaacgcccgagggggtaagggtagcggtgtgcgccttttcgtccacaacgtagtcgccgtcatagttggtttcttcgtcgcttgccttatcgtccatttccttaacctttaccattttaagggtcaaggcaaagcggtttgcctgggtatacaggtcggtcgatttatcgctctgacccgatattataagcggagttctcgcctcgtctataagtattgagtcaacctcgtcaacaattgcgaagttgtgcccgcgctgaaccttttgctccttgtaaattaccatattatcgcgcaggtagtcaaaccctaactcgttattggtgcagtaggtaatatcggcgttatacgcggcttttttctcatcctgatccattccgtgaataataagccccacggtaagccccataaagcggtataatttacccatccactcggagtcacgctttgcaaggtaatcgtttaccgttacaatatgcacgcccttgccagaaagagcgtttaagtaggcaggcagggttgcaaccagtgttttaccttcacctgttttcatttcggcgattctgccctgatgcagtataataccgcctattacctgcacaggaaagtgcttcataccgagcacgcggcttgcggcttctctgcaagcagcaaaagcctcaggcagaatatcgtcgagcgtttcgccggccgataagcgctccttaaattcatctgttttatgccgcagctcatcgtcggtgagcttttggtattcttcgtccagcgccaaaaccttttcctgcataggctttatgcgcttaatttccttttcactgtaatttccgaacagtgcctttaataaacccattgttattacctcttaaataatattttatcgttttcacggtagagccccgcggtcagcgttatatcgccctcgcggcttataaaaaccgcttcggtgcccgccgtgttttcaattatttcttttcccttttcggttccgagcagcaggcaagcggttgaaagcgcgtcgcaatccgccgaattttcgcctatcaccgtaaccgatgaaagctcgtttttaacgccgcagcctgtagcggggtctaacacgtggtggtaaatctccccgtccttttcaatatacctttcgtatattcccgaggtcacggcgcttttgttttcaagcggcatattaagcaaaatttcttcggtaaacggcttgcgtatgcctatgttaaacttacctgttacctttatatttccgcctaagtttacaagagctttttttacgcccttaccttcaaggtaggaaacaaccttatcggtaatatacccctttgcaataccgccgagatcaattttttttccgtgtaaattcgcggtattttcctttatttcaatgctgtggtaatcaacgttttttagtgcctcggctatttcgctgcggctcggtacaatttggtttttaaaatcccataattccgatacagggcagatagtaatatcaaacttcccgtcggtcaggtttccgtaatacaccgacttttcaagcaggcgcaaagtatcgtccgataccgaaacaaacccgtcggtttcgttaagcctgtacacatcactgccttttaccgttcggctgagcagtctttcaagctcctcacacacggcgaaagcaccgctcagcgtttcatcgtcgcaatctgcggaaacggtgcaggcggtgtcaagtaaaaaacgtgtttcggagtttaaagccttgttttcatcctgtgagcagccgcaaagcaagagcaaaagcagcagcataggaagcgtgatatttttcctcataaaaattattatacaataactttctttttttgtaaagatatgttaaaatcaaatatgaaaatattctatgaacgcaggttgaaaaaatgctgaaaaagagcgattttattataattctgtcggttttgcttttggctttgatatcatctgtccttgctttttcccaaaaaagcggcaaaaccgtgacggttaaggaaaataacaaaacggtatattccggctcgctttacgaaaataaaacgattaagcttgccggcaataccgtggaaattaaaaacggcaaggtacgggtttcttctgccgactgcaaaaatcagatatgcgtaaaccacaagcctataagtaaaaagggtgaaagcataatatgcttaccgaataaggttttagcagaggtggagtgaaaatggcaaaaagaataacgctatacggaatttttacatgccttgcccttattttcgggtatatagaaagtttgttttcgctttcctttatagccccgggcataaaaatagggcttgcaaactgtatttgccttttgcttatagcaagcggagacattcgcggcgcgctgcttgtaaacataacccgcgtaaccttatccgctctgcttttctccacaccgttcgccctgcttttctcgctttcggcagggattatttcaacccttgcggcatttgcgctctcgcgctttaaagcggtaacggcggtaggctgcggcataggcggcgccgccgtgcataacatcgttcaaataacggtagccgcccttattttcggcaagggtgtgctttattacctgccgtttatgcttatagcctcgcttttctgcggcggcttaactggcggcacggctctttacctttcccgccgcaatatcccggatttatttttcaagtagcatgctcataatatcggggccgtgctcaacaaattctcccgtttcggcggcgtttttctcggtaaatgaggaaacgccgttttcctttttgcggctgtcgtatatcaaaaacggcactggtgcagatgaatgagtcattgtttcaagcggggtcgggtggtcaggcattataagtatgcggtaatcgtctccgcagccgtttaggtagtcgagcatttttgtaagcactttgctgtctatcatttcaatcgcttttaccttgttttgcgcttcaccgcggtgaccgcactcgtcgggcgcctcaaagtgaaggtaaacaaggtcggttccgcgcttgaacgcgtcaattcccgcctgggtcttgccctcaaaattcgtgtcgatataacctgttgctccctcaacctcgggggtctccatacccgcgcatattcctatgcctttaagcaggtcaaccgcgcttacaacgcagcccgaaacgccgtttttctccttgaagttttcaagctgcgggcgtctgccctcaccccagagccaaatggagtttgcctcatgcaagccctttttgcggcgctctatgttcacggggtggtctttaagtatttcataactctttttcataagatcaataagcggcgcggcattttcgcttttgcttaaatactcgcctattacccgcccgcttatatcgtgcggcggggtcatattgccaaggtcggtagttccgttatctactaccaggcagtggcggtagcttacgccgccgtaaaatttataaatatcgctgccgagctctttttcaaccgtttctattattttgtgcgcctcttcggttgaaatatcgcccgcgcagtaatcaaccattgttttgtcttcatagctttcttcacccgacagcgtaacggtattgcagcgcagcgcaacgtcggtcggctttaaatcaacaccgatagacgccgcctcaagcggcgatctgcccgtatagcaaaccgcggggtcatagcccataaccgaaagattggctacatcactgcccggtttcagccccgcagccaccgtgcggcacataccgacctcggcatttttcgccagtgcgtccatattcggcttatgggcgcattccataggcgttttaccacccaaagcggcgttcggcgtgtctgccattccgtcgcaaagtacaacaagatatttcattttgcattcctccgtatgccattaattataagcatttcttcatttaatgtaaagtatattttaaaaaaattccgctttattcctctcaaatattaaaacgcaccttgcggtgcgttttaattgataaacagctttattttattgtgattttttctttttctctttcaagctctccggttccgccctctaccacgccttcgtgctttaaaaccgcgacaacggttccgaaaaagcatttgcagtcaaacccgaagctcattttttctatgtactcgccgtcgagccttgccttaacgggaattgcaatttcatcccgtccgcttatctgtgccagacccgtaagcccggggcggactccgtttgcgccgtatttatcgcgctcggcaatcagatcctcctgattccaaagcgcggggcgcggtccgataatgctcatgtcacctataagtatattgaacagctgcggcagctcgtcaatcgacattcttctttcaaagcgctgaaagccgcttaacatactctcgggattttcaagctgatgtgtcggcatatcgtgcggcgcggttgtcggcattgagcggaattttattattgtgaaatattttttattctttcccacccgcttttgcctgaaaaacaccggtccgggtgaatcaagctttataattaccgcaacgataagcataggtattgcggcaaaaacaatacctataaacgaaagcacaatatcgagtactcttttaaaaaaattattatacacttatatatcacctgaacacagccgttagttatctgttaaattatatcacggcggcatataaatgtcaaacatcgaaatggggctgtcgagttaagacggccccggttttatataattattatgttgtatagcaaaccataggccaaagagccggggtttgtgcaaaagctgcgattttgcacatctaatgtctgccgtctaaaatctaatgtctaaattaacataagaccttatatttgcaaccgcggtggataactttgcccgatttataccgacttaatccacttttccaccgagttatccacttttttatgttaacttatgcattatacggtttatatttatattgaccttcaggtatcaagggcgctcttcaaaaattcggagaccgtgccgaggtaagcccttttatcggacatatagctcattccgtgcccggcattcgggactatcagaagctttttaccctctgcgcggcagtgcctgtgattttccctgcccatatcgcacggcacgaagcggtcgtcatcgccgtggataaacaaaaccgggatatcgcatttctccatcgcctgcaccgcagaatattcttcgatatcaaatccgccgaacagcattcctcccagtcttacaagcgcataggtcgggaaaacgggataatgcatttcgcgtatcacctttttaatgattgcttttggggatgtatagccgcagtctgccactatgcaggcaacatttttcggaagccctgagcctgccgccataagcacggtggcagcacccatggacattccgtaaagcgcgatcttacagctgccgcccgcctgcgatataacataatttatccaggtcaggcagtcgtaccgctcctttattccgaaggtaaggcactttccctcgcttttgccgtgagcgcgctgatcgacaagcagaacattaaagcccgaatcgattccgaatttaagcccgccgcaaaaatctctttccgcaccgcttctgtatccgtggagcattataagccacggagcgtcggcgcttgcaatatagcatttcccgaaaagacgaagtccgtcatatgatgtgacaacggcttccttatacggaatttcgagcgcatcgcttatcatttgcctcgcctcggcgctatagggtgcgtattgctcggtatcgggcatttcaaaaagggcttctctgctttgctccgggacggaaaacgcaagccgatagcaaaaatatgaggcggctactgccgccggaatcaaaagaattattgttaaaatcacaggcattaaaggctacactcccgaaaatgaatataaaggaaaattatgggcaaaaatactgataaaagaaggtgaattatggaaaataaagtgcgccgaaatatattaatcgcggcagcggtactcactgccgcggcggtgataatactcaccgttataggtctggcggcggaaaaccgcgattacgagcccgcctcctgggtacttaaggcatacggaaattccgttgcgctttataacgacgggaaaataagcgatgtgttcggagaaataagccttgacgagctgcctgaggaggatgtgcggattttgcggaacggaatcgcatttccgaccagagacgaggctgtgcaggcaatagaggattatgaataggcaggcggaaattcgttcccgtccgccgtgccgtataccgcacacagcttaaaattcatctggggtaattccgagaagcagaagagccgcagcagctgccgcaaccgcaaacggactgcggctgtgcgtcagccttatacggaattccgcaggctctctgtcgcgcccgtaaatatcagtgacagttctttgcagcgaaaccaaggcggcgctgccgccgacgcttgaaagcgtaacggtattttttccgttcattccgcagctgatgaccggaacgcagtttttcataagtaatttgagagcttcggaatttgagtcttcacaaacgccgatgctgccggacggaaaatcgatattttccgaatattccgtgacgatatcaaaatccgtttgtcttttcggaatacatcggtataaaatatcggaaatttccgtgccgcattttgtctttttgtccgcgaatataattatcataaagcgcgctcatccctccgaaattaaagctgaatttattattggcattaattcttattttatcagcacaaagtgaaaaagagccgtaaaacggctcttttccacttttaaggggtttgaggagagaacttctctttttgagagaaattataccaaaacgggtgcggctcccttttcggtacaagcatataataaactaaaattttttcatttttgtgaactgtttttaaatttttaaggaatataatatgtatttcagtcaataatattttcagaaaacgcccgtttgaaaggaaaatgaaaatatgaaatattctgaatacacttcaaaaccgaaatttaaaggcagcgccgccttttataccgtaattgcctgctgtctgctggcgcttggcggtgcttcctggtttgcggcgtcgaaaataagccgcagaagcagcgacggcaataactctccctcgcagattccggattcgccgcagtcaagcgccgccgagagtatttccgagccgcagtccactgtttccgagaatgtcgggaaaagcgtgtccgatgagccatactcttcaaaacccgatgacgccgagccgaaacccgaaagcaagctcccaaaaaaggttttcacgattcccgttcagggcgacatcataaaaaagtacagcgataaggagctgcagttttcggcaacctacggagatatgcggatacacacggggcttgatatcgcctgtgcggacggcacggcggtcagcgcctgctcggacggaaaggtattatcggtcgaggacaccgcatttttaggaacggtagtaaccgtcgaccacggcagcggcattaccgccaagtacgccgccttaaaggacattaaggtaaaggcgggcgataaggttgccgcgggagatattatcggagcgacagcctcaataccgggtgaatgcgccgatcaaagccatttgcattttgaaatatataaggacggtcatataaccgagccgctcaaggctttgggaatgaaataagcctgcccccgaaattatcgtttaggggcgcattacaaaacggtttcgacggaaaatattccgccgaaaccgttttgtaattttgttgcctttttgttttaattgtgttataatttgtaaccgtaatgttactgtactttctattcaaaaaggatataatatatacagatttaatttgttggatgtgttcgaatggtcttctcaagcttaccctttatattcctttttctgccgcttaatttgctggtttatttttttgccaaggatataaagcaaaaaaataccgtaatgcttatcttttcgcttattttttatgcgtggggcgagccgctttatattcttctgcttgtaggtatggcttttgcggactggtatcttacccttattatgtcacagtataaaaaaggctctgtcaaggcaaagctttttttggggcttacggtcggcatcgatcttatactgctcggcattttcaaatacggcagctttattctttcaaatttgaagtttttcaccggctttcccgcaaatgtgccgtctgtaatgctgcctataggcatatcgttttatacctttcagcttataacatattgcgttgatgtctacaggggcgacgctctgccgcagcgcagctttaaaaccctgcttctctatgtcagcctgtttcatcagtgcatcgcagggccgattgtccgctataaggatgtctgcgccgagctggagaatcgcagagccacacagatagatattgccgagggcattaaccgctttaccgtggggcttgcaaaaaaagcgataatcgccaacacctgtgcggcgcttgcggatactctgcttgtaccggacggcggggatttctcgcttcttgcttcaaagagcgcgctttcgctttgggtaggcgtgcttgccttcaccctgcagatatacattgatttttcggcatattcggatatggctataggcatgggtaaaatgataggaattcactataccgaaaatttcgattacccatacatttcctcgtcggtcagcgagttctggcggcgttggcatatcaccctcggcagctttttcagggattatctttatatcccgctcggcggcagccgccgcggcaagctcagaacggtgctcaacctctttattgtgtgggcgctcaccgggctgtggcacggcgcctcctggaattttgtgctttggggactttatttctttatttttattgcgcttgaaaagctgttcctttcaaaatatcttgaaaagcagcccgctttggctcatatatatttattacttatcgtcttcttcggctggatacttttcaagtttgaaagcgtaggagatatatggtgcgtgcttaaagggatgttcggagccaacggcaacgcattctccgattttgaaacatggacggctgtgaagagccatattataatacttttaatcgctgtcttcgcgtctacaccgattacaaagcgcctgtccgccgcgtttaagtaccgagcgctcagaaataacggcgcgctggcggtttattccgtgctgcagttcgtgattccggcggcattgctcataatttccgccgcggcgcttgtaggcaacagctacaatccgtttttatatttcagattttaagaaggaggcatttccatggctgaacaaaacaataacgcttcaagcacggaagaagtgcgccttcctccggtaaatatgcggaaattcagaataatgagcatatggtttgtgcgctttttcttcgttttgcttttttcctgctttattttatcgctcataataccgctgcgcccgaaatattcggaaagcgagaagcgggagcttgcaaaattcccgaaattcaccttcacggcgttggtttcgggcaagtattttgacggaataaacagctggtattccgacacatttcccttaagagaaaagctgaccgatatcaatgcgtttttcacgggtttgtacggtaagtccgatgtcagaattcagggtgatgttgaaacgggagacgatattcccgaaagccacccggatgattcatcgggtacagcgtccgatacatcatcagctgcttcctctgcggaaagcagcgagccgtcaaaagcagatgacacatcctccgcttcttcctctgcgccaagcgaggctccgaagccgcagactccggctcaaacccaaacaacgcagacactcggcgcgctgcttataaacggcgacacggcgtatgagtattataatttcgtgcgcggtactgcggatctttatacaagcgcgataaaccgcgccggtacgttgcttgcgggaaaaacaaatgtatacgatatgatagtacctacaagcatgggcattaccgcacccgataatgtagttgccaccataaacacctccgatcagaaaaaggcaataaattatatgtactcaggtatggggaagagcggcgttaagaccgtttcaatctacgatacgcttaaagcccgccgcaatgagtatatcttcttccgcaccgaccaccactggacggcactcggcgcatactatgcctactgcgactttataaaggcaaccggcggtacgccggcggcgcttgacagctttatcgttcatcagttcccgaattatctcggctcgttctatacctcgagcaaaaagctgccgcaattggcggcaaatcccgatacggtgtttgcttatcagccgaaggaaaccaacaccatgcaggtctatttctcggtaggcggccctgcaaagacggagcctataatttcggatatgaccaatgtttcatccaaatatctcacatttataaagggcgaccgtccgttcagcattataaataaccccgcaaagaacgacggctctgtttgcgtgcttgtgaaggaatcgttcggaaatgcgtttgcaccgttgctggttccgaattatcagacggtttatattgtcgactacagatatttctccggtacggtattcggcggcaagacctataattcgattccgcagctctgtatcgatgttaaggcaaaggatcttcttttcctgaacaacatttccgccacacggaataagggtcttgtaaattccataaacgccctcataaaatagctccgtatacaataagcctgcatcctccgcggcgggtgcaggcttatttttgtgagtgcgagacgaaatcacacaatgtgtttcattacttaaaacaagcacttttcgacttattgcacatatctgttcgtctctcatatttgtcagacctcattcacacaataatgatccttctcctaaccgaaagaaggtgttgtttatgcctgtttgattttttgctgtctgctttattgacatcggtccggttactatattcatgagaagttacttcctttcggtatttggttttggggtgaattcattataccgtattcggaagtcaacttctctttttatcgggtcgcatcattttaacacatacattttttaatttttcccgataattttcttgacattttgaaatgcatattgtattattgtattagcgtaataatacaatgaggtgatagaatggcttggagcttttcgacagacaggccgatttttcagcagattgccgatataattgttctgaagataataagcggggaatatccgccgggctacaggttgaatgcggtgcgtgatttggcgctcgaggcgggagtaaatccgaacacaatgcagcgcgcgcttacgactgcggaggacggcggaataatttatgtcaggcgtggggaaggccgctatgttacagaggatacagagaaaatagcggcgttcagaaccgaatatgttttaaagcagactcgtgaatttgcggcacggatgaaatctctggggcttgacggcggtgaaatttccgcagctttaaacagtgtactgaatggggaggaataaattgatggagaatattctc

SEQ ID NO: 635 - DNA, 3555 bp, Unknown
  16S sequences of unknown bacteria
ttcgggcgcggaaactgcaaggaagcgatttttgctctggaaaatgggattttccgacgcaaaaatcaccccgtccccgccgtacacgccgccggggacgattgaagtgcgaaagggctttgcctctctctttggttttgcgacagtctgtttttcctggacggagaatccgtccaggaaaattttcggctatttttcgggaacctccaggcggaaagcgggcgtttccatgagccccgcttccaccagcgaataagcggggctgaagcggtcgccagtggtttcaaaattttccgggccgtaagcgtaggcaagggcgggcacctggtgcagcgggccgaaggtgttgcgccgggtgagcacgtcggtgacgcgaagtacgccgttttccaccatgccggtaacgtccgcttcatacggctgccaggcgatcatggcgcgcttgccatttccttcgagcgtgacgcacgcgccggcgaagcggcccatttccagcacggtgcggccgcctttttccgcccattgcggcgctggcaccagataggtcagcttgcccgaatagaagggcaggccctgttcggtgacgctgccaacgcgcagcgttgcgggcaaggcggtcagcgtgcggcgcgcgccatccagccggacgccaaaattgcccatcaggtacagggcttccaggttggaactctcccggtagccggtgcgcagaatcacttcgttgcgccccagatgcaacagggaggcgggaacctcgtaggcggagaagcaggcatccacccaggagaagccggaaaccgtctgcgcaaggcgcgttccgttcaactcggtggtaaaattctggatttcctccatcaccaggtagagggggccttccggcagggtttccacctcgaaggagaagcgcagggcggcctcgccgcacacgggcagatcgcgctggccgataaaccagggctggagcatttcgccgccgcgatagggcaggtggaaggcgtcgcgcacgtggcggtcggccttgaggatttccagttcttcgctccacgcgccgccgttcagggaaacgctggcttgatccagcacgcagaggttcggttccgccaattcatagcgcagcgcgctggccgcgcattcctgccgggcgatggtctggcaaacgcggggcgctttcgcttccggatacgctccgccgatggaaaggagcagcatggctttcggcgcgaaatccagccgcacgtgcacggcgccttcgctttcgcgggcgggcaggcgctccaattcgccggtttcggggatgaaacgggtcacggggccatggcccgcgatggacagttccacgccgtttaccgccgcttcccggttgtcgttgagcaaaagcaggcgcgtttcgcccgccacccgcttggcttggcagagaatgtcgcgcgccggttccccgccgggcagggtgagactggccacttcgtattcccgcagcgccgccgcgagcgcctcttcctcaaagggaatccggatggcctggggccattccggcccgccgggcaggcagtccaccgccttgggcgcttcgccgcagacgatgagccgaccgccgccggcggcaaattcgcgcagcatgcgctcggtcgtgccgcgcacggtgtccaggccgcacaccaaaaccgcgtcatagcgggcctggcccacgcgcaggcgcttgccctctgccgcggcgtgctcggccatcagcccttcatcgccataatcgaaatcgatgtggcggcgctgcaatagatagaagagctgcgcataccgctcttccagcgctttcacatgcgcttctttggcgctcaacccgtcgcaccagccgggatggatccgggcccacacgctttccagcgggctcacgaccagcacgcggcagaccggctcgccatcctgcgcaaagcgggcgatgcgggcgtaatagtcctccacataggcgtattccttccaccacgcggattggtggaagatggaggcggggtaatcccgcttggcctgcccttccatggtgtaccaggagaggtgcgggcagcgcaggttgatgccatacagcgcctgccaatcgcccacggccttgtagttttcaaagcccatctgccagccggtgcagccgtccagctccgagagcaggcgcggcttgttcagttgacgggcgacggattgcaactgcttggcaatccaatagcagcggccgaattcgcccaggaagtcgatgccgggcagctccatttccgcgtagtagcgcatcatggagccggacatggccgtttgcgccgtgaggcaatcctcgtgcagcacgtggccggtgaggatcatccggtgcgcgcggcaccactggtcgatggggcgggcgaagttttccaggaacagttcttccaccaactccacatactgccacttgatttgggcgggcatctcgtcctttttgaggaacagcgcgggcaggttggccaacaggtcgtagccgtatttttcctggaagcgctccggcagcgccgccgtccaggggatttgccgttcgccagcgtccacgccctggccgaaggaggtcatcagagagccgcggtgcggttcatcggtgaaaatgcccaggatgctatcgccaatgcgcgcgccgcattcctccacatagcgctggtgggtcatttgcaggaaagtttccgtggcttcccggttcatggtgtccacataggtggtgccgttatagaaactgctgcagggcatttccaccacagcgaaccgcagcgccgtttcgcccgcctggggcgcttcgtccgccgcgagcgggcgataggaaacccaacgctccccgtccatgcgcacggcaaagcgggcgaggggcgtcccctccgccgcgtccgcgtcttcacacaggcgcaaaaagcgcatccggtaggcgggattttgcgtcaccgcgccgcccgctgtgccgctgggccagcggtcttcatcgtatagccacgcgctcaatcccagggctttgcccttatcggcgcaggcgttgatgaaatgaaaccattctttgctcaaataaggggtgcccaggcccgtgcgggaatgcataaaaaatccgccaaagcccatctgggcgagccgttcgatctgccggagcagctcttcgcgctccagctttccgttccaggcccagaagggaatggcccggtattgcgcgccaggcgcgcgtaattcctcggaaaggcgcatgctgtatcctcactttctgcgtgggccgcgtgcccacaatggttatctcgattatagcacattctgccatttctgtccatgatacaatcatcgtgcgctttttccaaaaaaatgcgcgccgccgtgagggaggccaaaggccgactaggcccaggcaatttggagggcgaagcccggaaatatgccgggccgtacccgcgcgccgccaaaggcgagtgcgcgggcgaaacaggcgagggcggtgcgaacgcagagaggcgaccatgctgaactgagcctgcaaataaaaagtcaagagggaatgaggtaaagattggcgagaggagg

SEQ ID NO: 636 - DNA, 4897 bp, Unknown
  16S sequences of unknown bacteria
gggcagctcatttcatggcggcggccgaagagggcggctatgcagtcaccccctataatgacggcgacaagggcgagatcatgtttgacgaggacggtcagttcggaaagcgcaacgacgtattttcggttccccgctcggctcttgtttcggcaaaatacggcgaggacgcaaacgcctataaattcttctatcttgacaaaatcgcaaatgggtcggtgggatattaccgcccgtcggtcaaaaaggcaataaccatggattttgacaaagaaaagctcccctacatcggcgtttgggtcaacaacggccgatttaagggaatgtataacatcgccatggaaatcgccacctccccctttgacaagcccgaaacggcaatcgaacggggaatagattttaaaatcgcccccggcgaaacctttaaattcgacatcaccgtcaacataaaataaacctttttgcaaagaaagcgttcggctcaaaggctgagcgttaataaggcagttttgcttcaaaacaacatctttttgtacaataacgcgttaaatcccacagatatgcgtcagcattatctgtgggatttgccttttcttgtatcaaaaatatattgttttgaagtgctatacagtttctaaactttgattttttatgccaaagtcgaaaaataaaacaaagctgtcgccttgcgaggcttttcggcaaaagcataatggatttatgcgagaaaccaatacttccttatgaacactcagccaaaccgaacgctttttgtttatttctgcttatttgacttttttattatcacaaaggctgccgtgcaaagcaggcaaagcgcggggaaaatcgcctttgactcgcctgttttcggcggagcctgctcgggttcaagccttttgagcaccgtatcggaaagggaaatttcctttgtgagagaggcgtcggaaaaatattttccgcagtctttgcagcgccaatattcgatgtttccttcgcttttcgttgtgggatttgcggcggggatgtgctcggcattttcgtgatttttttcgtcgatttgaccgtaagaggcagcgcagccttcgcagaccgccttttcgacacaattcgccctgccgccgaaacagccttcggtttcaacacctgacgtgcagccctccgacaggcacctgcgggtgtgggttccgtcacccgttgaaacccactttccgaaatcgtgagaggctttcgcttcggtcacaaaatatccgcattcgcaaatatcgtcggtggtgcagtcgccgtcgggctcggcaaaatggggtttttcctcttccgagacgctgcagcccccgtttgtgcattttttgccgtgaccgcttttcgtgacaacataatcacccttgaaatcgtggctttttgcggcgattgcctcttttccgcaaaattcgcacatcacgggagtggtacagtctccgtcatcatcaagcggcgtgtggccgaaattcaccgtgacggtcacttcggagacgttgccggccttgtcggtgacggtgattttttgctcgccctgcgacggttcaagaacaaaacggccgttttcgtcaagggcaatttctttgccgttcacgtcgaccgaaccgatatatttgtcctcaaccgtgacggtctgcgcctcgcagtaggttctgccgttttcgatttctccgataatcggcaccgtgccgtccagcacaataccctccgaacagatatatgaaacgttgccggcatcgtcggtcagcctcacatagataatatattcattgtcgggatctattccgaattcggcataatccttaaaggccgcatttgcgagttcctcctcggtaagctccttttgcgacagcagatattcgattttgacctgcccgccgctgttgtcggaggcgataacggtgacattctgcgtttccttaaagaacagaccgaaggttatgccctttaagaatttgttccacctgttgtccttgatgattatctcgcccgtcggattttcgacgtcgcgccacattgcggtcagcgtaatgctcataaccgaatcgtcggccgcaaggtcggcataggtcatgtcggcggttatgtcaacatcgccgtatttccagccgacaaattcatatccgtcctcccttgcggggggatttgcgccgtcaagtattttatcgctccaaagaagattcttatcctcaagatcggaaccgccctttgtgtcaaatcttacggtatatgcctttgccgtccaattcgcctcaaggccgatgtcctcaagaacgggagccgaaaagtcatattccgcaccgccgcagctccagcagccgagggtatatccgtcttttttgcagtcggcgggaacaacggccctttgcccgcgcagtatcttttgactctcaacggcgctgccgccctttgaatcaaaggaaaccgtgcgcttggcgctgtcctcaattttgccgtttccgctgaccgctccgtagaaaataccgcccataattttgccgttgttgacgacctcgccgttaaatattccgtcgataatgttgccgccgcaggtaaccttaccgttaacattgcagcttttaaggtcgatgtcgccgtctatcacggcgttgtcccccatttcaaagactattttatcatcggcgcaggaaagctttccgtgaacggcgctctcccctgtcaaaacaactttcgaagaatctcccggcatacccgtgttcataaccgtaagctcgcctgttacgctcgcattgtcgccgagcaaaagctcgcaatcattacgcatttccacggtcacgctgccgaaaagctgcacgttgtccttaatttcgacgcttttcgacgtatcgcttgttaaaattgtgacattgccgtctgccgaaccgagtttcgaatttcccaaaagtttcggagagctaaaaacgatttcttccgtcctgcaaatctcggcattatcgctcatggaaagcttaatcttcgggtgaaatacgccgataagctcggcaatttgtgcgttttcttcaatgcagatcccggcatcatcattcggatgttctacctctacggtgccgccctttgcacggccgccgaaaacaatgcttttatcgttgtaggtttctttcagacaaattttccccatgtttactgcattgcccttcattgtaaaatcgacatacccgtaaatagaaatgcttccttcgtttaccgaatttccgctcaaaaggaaggccgtgccggggtcgatgatcagtcgggtgttttcggcaatttttccgccgtacatatccagccttccgtttctaaacccaaagtttccgacgcttcccgacgccatgcagtcggtgacggtcagagcgccgtttgccttaattttgctgtcgttatttcccatgccgacgatttttctgccgtttaagcatatgctcacgccgtcctgcagctccgtaacgcccgccggcagggtcacatcgtttgcaaggtaataattccccgccgtcgttggcagcgagtccgacgaggtccacgcctgccataccgtctcggtgtgggttgtgtgtccgtcaaattcgtttccgccgcagaggcaatgattatgcgctccgaaaacgcaaaggtattttgcatttgatattgcatcgaagttatcggcctttgttggcacggccgacgccgcgtcaagggtggaagaggtaatcatactcattccgtccgaaaggtcaatgctcggattttcgctgccgctgtcgatgagctttccgtcatttccccccgcgaaaagctcgagaattccgccgttcacggtgattttgccgtaatcttcggtgtaatacaccgacggccaaacagcggctttatcgccctctattttaatctttccgccgtttaccgtaaagtcaagagatgaaatgccgtacttttcggaggaaacggatatatcgctgctttcgacaacaatatgcgttgcatctactataccgccgataaggtcgacgccctttccgaccgcgttaagctttccgtccccgcggaaggtcagcgtacggcccagaaaagccgaaatgcagtaaccgccgccggtttcttccaccgtgttttcaccgataagaacaatgtcaatgtcgcggttatagctttcgaattccgaatcaataccatatggcattatcgtaccgaagccggcagaagcttttatgtgggcgttatcgagcgttaaaacgctcttttcggtctcgccttcttccgcaagctcatatttgaccgttccgtcgccgaaaacatcgtccttgttcgaatcggtgacctcggtatatacaccgtcgttttcgagcatgatgggatagatatagtcatattttccgttttctccgaaattcggtgttccgacgattttcgcaaacttggggaggcgtacaagcgacataaattccgtatcgaaaaagtttacgggtttgccgaaattgggattataaagtataccctcgaccctgccgccgtaggcattgaaaagcggagtattcccgtagcttccgctaagccaaatcgcgcagccttccgagctgtttccgacggtaccgccgtagagattaaaggacgtccaatcccactcggtcacaatgcctacgttttcaaatcgggattcacccttattgatgatactgccgccgtacatattgaaatttccccgcacactcacaacggcaattccgttacagttctcgccgtaaataccgccgcctccgatacagtcggtcagggtaaaggaatgtgcaagtaaatactctttttcaaatatgagtgatttgccgttaagacagagcttgatttcgccgttattccaccccgcaacgtattctgtgcagcatgaagaaataatacaatgcag

SEQ ID NO: 637 - DNA, 32759 bp, Unknown
  16S sequences of unknown bacteria
atgctgtcaacaatattatagagagactgcacgagcagtgacagcatcaatggaactgccatggtgtacagcaaagggcggacaggcatatccgcaagtttatttttcctatccataaagacctcctgcggcaaaaaaataaacgtgaaatctacgaggataagctgttcctcatgatttcacgcttatataagccggctttcattttatatttatttcttgcatattataaagcataaaaaaagaaaaatgcaagaagatttttgcaaagaaaatcatttgaaattttttaatgaatcggttataatctgatttacagcgtgtggcgtttctgcgtaaatccagttgcagaaacgccacacgttttttgaaagtgaggggtgagtgatgataaaatgacggtaaatttaatagaaaaatcgtgtagctgaaatgcgtaagtccgggttttgatggacttacgtatttttttatttcagaaaaagaaaggtgacaaattatatgaatactggaaatcaatttttggaaacagaacgtataggaaagcttatgaaacaatatgcgattccttgcattatctcattgctggtgggcgcactttataatattgtcgatcagatttttattgcaaatgcaagctatctggggtcttatggcaatgcggccaacaccgttgtctttccgttgactgttgttgcactggccattgctgtcatggttggtgatggctgctgcgcatttgtcagcatggcgcttggcagaagtgagatggacaaggcaaaacgcagtgttggaaatgcggttataatgatccttgtgggaagtctcgtgttgacggttgtttatctgatctttgctgatggtatcattgctatgtttggtggtacagtaaataaagaaaccttccattattcacaggaatatttcttttatatcacactcggtattccattctatatgttcggacaggctatgaatccaatcattcgtgcggatggaaatccgaagtttgccatgttctccacattggcaggagctgcgatcaatatcgttcttgacccgattttcatctttgtttgcaaatggggcatgatgggagcagcagtagcaaccgtgatcggacagattgtaacagcaggtttggctgtgtggtatttacttcatatgaaaattatcaaaccggcatcagcagactatgttctgaagaaaaatatatgtgaacgaacgctgatacttggtattaccagcttcctgtctcagattagtcttgtggcagcaatggcagcaatcaacaatatgcttcgtaaatatggagcgcttgatatgatatttgggcaggagcaatatgcgcagatcccgatggctgtggtcggtattgtgatgaaatttttccagattgtcatttcgatcgtagtgggtatggcagcaggatgtatcccgatcattggttacaatatgggagctgagaaaaaaatgcgtgttcgggagttgtttacaaaattattgcttgcagaagcattggtcggactggcagcgcttgtgctggcagagggatttccaaggcaacttatcgcaatctttggtgcagcgaacgagagcagttactacacggattttgcaatcaaagcattccgtatatatttatgcttgatggtcctggcctgcgtcaataaagcgtgcttcattttcctgcaggcagtaggcaaagctttaacatccacacttttgtccatgttccgtgaagtggtatttggtgtgggatttgcgttgctgcttccaatcttcttcgggctcgacggtgtgttatattccatgccggtctcggatgctctgacctttgtaatctcggcgatcatcattgcaaggacatatcgggaattaaatgtagaaagtgatacctgtaaataatcaagtcctgaataaatcctttctttctgcggaaaataactgcaaaaagaaaggatttgtttgtatgggaaagaatgcatggaaagtggggatggcatctgcattggcggtaggaacaggaaccgtccttcttgcaaagacaagaaagcgaaagatgcagtctgtgggtcagatgagacagacgaagattccggaatccgactatcggaataccgagcggggcagtcagaaaaagaacagcaagggtatttattatgcgaagggaaactatgaggcatttgccagaccagagaaaccagtgggaatagaaggaaaaactgcgtatctgatcggaagcggccttggttccctggcggcggcctgtttcctgataagggatgcacagatgccaggtgaaaatattcatatactggaagccatggacattactggaggttcctgcgatggaatccatgatccgaccagaggctatgtgatgaggggcggacgggagatggaagatcattttgagtgtctgtgggatctgttccacagtattccatcactggagattccgggggcatcagttctggatgaattttactggctcaataagcatgaccctaattattcgttgtgtcgcgccacgaaaaaccgtggggaagatgctcacacagatggaaaatttcgtttaagccagaaggggagcatggagatcattaaattgtttttcaccaaaaatgaagatctgtatgacaaaaccatagaggacgtgtttgatgatgaagtattcaagtctgatttctggttgtactggagaaccatgttcgcctttgaaaactggcatagcgcactggaaatgaagctgtattttcaacgttttattcatcatatcggaggacttccggatttctcagccttgaaattcaccagatataatcagtatgaatcattgattctgccgatgttaaaatatctggaacatgcaggggtggagatccgactgggaatggaagtgaccaatgtaagattcgtgatcaagggtgagaagaagacggcaagagccattgagtgtcggatcaagggtgaaaagcaggagattccattgacggaggacgatcttgtatttatcacaaatggaagctgtacggaaggaacgatttatggtgatcaggatcatgcacctgtgggaaatgcagaagtgaggaaaagtggctgctggaatctctggaagaatattgcagcacaggatcctgcctttggtcatccggagaaattctgttctgatattgaaaaaaccagctgggaatcagcaacagtgactacttccgatgaaacgatcctgtcttatattcggaaaatctgcagacgtgatccgcgaagcggacaagtggtgacaggaggaatcgtaagctgtaaagactcaagctggctgctgagttggaccatcaaccggcaggggcagtttaagagccagaagaaggaagaaatctgcgtctggctttacggactgttcaccgatgtgccgggagattatataaagaagccgatgaaaatatgtacgggaaaagaaattactgcggagtggctgtatcatctgggtgtgccggtgtcagagattgaggaactggcagagtatcatgcagtttgtgtgccaacgatgatgccttatattactgcattttttatgccacgggcggcaggtgaccggccggatgtgatcccggatggctgtgtgaatgccgcatttttaggacagtttgcagagacgccgcgagatacgatctttactacagaatattcggtccgtactgccatggaagcggtctatggattgtgcggcgtggatcggggtataccggaagtatggggaagcgtctatgacgtgcgggaactgctggcaagctcagtcaaactgatggatggaaaatctccgctggaactggaacttccgctgcctcttgaaaaagtaaagaagaaactattgaagcgggtggatcggacagcagttggaaagctacttcgggaatgcggaatggtaaactaaacaaccaaataaaaaagggaaactggctatctgccaatttccctaaaaggctataattgttcaacaacgactttgcatctttttttataaaatgcgattccgtatgctaaaatattatcccttccttcatcgcgtaaatattcatcgtacctgcgatcgtgaatttgtgccattgcatttgcacaagcacgatccagatcggtaattttatctacgctctttaattcaatgataattccagaatccggatcctctgttttgataagtatatcggcaaagccttcacctgcctcgcgatttgaacgaaccacccaggaggcatttccgacaagcattccaaacaaaagcatgtggtaggaattttctttttctttctcagatccttttacatcaaaaacactgatagaattaccaagtatctgttttaaatgtttctcgatatccgcagcgtttccagatgtgaatgcattccaaaaggatttaagttcatctgtatcttgtaagacgctttgattaaataactcctgaatctgatatttgtagacttcccgaatttcttcatttgggatttttagcctgaaagaattcggagttggagtaccgtctaaagtaagatatccagttgtaaataagacactccagaggttattgatactgccatcgatttcatcatatgtcagatccagacgaatggacttttcaatagattcaccggccacaagtcgttcaatctcatctctggttgtattgtcagctatcttgataaatcgcttcacaagatcatttccgcttgtgttgatccaataagattgaggatgtgcatttgaattaacacagagactgtcaacatggttgatgacatcccaaggacaatagatatctgcatcaccgaagcggtaaccatcataccatttttttgtttcttccaggtgtgattccagaccataagatgccagcaacatctttacttcttcttctgtaaatccaaactgttcatcaaatcgaatatctgtgatagaaagtactctaaaattattgaggccagtaaaaatgctctctttcgatactctaaggcaaccggttaaaacggcaaattgtaaatattcgttggtttttagaactttaccaaataagccgcggataagagctaccatttctttataataaccatgctggaaagccttatccaaagggacatcatattcgtcgatcaggatgatcgctttctgaccataatgtttatagagaagctgtgtcaatgtccataaagaggaaattagctgacctgattccattgcatattgaccgtttcgcaacgcaattaatccatggtacctggctttgtcattttctgttaaattggtgctttctgctaaaaaatgaaatcgctcagcttctgttgcgataagctcaattaattgatatctagcatcttcgaatgaaagaccatcgacacctttcaaagaaagaaaaataacagggaatttccccatgtatttctcgcatatggacttattacttgaaatataaagaccattgaagagcgatttgtcagtacctatttcaaagaagtgacggagcatactcatatttaaggtcttgccaaaacggcgaggcctggtaaagagattcacctctccccatctttcaagtaattgttcgatcagcttagttttatcaacatagaaaaagttttcttttcgaattttttcaaagctatctattccaataggtaattttaataattctgacatgaataggtttctcctctcttatgcctgtttgaggcataaggatacacgcttgttatgtataattttatcattttgaagaatagatagcaaggttatacttgtaaatatgatgcaaccacaaaatataaaaagaagtcaacattgcccaaagggctttgctggcttcttatttgttgatacgattgttttcttgtcaggcaaattccttagaggacttacaatcaagggctttttcagccttttcaagcactacggattctccgcagtgtgaacaatattcggtgtcccagcccttcagattcaacagctttccacagtgagggcaacggacagtcaggaatccgaaaacgattccgataaccgctacaaatccacccatgatgaatccgggtgacatggtatctgttccgaataagacagcggaaccattggcaatgatcagaccactaaatataagagcatacataatttttctacatacatttggatttttcatattctttacacctctcttttatgcctgtattataggcaggcgtatgtaaaaaacactagcgcagcaacgtaaaatatatgtaaaaatctggtgaaccggatcatcagatcagggaggggtatttttttattggaaaagttcatgaaatattgtatagtgtaaagggtataggagaaatacatgtggaaagggttgaacagaagatggatcagcacgtttacgaagaatatatagctattttgaaggaggaactggttccggcacttggatgtaccgaaccgatcgccattgcttatgcggcagcaaaagcccgtgagattcttggaaagctgccagaggagatcgtggtgagctgcagtggaaatattatcaaaaatgtgaaggctgtcattgttcctacgacgggagacttaaaagggattgaaaccagtgccattcttggagctgtaggcggtaatgcagagaagaaactggaagtgctggtggatgtgacagatgaggatcttaagattacaagagagctcctgaaaaagaagatctgtcatgtggaactgctggaaggggtatccaatctgcagattatcgtagaactgaaggctggtgaggataccgcactggcggagatcgcattttcccatacgaatattgtacgactggagaaaaacggacaggtaatcttttccaaggagatggaggcagacagtgcagcttccacagacaggacacttctgaatctgaaagatatttatgaatttgcccagacagtgaagatcgatgagatcaaggatctgattgaccggcagctggcttataacatgagcattgccaaagaaggtctgacaaaatcctacggagcaaatgtaggggcaacgattctgaaatattatggtgatgatgtacgaaatcgtgccaaagcccttcctgcagcgggaagtgatgcaagaatgaacggctgcgtacttccggttatgatcaattctggaagtggcaatcagggaatgacggtcagccttccagtggcggtatttgcggattatctgtttgccgataaggaaaaggaatatcgggcactggtattatccaatctggtggcgatttaccagaaaaatgagcttggaaagctgagtgcatattgtggagcagtgtcagctgccacaggagcaggtgccggtattgcctatttgcacggagcggattttgatacaattgctgagacgatcacgaacacactggccaatgtatccggtattgtctgtgatggagcgaaagcttcctgtgcagccaagatagcatcatctgtagatgcagcgatcatggcgtattatatggcagcagagcacagaggcttccagagcggtgaaggtctggtgaaaaaagatgtagaagcaactatcaagagctttggacggatgggaagagaaggcatgcgttctacagatgtggagattctgaagatcatgctggagccgtaatgataaatgacaggggaacagaggaatgccacagaagcagggaatccaactgaataaatatactccggattatgtggtattcgatctggaaactaccggaatctcccgcacctttgatgaggtggtggagatttctgcggtgaaggtgcgttccggtcaggtggtggatgagttcagcacactggtcaatcctggacggcacattccggcaggagccagccaggtcaatggcattacagatcagatggtggctgactgtccgctgttttcacaggtactgcaagaatttttgaatttcacagaaggattgactctggtgggacacaatattgccagcttcgatatgaaattcatctggcgtgatgcagagaaatattacggagagttggttcctaatgattatgtagatacgttgaaggtggcaagacggcatctgtcagaacttcccagacatcggctggtggatctggcagagtattatggcatatcgccggagggagcacaccgggcactcaatgactgccgcatgaaccagcaggtctacgagcggatggtagctgagatacgtaagaagcgggcgatacagcatgaatatacagggcggaaggcagagacggacaatactggcgtctcaaagaccgaaggaaatgctgcagacaggaatgggatcgcgaagcagtcagcgaagcccgtgcatcccacggtgacacttcgtggtgtggttgagcggatcacttaccagaatccggagaacggttacacagttctgaaatgtgcggtcaagaatcataaggatctggtgacggtcatcggaagtcttctggatgtaaatgtaggatctgtcttgctgatctatggcaactggaaggtggacagtaagtatggcaggcagtttgtggctgagacttgggaggagacactccctgcaactatatatggaattgaaaaatatctgggatctggtctgatcaagggtgttggaccgaaatttgccaaacggatcgtaggactgtttggcacggagacactggatgtgattgaatgcgagatctcccgtctgaaggaagtagaaggaatcggcgagaagcggatccggcagattaaagagagctggcagaagcaaaaagagattaaaaatgtcatgctgtttttgcaggatcatggagtcagtactgcatatgcagcaaagatctatcgacagtatggcaatgaaagtattgaaaaggtgaaagaaaatccatttcgactggcagatgatatctggggcatcggatttcggacagcagatggaatcgcacagaagctgggatttgaaaaagaagcctttgtacgattacggagtggaatcttatatacactgagcagtctggcggatgaaggacatgtctatgccagaaagcagcagctgatcgaccgggcggcggaacttctggaggcggaagagtcttcggtgatcatgacgctggatcagatgatggcagatcaggatctgttcggacagaagatcgcggaagaagaacaggcgatctatctgcaggcattttattatgcggagacgggaacggctggaaagctgaagcggttattggaggctccggcggaggatcctttgtggaaatccttaatggctgccagggagaagaccggcaatcaggagctttccatagatgtcagaaagattgaacagaaactgcagatggagtatgatggagtacaggcggaggccatcagacaggcggcgacctgcaaagtgatggtgctcacgggtggtccaggaacaggtaagaccaccactgtcagaggcatcatttccgcatatgagacatttggattgaacatattgctggcggcaccgacagggcgggcagccaagcggatgacggaagcaacagggctggaagcaaagacgctccaccggctgctggaagcaaaaccgccggaaggttatcagaaaaatgaagagaatccgctagaaggggatgtgttgattgtagatgagtgttctatgatcgatattgtgctgatgaatgctctgctacgcgccattcctccacatatgcgtctagtgctggtgggtgatgttgatcagcttccatcggtgggggcaggaaatgtactgcgggacctgatggattcgggtgtgtgtaaggtagtgcgtctgacgaagattttccgacaggcgcagtccagcaggatcatcatgaatgctcatcggatcaatgaaggactgatgccggatctgtctaacgggaagacgaccgatttcttctttacagaaaaggaggatccggaagaagcagtggctgagatcgtgaatctggtgcagacgaagctatccagatattaccagacaccatcctctcagatccaggtgctcacaccgatgcagaaaggcgtggtaggtgcgaccaatctgaatctggcattacaggcggctttgaatccgacgggcgatggcttacggcgcagtggttatatattccgggtcaatgacaaggtcatgcagatccgtaataattatgataaagagatatttaacggagatatcggaatcgttgcctccgtggatattcaggggcggacacttcaggtggattttgacggacatctgatcgaatatgatgcatcggagctggatgaactggttcatgcttatgcaactacgatccataaggcacagggaagtgaatatccgattgtcgtgatgccggtgctcatgaatcattatgtcatgcttcagcggaatctgatctatacaggcatcacgagagcaaagaaaatactggtactggtaggaacgaagaaagccatttcctacgcagtacatcatgtaacagtcaaccggcggaatacgctgctgaaagaaaggctgcagggaaagatatgagattactatttaaacagcgcatgttttcatggtttgacagctatgatatttatgatgaaaatgaaaatacagtgtatgtggtcaaaggacagttcgcctgggggcattgcctgaagatatttgatgcttccggatgggaagtggggacagtaaaacagaaagtactgaccttgcttccaaaatttgaaatctatgagggtgatcgctgtattggatacatcagcaaagacctgtctttatttaagccgaagtataatattgattttaatggttggcatgtgaagggtgattttctggagtgggattatacgatcaccgatgcttatggcaggagtgtggcttccgtttccaaggagatcttccatctgactgatacatacgtgctggatattcaggatccggcggatgcactgtacgtgctcatgtttgtgcttgccattgatgcagaaaaatgttcgagaaattagaagtacattaatcggaaaggaatgcaatagtaacagatgaatcttccacagatatttgtagaacaaatgaaagaaatattaggtccggagcttccagaatatctggaaagctacgagaaaccgaagtttacaggcttaagagtcaatacttccaagatctctgtcgaggaatttgagaggatcagcccattcaagattcttcggagagtaccatggactcccaatggatattattatacagaagaggatgcgccgacaaagcatccttattactatgcaggtctttactatatccaggagccaagtgccatgacgccggcaagtgtccttccggtggagccgggagaacgggtactggatctgtgtgcggctccgggtggaaaagcaacggagcttggtgcaaagcttcgccatgagggtctgctggttgccaacgatgccagcgcatccaggacaaaagctctgttgaagaatctggaagtatttggtctccccaatattctggtgaccagtgagatgggagacaagttagaccggtattttcatgaatattttgataagatcctgatcgatgctccatgctccggtgagggaatgttccggaaacaggctcatatgatcccagcgtgggaacgtcagggaccggaggtgttttccaaaatgcagcgggagattctggatcaggcagcaaacttgctgaagccgggtggaaccatgctttattctacctgtaccttctctaaactggaaaatgaaggaagcatggattattttctgagcaatcatccggagttccatctgctggatattccgcagagtgaaggctttgcgccaggacagccagaactggtggacagtacatttccactggaaaaatgtgttcgtctgtttcctcataaaatcgatggggagggacattttctggcattgcttcagaaagatggagagcgtacgccaaatgcactggaggcagctggaaaaccgtcgaagcttccgcaggagctgacagattttctgaaagatgtgtccatgcctgttgatacaaccagaattcagatcaaagataccaaagtatttttgatgccggagggcttaagcggctgcaaagggcttcggttcttacgctccggtctttatatgggtgaacttctgaaaaaacgatttgagccgagtcaggcatttgccatggttctgaaaaaggaggaatatgcatcagtcatcgatcttccagctacagacgagcggatcatccgctatctgaagggagagaccatcgagattgaggatggagagagtaccaaagatgcaggctggcagctggtatgtgtggatgggtatccgctgggctggggaaagctgatccgtggaactcttcggaataaatatttctccggctggaggatgaacgcatgatgcgcctggataaatatttatgtgagaccggatttggcaccagaagccaggtgaaagatctgttgaaaaaaggacaggtcatggttaatggcgaagtggtaaaaaagcctgaattaaagatcaatgagacaacagatcagattctctgccagggggaaaaagcatcttatcagaagaacatctatctgatgctccataaaccggcgggtgtggtatctgcaaccgaagacaaccgggagaaaacggtgctggatcttgtgagaccggaagatcggaaaaatggtctgtttccggtgggaagactggacaaagatacggaaggcttattgcttttgaccgatgacggtgagctggcacaccggctgctgtccccgaaaaagcatgtggataagacttactatgcaaagatcgacggacaggtcactgaggaacatgttaagcagttccgtgagggtctggatattggagacgagaagaagacactgccggcagttctgacgatcctgttatccggtccggtcagtgagatcgaggttacgatccacgaaggacggtttcatcagatcaagcgaatgtttgaagcggtgggatgcaaagtgacctacttaaagcgtctgtccatgggaagtctggtgctggacgagacattgccgccggaagagtaccggccgttgacagaagcagaactggaaggtctgacgaagcagagaggaactgataagaatgagtgacagaatgagatttctgccggtgagcagagcggatatggaggagcggggtatcgatcagctggattttgtctatgtgatcggtgatgcctatgtggatcatccatcttttggaccggcgatcatcagcagactgctggagagtcatggctatcaggtggggattattgcccagccggatttccgtcatgcggaaagtatcatggcactgggagagccacggcttgggttccttgtcagcgccggtaatatggactctatggtgaatcattattcggtggcaaagaagcatagaaaagtggattcctacacaccgggcggagagatgggaaaaagaccggatcgggcagtgatcgtctactgtaacctgatccgtcagaaatataagcatgtgccgatcattgcgggaggaatcgaagcatctcttaggcgtatggcacattatgattactggtcagacagcctgcgcagatcgattttgctggaaagcggtgctgatctggtatcttatggtatgggagaaaggtcgatcgttgctattgcagatgctctggatgccggtatgccggtaaaagacattacttatattccgggaactgtctgcaaggtgcgctctctggatgagatcagtgactatacggtgcttcctgactatgaaagcatctgtaaagataagaaaaaatatgcggagagcttctatattcagtacagcaatacagatccgttttctggaaaacggctggtggagccttattctcagaactgctttatcgtgcagaacccggcttcagaaccgctgaccatggaagagatggatcaggtctatgatctgccgtttcagagaacatggcatcctatgtatgacgcagcaggcggcattccggcactttccgaagtgaaattcagtctggtcagctgccgcggctgctttggaggctgttccttctgtgcactgaccttccatcagggacggatcattcaggcgagaagccatgagtctctgatcaaagaagcgaagctgatgattgaagaatcagattttaagggctatatccatgatgtgggaggacctaccgcagacttccgggcaccggcctgtgagaagcagatgacaaagggcgtatgtccacataagcaatgcctgttcccggaaccatgcaagaatctaagagcagatcacagcgattatattgcactgcttcgaaaactgcgtgcattgccaaaagtaaagaaagtgtttatccggtcaggcatccgatttgattatgtgctggcagacaaaaagaacacatttctggaagaattgtgccgttatcatgtgagtgggcagttaaaggtggcgccggagcatgtgtctgatccggtacttgcctgccttggaaagccaaaggcagcagtttatcaggagttctgcagacaatataagaagatgaacgagcgtctgggactgaagcagtatctggtaccctatcttatgtcctcccatccgggaagtaccatgaaggaagctgtggaactggcagaatactgcagagatctgggttatatgccggaacaggtacaggatttttatcctacaccgtccaccatctctacctgtatgtattatacgggactggatccaagaaccatgacagctgtatatgttccgaaggatcctcatgaaaaggagatgcagcgtgcactgatccagtatcggaatccggcaaatcgtgtactggtgcgggaagcactgctgaaagcaggaagagaagatctgatcggatatggaccaaaatgtctgctaagacctgatcaggcgcgaggtgacggacgtgcggcacatagagacgataatagacgtgtggagaaaagctctgcaggtcgaggacggggagcatcgtctggaagaactgctgaccgtaacaatacgcagagccgcagtcagaaccagggacagactcaggaacgccgcccgacacagaagaaaaagaccatccgaaatgtacacagaaagaagtagagacagatgaagaacaagttaaacaaaggaacctacggatatttagacagactgaaagctcatgaatggaaaaaggcagcattatttctgtccgttccgatcattatatttttagtggcatgggcgatcaacggaacccgcaatacagtggttactgtcatggtcatcgttggctgtctgcccggctgcaatcaggtggtacatgcccttctggcaagtaaatatcattctatggacaagagcctgtgtgaggagacggaaaagctgaagggagactgcatttccatctatgaaaatgtatttaccacatatgagaaaaattattatgtggactgtatcgtgttgtctggacgggatgtgatcggatatgccagtgataagaacactgacagctccaggctggaggcgcatatcaaggacattttgaaaaaaaattcttataagcagaatgtgaagatatttacggaaaaacgagcatttatggatcgagtggaatccttgggaaccagagaaccggaggaggttccgttccgtgaggatgaccgttatccaggcttaagccgcgatgagattgtcaaatatctgttgatggcaattacattataatattatgtatagtatgataaagtgagattttagcaatgaaattaatcaccgtacatgagcaggaggaaggacagaagctcttaaagttgttgggaagttatctgaaagaggcttctggcggctttctccataaaatgcttcggaagaaaaatattacattaaatgggaaaaaggcagatggcagtgaaaaattgaaagctggggatgagattcgtctctttttatcggatgagacttatgaaaagtttgcaggaaaacagcagaccgcaaaagaacagtttccaactgcaaagctggacatcttatatgaagattcccatgtgctgctggtgaacaaaccggcgggcatgctgacccagaaggcagcctataaggatgtatctctcaatgagtatgtcttagggtatcttagtaaaagcggtcagtggagcccggaagaaaaagcatttcgtccgtcagtatgcaaccgtctggaccggaataccagtggaatcgtcatctgcggaaaatccatgatcggtctgcagagaatggcagagcttttgcaggatcgctcccttcacaagtattatctgtgtctgatccatggtgccatgaaggaaggacagcggctggaaggatggcttcggaaggatgaaaagtctaaccaggtggagatcctgaaagctccagtggaagatgctgctcagatcatcacagaatataagccaatgaaggtttcctctgaggctactcttttaaaagtgaagctggtgacaggaaaacctcatcagatccgcgcacatctggcatctgtgggacatccgatcatcggagatcctaaatatggggatgtgcagatcaatgagtactatcgtaaagaattcaaactgaaccgtcagttgctccatgcgtggcgtctggagtttccggaactggcagcaccgctgacggacttgtcccaaaaagtggtggaagctcctgtgccggagctgatgaataaaattatgcagaaagtgatgtgacttttatggcaacctggaattccagaggattgagaggttcgactctggaggatatgatcaatcggaccaatgagcgataccgggaaaaaggactggcattgatccagaaggtccctaccccgatcacccccatcaagattgacaaggaacaccggcatattacgcttgcgtattttgatcagaaaagtactgtggactatattggagcagtgcagggcatcccggtctgctttgatgccaaggagtgtgatgtgaccacatttcctatgcagaatgtgcatgagcatcaggtgcgttttatggatgactttgaacggcagggtggaaaagcatttttgatcattcattttacatcagaacagaagttttactatttacatatccgtcagctgctgagattctggaatcgggcgcaggagggcggacgcaagagctttcggatggatgagctggatccggcatatttctttgagagcagcaaaggatatctggtgccgttcctggaaccgctgagtctggatcttgagcaggaacaggaaagatgagcatgcgctgaagcttggattttgaatccgtggttgacaattcctacgtgcatggtataataacgattgtttaatgaattagcaatttaccatagtaaagtaaaaggagaagcccgatgtacaaacagatattacacactccggaaggggtacgggatatttacaatggcgagtgccgccgcaagcagtttattcaggatcagcttcatcaggttctgttgagttatggatatgaggatattcagacaccgacatttgaatttttcgatgtattcagccgtgagatcggtacggtaccgtccagagaattatacaaattctttgaccgggaaggaaatacactggtgcttcggcctgatgtgacaccgtctattgcaagagcagtcgcaaaatatttcacagaagaggacatgccggtccggctgtgctacatggcaaatacctttatcaacagttcggaactgcagggaagattaaaggagactacgcagctgggcgctgaactgatcggtgacggcagtgcggagactgatgcagagctgctggcactggtagtggaatctctgttaaaagctggtcttaaagagtttcaggtgagtgtgggacatgtggatttctttcagagccttctcaaagaagcaggtcttccggaagagatggaactggaacttcgggaatttatttccaataaaaatatttttggcgtgaaagagctcctggatccgctggaattgccggatccgctgaaagaggcactggcaagtattccgaacctgtttggatccgtggatgttctggatcgggcagaaagctgtgcggtatctgcggatgccaaggctgcgcttgcccggctcaggaagatctaccgtctgatggagtactatggatatgagaaatatattacattcgatctgggtgtagtaagcaaatataaatattatacaggaatcatctttcaggcatatacctacggaaccggtgaggcggtggcaaagggcggtcgttatgatacattgatggatcattttggaaaaccggcaccagccattggatttgtctgtgtgacagacaggctcttaagtgcattgaaccgtcagaatatccgcgtgggcatgaatcgtccactgactcttctcttatattatccggaagaagcgcagaccgcgatcgcatgtgcaggaaagctccgtcagacgcaggaagacacggagctgctctgcatggatgcggataagaatgttgacgattaccgggcttatgcgaagaaacgggatgtgtccaagctttgttactataaggatggacattttgtggcagagaccctgaaagagattgagagaccgggagtggagagaagatgagatacctgacttttgcccttggaaaagggcgtctggcaaagaagacgatggagctttttgaacagatcggcatcacctgcgaggagatgaaagacccggataccagaaagctgatctttgtaaatgaagaactgaaactgaaatttttcctggcaaaaggaccggatgtgcctacgtatgtagagtatggtgcggcagatattggtattgtcggcaaggataccattctggaggaaggccgccgcatgtatgaggtgctggatcttggatatggaaaatgccgtatgtgtgtgtgcggaccggaatctgcaaaggagcttctggagcatcaggaactgatccgtgtggcaaccaaatacccgcatattgcaaaggattatttttacaatcgaaagcatcagacagtggagatcatcaaactgaacggttccattgaactggcaccgatcgtagggctgtcagaggtcattgtagatattgtggagaccggatcaactctcagggagaacggactgcaggtcctggaagaggtttgcccgctgtctgcccgtatggtggttaatcaggtcagtatgaagatggaaaatgagcggatcggcaagctgatcgcagatctgaaagcagtcttataggaggcagagaagatgagaatcgtaacgctgagcaaggaatccagacagaatctgctggacagcctgttaaaaagaagtccgggaaactatggacagtaccaggatacggtacaggagatcgtggaccgggtaaagacaaaaggagatcaggcactgtttgaactgaccagaaagtttgactgggaaggtatagatgcttctaatgtgaaagtgacagaggcagaagtgcaggaagcctatgacaccattgatccgcagctggtagagacaatccgcaagtctctgaaaaacatccgtgagtatcatgagaagcagaagcagtacagctggtttgatactaccccggagggaacaatgcttggccagaaggtaactccgcttaccagtgcaggtgtctatgtgccaggcggaaaagcagtgtatccgtcttcggttctgatgaatattgttccggcgaagatcgctggtgtggcacatgtggtgatgtgtacgccatgtaataaagaaggaaaagtgaatccggctgtgctggtggcagcaaaagaagcaggtgcagatgaagtctataaagtaggtggggctcaggctattgcagctatggcgtttggaacagagagcataccaaaagttgataagatcacgggtcctggaaatatttttgttgcactggctaagaaagctgtatcaggatttgtcagtatcgattctattgcaggtcccagcgagatcctggtactggcagatgagacagccaacccaagatatgtggcggctgatcttctgtctcaggcagagcatgatgagatggcaagtgcgatccttgtgactaccagcaaagaactggcagaaaaggtgtcagaggaagtggatgcatttgtaaaaatcctttccagaaaagagatcatcagcaaatcactggataattatggatacattctggtggcagagacactggaggatgccattgagaccgtcaatctgattgcatccgagcatctggagattgtgacaaagaatccttttgaagtgatgatgaaagtaaagaatgccggagcaatattccttggaaagtacagcagtgagccgttgggggattattttgcaggaccgaaccatatcctgcctactaatggaactgccagattcttttctccggtatcagtggatgatttcatcaagaaatccagtatcatttactattccagagaggcactgcagcgtgttcacaaggatatcgagtattttgcaaaggctgaacagctgactgcacatgctaattccattgcagtgcgttttgaagatgaaaactaaaggagaaggtgtatgagcagatcagcaagtatcgagagaaatacaaaagaaacagatatccgtgtaacgttggaactggatggaaccggtcaggcagaactggatacagggattggattctttgaccatatgctggatggatttgcaagacatggtctgtttgaactgaatgtttatgtggacggtgatctggatgtggactgtcatcatacggtggaggatacgggtatcgttcttggaaatgcgatcaaggaagctgtgggagacaaaaagggtatccgcagatatggaagctgtatccttcccatggatgaggcgctggtgctgtgtgcagtggatctgtccggcagaccttattatgtatcagatgcggtgttttctgcaccgatgatcggagaactggatacagagaccatcagtgagtttttctacgcagtctcttacagtgcagctatgaatctgcattttaaggtgttgtcaggaacgaacagccatcatatctgtgaagctatgttcaaggcatttgccaaagcactggatatggcagtgtccgtagatccgagaatcaccgatgtattatcaacgaaaggcagtttataagatgaagatcaaacatttagtaccggttatgccggtgagaaacgggaaagtaaacggacaggacggcgtgaagctcgctggcttctatagtgacaatggtgcagatgcaatccttgtctttgatctgtctgattcggatgaagagcatgagaaaaatattctgctgctcaaggagatggcacgccgggtggaaatccctatctatgcaggtggtcatattcgtcgtgtggaggatgtaaaaaagattctgtatgcaggctgccagaaggcggtgctcaattatggaagatccagtaatgtggagatgacggaagaggtatccaagcgtttcggacaggaaaagattgcattcagcatttcggatgctgctcagtacacagacaagttgccggaatatggaagcatgatcttctggtccggctcagacagtagctgtccgttcggcgagaagatgccggtgatcagcgtcagctcggctgcgacagatgaggatattatcagtgtactgtccaataaatgggcagatggtattgcaactgcgtatttttcaacggaagtggctgattttatgtctctgaagcagaaatgtgcagaccggggacttcagatggatgtgctggtcagcagcctttcctgggatcagttccgtccaaacagcgatggactggtgccggttgttgtacaggattacagaacagatgaagtgctgatgctcgcctatatgaatgaagaggccttttatacaactctgaagctcggaagaatgacatactggagcagaagtcgtcaggagctgtggaccaagggtatgaccagtgggcatttccagtatgtaaagcagttgtccatcgactgtgataatgacacgattcttgcaaaggtaagccaggtgggtgctgcctgccacacaggcaaccgtacctgtttttacagagatctggtaaagaaggaatttaacaatgtgaatccgttggaagtctttgaaaatgtatatcagatcatcaaagacagaaaagagcatccgaaggaaggttcttacaccaattacctgtttgataaaggaattgataaaattctgaaaaaagtaggtgaagagtgtacggagctggtaatcgcagccaagaatccagatccagaggagatcaagtatgagatgtctgatttcctgtatcatgccatggtgctgatggtagagcgtggcgtgacttgggaggatattacggaagaactggcaaaccgctagagaagagtacttataaaagccggccatacgagtggcagatccggaatgagagccgggacatatgcatacactgtacggaggtgatgcatatgggcgcatacagagaacagctattaagagaaaccggagggagatctacgaaggaactgcatatgcagaaccggggtgaagagatgccctccggttttctgactacatttaagatccggttcactatcagcctgtgtctgtttggattttttgcatggatgagtctgacaggaaaggaaatctatcatatatcagctgatcagattgaagcagctgttgaatcagatattctgcaaggtcagatttctgactgtctgataaaattaggactttacgaatagggtgacagatgctagaatgtctataatgttcggagtctgaagctgactccggtaagtgacatgaataacattttttgaaaaataacaatggacaaaggatgcaaagaaatggaacttctggaagagagaattagaaaagacggtattgtaaaagaaggaaatgtactgaaagtggacaattttctgaatcatcagatggatattgaactgtttgatgaaatgggaaaagaatttaagcgtttgtttgctgacaaaccgatcaacaagattcttacgattgaagcatcgggaatcggaattgcctgtgtcgtggcaagacattttcatgtgccggtagtatttgcaaagaaaacacagagcatcaatattgatggagaggtatacagctctaaagtagagtcctttactcataagagagtctatgacgtgatcgtatcaaagaaatatttaagtccggatgatcatgttctgattattgatgatttccttgccaatggctgcgcagtcaatggactgatcgagattattgaaaaatctggtgcaacagtagaaggaatcggaatcgctgttgaaaaaggctggcagatcggcggaaagacccttcgtgatcagggctatcagctggagtctctggcaattgtggaaagcatggatccggcaaccggagagattgttttccgtcactaatgaacagaagaaaaaccatacggaagacaccggccgtaagtaccggtgtcttctcttgcttaaaggagagttatgcgtaaattagctttatcagacgagatcctgatgactgtcgagaagccggcacgctatattggcggagaagtcaatgcagtcatgaaggataaagatcaggtggacattcgttttgctatgtgtttccctgatgtgtatgagatcggaatgtcccatctgggtattcagattctgtacgatatgtttaaccggagagaagatacctggtgtgaacgtgtatattcaccgtggccggatcttcataaagtattgaaagagaaacagattccattgtttgcactggaatcccaggatccggtgaaaaaatttgattttcttggaattacaatccagtatgagatgtgttataccaatattctgcagatcctggatctgtcaggcattccgctgtctgcagaagaccgtaccatggatgatccgtttgtaatcggcggcggtccctgtacctataacccggagccgctggcagagttttttgacctgttctatatcggagagggagagactcagtattttgccctgctggatctttacaaggaatggaaaaacagcggaaagagccgtcaggattttctgaaggcagcagcccagatcccggggatctatgtgccttctttatatgaagtaacttatgcggaggatggaacgatcgccaagatgaaaccgatctgcccggaggcgccggaaaaggtgaagaagcagatcgtcatggatgtgaccaacaccttttatccggagaaaccggtggttccttatatgaaagcaacacaggaccgtgtggtactggagatccagagaggctgtatccgcggctgtcgtttctgtcaggcaggtatgctgtaccgtcccaccagagagcgtgatctggagatgctgaaaaaatcagcttatgcaatgttgaaaaatacaggatatgaggagatttccttaagctccttaagctccagcgattattcccagcttggtgaactggtgaatttcctgattgatgaattcggctccaagggaatcaatatttcccttccttctttaagaatcgatgcattttctctggatgttatgagtaaagtgcaggatattcgtaagagtagtctgacctttgcaccggaggctggaagtcagagacttcgtgatgtaatcaacaagggtctgacagaagaagtaatcctggatggagccggacaggcctttgagggcggctggaaccgtgtaaaactttattttatgctgggacagcctacagaaacggaagaagatatgaaagggattgcatggctggctgagaagatctctgagcggtattatgaggtgccgaaggagcagagaaatggaaaatgccagatcgtggtaagtacatcgttctttgtgccaaagccgttcactccgttccagtgggcacagatgtgtaccaaggaagagttcctccatcgtgcctatgtggtgaaccatgagatcaaggagcagaagaataagaagagtatcaaatataactggcatgaagcggatgtgacggtgctggagggaattcttgcccgtggtgaccggaaggtggcaaaagctatccgcagtgcctatgagaaaggatgtctctttgattcctggggtgaatattttcataatgatctgtggatggaagcatttgcccagactggagtggatcctgatttctatacagtcagagagcgttccgaagaagaagtattcccctgggatttcattgatatcggcgtgacgaagaaattcctgctccgggaatggaaaaaagcgcatgaagagaagatcacgaccaactgcagacagggatgttccggatgcggtgcggctacatttggaggaggtgtctgctatgaacattagagtccgtttcagcaaacatggatgtctgaaattcatcggacatctggatgtgatgagatattttcagaaggctatgcgccgtgcggaaatagatatgtgttattcagaaggcttcagcccgcacatgatcatgtcttttgcttctcctctggggcttggacttgagagtgatggggaatatatggatatcagcgtgaaacagtctccgtcttcaaaagaagcagtggagagactgaatgcggtgatggcagaaggtatcgaagtgttaagctggagagaacttcctgagaatagcaaaaatgccatggcaagtgtggccggggctgattatgaagtccgtttccgagaaggctatgaactggaagaaggctggaaaaagaagctggaagagtttcttgctctgccagagatccgtatcatgaaagagactaaaaaaggtgagcaggaagtggatatccgtccatgggtctatgattatcatatcaaagaccagacgattttcctgaaagtatccgcaggaagcgttcataacttgaaaccggagcttctgctgaaagccttcggagattgggccggtgtggagattcccgcatttgccctgctgatctgcagaaaagaaatgtatgcagatgaaggaagcgagacagaacgcaaactggttgcactggaagaactgggggaagagattggatagtacaagactgttcacctgcatccaggagggtgtgctcgcggatgcattgtatgaagatggaaagctgatggaattgtcgctgcatccactggagcatgcgtccatccttggaaatatttatatcggaaaagtcagaaatattgtcaaaaatattcaggcagcatttgtggagatcgagaatggtatgctttgttatcttcctttggaggatgcacaagcaccggtttatacaaagccgaaaaaagaaggacagcctctggtgcagggggatgaactgttggttcaggtcagccgggaagcggtcaagaccaagcaaccgtcggtgactaccaagatcagtatgaatggaaaatatctggtcttcacaatcggaaatggaaagcttggctgttccggaaagctgtcaggggcggagaagacaagacttcgtcagtggggacaggaacagaaacttccagaagatctgggcatgatcatccgaaccaatgcatcaggtgttgcagaagaagatctgaatacagaatttgtgcgcctgatggaacagtatacctatctgaaaggtccggcaactcacaggacagcctgctcctgtgtgctgcgtgccagaccggcgtatctaagttctgtgttgggaagcagaagcaattttctgaaagaaatcctgacagatgataagaaaatctatgaagagctgtccgcatttttgcaggaagaaatgccggaagattgtaataagcttcgattttatgaagacagaagttatccgctgaaggcagcatggagactggaaaaaggcatggatgaggcgttgtccacaaaagtgtggatgaaatccggtgcctatctcattattgagccaacagaggcattgacggtgatcgatgtgaacaccggcaaatgtgtgactgggaagaataagcaggaaacgatccggaagatcaatctggaagcggcaaaggaaacagcaaggcagctcagacttcgtaatctgtccggtatcattattgtggattttgttgatatggaagatccggaggatgaacagagacttctggagaccatgcgggaacagttaaagtatgatccgatgaaagcagcagcggttgacattacttctctgggtcttatggaagtgacccggaaaaaacagcggaaaacattaaaagaacaggcaaaggagtgcggaatcttatgatcaatgtacaggcaaaaaaagaaaacggacattataaaagctttcacatcaatggacatgccatgtatgcggaggcaggttcagatatcgtgtgtgcggcagtgtctgcactggtgatcaatacgatcaattcgattgaggagtttaccgatgatccatttacctgtgattgtcgggacggaatgattgagagctgggagtttaccaatgatctgtcagcagccaccgagcttctgatggattccctgatgcttggccttaccaatattgtggaagcctatggagaagaatatctcaaagttgagatggtggaaaaataagatatgaataagatagttatcggatccacagatcgatctgcaaaaagaatagagatcagtgctgcggcactccacatcattgcgatgacttttatgctgatggatcacctttgggcaaccttgcttccggcacaggactggctgacctgcattggcagaattgcatttcctgtctttgcatttatgacagtggaagggtattttcatactcataacttaaaaaaatatatgcttcgattgttgctgtttgcattgatatctgagattccatttgatttgatgtatgggggaacatggttttatcccattcatcagaatgtgatctggactctgctgatggggcttcttggaattcatctgatggagacagtacataagaaccagaaaagatggttatacgttctgacagcattcgttacagttgtatttggaatgattttcgggactctgtgtatggtagattactatggcgttggtgtattgacagtctttgtcttttactttttccgaggccggagatggtggtgtctgttagggcagttccttgcactttactggttgaatgtggagcttttgggtggtttgatgtatcctgttcagttattcggagcagaatttgaagtttgccagcaggggctagcattattggcactgatccctatctggctgtatcgtggtcgtcagggatatcatagcaaaccattccagtatgtctgctatgcgttttatcccgttcatatgctggtgcttgtgttagtattaaattttgtgaatcgataagatcctcaaaatcgaaattatgaagaaaatgtatccttgacaaccgatagaagacgaactgaatagtaaatgtaatacataataatgcacatccttatagcgatttatgtatcctgaaaaatggagagaatatttcgccagaagggtgtgcttttttgcaatagaatgtattggacgtcacaagggaaaatgttataataagaatcaggtatacaatatcagaaggacacttatttatggaaaaattaattgattttgattcttatccggttagaacaactttacagattcttttgcaggataaaacaactaaaaataatatcatctgggctacagatgcttacgctgaaagaggacatggttttcaggataaaaatcatattgatatcatggctattaaagggcttgattcgatagatttacagtcacgtacggaaaaggctatggaagaacagcaggaacgaacccgaaaaaaagcagaggtttttacgccagtgtggctgtgcaataagatgaataattacgctgatgaacaatggtttggaaagttaaatgtatttaatactgaaaataaggaagaacataattggacggtgaatagcaacagaatccaatttaatgagaaaaatacatggaaatcttatgttgactcacgacgtttggaaatcacctgtggtgaagctccatatttagtatctagatatgatgctacaactggtgaattgattctgccaccgtttcgacggattggtatactagatcgtaagttgcgagtagtaaatgagaatgtacagaataatgatgaatggttacattggactttgcgggcttatcagagctgctatggatatgaatatcagggagataatcttttaattgcaagaattaatctgattatgacatttgcagattattttcgtgaacgaatgggaacagagccggatgacaagatattaaaacagtttgcaaatgttattgcatggaatatctggcagatggatggtctaaaagatacagttcctctgggaaagcctcatgaagagtaccatcagatgtcaatttttgatatatttgaagaatcaaaacaggaagatattgcacttccttgtagaattaaaaactggcgtgcaaacgaaacagtgatatataaagatataaagaagggtgagaatatggggaaaaaattatttgatttttgtataggaaatccaccgtatcagatggagcaggtttctataaatccagatggttcattaaaaaattacgcaccaccagtatataatatttttatggatgcagcttctgaagtatctaaaagagtagaattgattcatccagctagatttctttttaatgctggtagtacacctaaagcttggaatgaaaaaatgttaaatgatgagcactttaaggtgcttaaattcgagccgaatagtgcagcgtattttccggcgttatcatccccaattaaaggtggtgttgcaattacgtataaagatgatacacaagtgtttggcgctatccgtgcctttgcgcagttccaagaggtaaatacaattgcacataaggtgacatgcagaagtgatttttcttcattttcagacatagtgtattcacgtacttcctaccgttttactgaaaatatgcatcgagataactcttttgcgcgttataaagaagataaaaatggtaataatattggtcgcttaagtaaagggcatgattacgatatggcttctaatatttttgaacgtattccagaaatcttttttgatgagaaaccaagtgacggaaaagattatatcaaaattcttggacgcgaaggttcaaaaagagtctataaatatgtgcgtcgtgaatatgtcaataatgtggaaaatatgggattctataaagtattgattccacaagccaatggaaatggaagttttggagaaattataagtcaacctgtaatagaaggaccgatggttggtaatacggaaacttttatcagtattggaaaatttaaagataaacgagaggctgaagcggttgtaaaatatataagtactaaatttgcaagaactctcttgagcattttgaaagttacacagaatggtaataaaccagtttggaagatgattcctatccaagacttttcatcaatgtcagacattaattggtcaaaatctatttatgaaattgatcagcagctatatcagaagtatgatcttacagatgaggagattcagtttattgaaacaaatgtaaaggagatggtataagatggcgaaaatcagcattaacactgcacaaagagtagttccaatgatctatgcatataccactccggaaattcggaaacatgatggctggacaaaaataggatataccgagcaggatgtaaataagcgtttggagcaacagatgcatacggcagatgttgaatataagttggagtggaaaggaaccgctatttatgatgacggttcaggcgatgtatttcatgactctgactttcatatgtatcttactaagagcggcattgagagaaaacctagaacagaatggtttaaaattcttcctgcattaagtcaaagtatgttttattctttcaaggcggatcgcggtcagcttcaaggaacagaagttattgattatgcacttcgaccggaacaggaaaaggcagtaagtaatgcactcgattactttaaactccatgagcatggacaattcttgtttaatgcgaaaccgcgtttcggcaaaactctggcgacatacgatctttgcaaacgtcttggtgctgtcaatattttaattgtaaccaatcgtccagccattgccaatagttggtatgaggactatgaaaaatttgttggagtaaaatctggataccattttgtaagtactgttgacggtattcagggaaagccttatgtcatttccagaagcgaatacagtaagattgctgcttatgaagaaaaggaattttgcggatgtatcgaatttgtttctcttcaggacttgaaaggttccctttattttggagggcagtatgataaactgcgtgaaatctgtggaactaaaacacatccaatgatttgggatattcttgtaattgatgaagctcatgaaggagtggatacctataaaacagatgtggcttttgatcggatacagcgtaaatataccttgcatctgtccggtacaccattcaaagcattggctaacgataaatttgatcaaaatgccatttataactggacttatgcggatgagcagaaagcaaaacgggaatttcaggcagtacctggagaagagaatccatacggaaaactcccacagctcaacatgtttacctatcagatgtcagaaattatcaaagaagagctatctcagagaattgagattaatggagaaactgctgaatatgcttttgatctgaatgaatttttttctaccaatgcttccggcaaatttatttatgacgaatcagtagataaatttctggacgcaatgacggaacaagaaaaatttccattttctactccagaattacgtgatgagttgaaacataccttatggctgttaaatcgcgtggattcggcaaaagctttggcgaaaaagctgcatgatcattcagtgtttaaaaattatgagattgttctggcagcaggtgatggaaaactggatgaaaatgaggaagcggatgataaggatattaaaaaagcatatgataaggttacaaatgctatcaagaaatatgacaaaaccattaccttgtccgttggtcagctgacgactggtgttacgattccggaatggactgctgtactcatgctgtcgagtttgaaaagtccggcgttgtatatgcaggctgcatttcgcgcacagaatccatgtctgttttccaatggaatgaaacagttccgtaaaaagaatgcatatattttcgactttgatccggcaagaaccctgattatttatgaacagattgcaaatggactttcggaggatacgtctggtgaaaagggtgattctgatacaagaaagcaacatgtacgggaacttctgaactttttcccggttgttggtgaggatgaaaatggagaaatggtactgttagatgcggaaaaggtactttctattccgcgtaagttgaagtcacaggaagttgtccggcgtggattcatgtctgattttctatttcagaatattggtcatatcttcaatgcgcctcaagctgtcattgatattttgacaagtatggaagctgttaaggaaccgtctgcaccggttggagtgaatcctaatactgccgaagagctgtccatgaatgattc

SEQ ID NO: 638 - DNA, 13422 bp, Unknown
  16S sequences of unknown bacteria
gagagaatcttctctctctaccttataattcaaacgttgttaactatgattctttctgaaaatgcgtctaaaaaataggaaatcgttcttttttattgattttcattctcataggagggcaaaaggagggaaattgcatccttttcccatttatgcagataaacaaaaagcctgtaaacgtactgtttacaggcttttaatggtagcgggggtgggatttgaacctcacgacctccgggttatgagcccgacgagctaccaaactgctctaccccgcgacgacttaaaatagtataaagcactcttgactatttgtcaagtattgtttccagtttgctttgcaaatatccatctaagccatctttatcgctgacaatgatcgtttctgtttgtgcattttccatgacagatgcaatcacagccgccccacacacaaccacatccgctctctttgcctccatacccggcaaacgctttctttcctccctttgcatcgctgtgagtctatggtaccaggcgtgtatcatctcgtatgaaagcaaaaagccatgcaccttgtcggattgatataccggcaatcccagctccagcatcgctagctgcgttgcggttccgcccactgccatcatttcttttgcctttccctgcaaaatttctgatgccaatacactcgtctgttctttgcaatgatccaacaacgccactgcttcgtccttttgtatgggatcatgctttagaaattcttccgttagcgtaacacaccccaacggaatggattttccgttcagcacgcctcctgcttccattgtcagctcggtagatcctccgcctacatccaaaacaggccgtccattggcctggcatccataataagcagccttggcctcatcctctccagaaagcagctcagcagcgacccagccgctgtctgtcaatcgttgtaaaaaagctatgccattgtccgcctgcctggccgcgctcgtagcatagcaccaaacgggccgcaaagccccctttgccaccgcatacttagcaaactcgattacggcactctctgtacgcgccatcgcctcttcacagagatgctttttctgtgaaaggccttgcccaagccgtgtgatacatacccttttttcttcctcccatgcctgtcctgcttgtctgcgcagcaacagccttacggaatttgtgccaatatcaatggcagcccatgcccttttcacgtgaatcctccttacgaaaaaaccgccacgttgggcgggcggtttttaccggcggcctttgccgccactctttttccgaatattgcgctttacatccaactgccgttcctccgattgctttaggaaacggctcagcgtgtcttcaaactctgctttgctttgccttggcggttctggcggcaatgcctgccgaatggaaaggcgaagcctcccattttcatcctcatccagcagtttcacggtgacctcatcccccactgccaaatgctcattgatgtccttcacatatcctctggctacttcgctgatatgtaccaggccttttcttccatcctccagctttacaaacgccccgaaggtggttacgccctctactaccccgtttagcagctcacttgtttccgccatattgtcttatttcagctccttagtgatatctctattattcttggggaatgctgtccaatacaaacctagtttccccatccttgacccatccaagcttttcccgcgcaatgctttcgatgtattcatcggtattggcggcctccagcacatgcgtcagcttgtccttttccaactcgttgtccgcttgctgattctggagatccgtttgtttgctgcgcagcctgttcaattccacttcctgatgccagaaggtaatccccacaaacaccagcactgtgcccaataccacagcataaaaccggcgtgtgacgcggaactttctcttttttgcttttgtttcgctcacagattgccctcccaactcgttaaaatccatcggatttcgggattttgttatttagtatagattactctgttttcgtctttttttcaacccttgccttgtgcttttcacagattcgtttccattttgccaaacacgcttttcttccacgttctatccattgcatagccttggcgcccggccccaaatagaaaatcgtaaatcctaggaaaaaagcaaagaaggaaaatgcgcgcaatgcgccttttgcgacaaaaaacaggcatgccgcgaaaatgcccgcagcccccaggcaaaacagaagatcccaaattgctatctttcccttttttgtgcaatgacgacggaaaacagcacagcaagtataccaaacagccgctgccatgcctgcacaaaaaaacatgacaaactggcccggctgtataaacatccctcccatatcaacgcctgaaaatgcgggcgagcaatggcctggattcctcttcgtcgtcctgataggtcaccccgtcgatcagcccagacacaataaactgcccatcctcgagattcagccggtcaatatgcaggccctctccctcgatgctgagcataccgactgcggtaaataatatgacctcttcttcgcaaaagctgcccagctcctctaccccggtcacaatcgccttttgtctgctttccatctgcagcgaatggctacccaccatccgccttgtttccatgtctctctgcaaagtaaaaaccctccttcattaaggagggtatgcgtatgtggttgtcattatgtgtacaaagtattttttagcttctcacaagatattctgtgataaacatatccaaatcgccatccattacgctttggatattgcccgtctctacccccgtcctatggtccttaaccatggaataaggatggaacacatagctgcggatctggctgccccattcaatctttttcatatcgccggcaatttccgcctgtttttcttcacgctcgcgctccttgagctccagcagtttacttttcaacatgcgcattgccgtttcacggttttggatctggctgcgctcgttttggcattgtaccacgatgcctgtcggaatatgcgtaatgcggatggcagattccgttttattgacgtgctggccgccggcgccgctgctacggtaggtatccaccctcagctcgtccatattgatctctatctcatcgtcgttttcgatcatcggcatcacatccagcgaagcaaacgacgtatgacggcgtccggacgcatcaaacggggaaatacgcaccagccgatgcacgcctttttccgcttttaggtatccgtatacgtcctgtccgctcacttcaaacgaaacgctcttgatgcccgcctcgtcgccttccagcagatccaacagctttacctcatatccctttttttcgcaataacgagtatacatgcggtacagcatctgcgtccagtcctgcgcttccgtaccgcctgcgccggcatgcagcgacaagatcgcatcattgtgatcgtactcaccctttagcattgtagccagcctcagctgttctacgcggccgtctagcgactccgtctccttttcaatctctttggccatgtcatcgtcatactcagccatgaccatctcacaaagatccagcgtatcgcttacgccgtcatgcagctgctcatattgctgaattctatcgttgacgtccttaagctgtttattcaccttttgcgctgcatccgggtcgtcccaaaagcccggcgcctccatctgttcggaatatcccttggcctgttccctcagcttggggaggtcaaagggactcacctgccttttgaagcacttccatcatctgttccagacgggatttgcattgatccagttgaatcaaaattctctcctcctacgcgtttttgccacaacagtttttgtattttttgccgcttccacacgggcagggatcgttacgccctacctgcggctttgccttggcgggctctttgcttttacccttccaggattgatcggcgttttccaccgtagcattggcttcctttgctacctgcttgcgttccggcgcagactgtatattcaagtggaacagcatcatcagcgtatcctcttgaatgccatgcgtcatattttcaaacatatcgtagccttcaaatttatattccacgacgggatccctttggccataggcacgcaaaccgatgccttgccgcagctgatccatctcatcgatatgatccatccaatggtcatctacgcagcgcagcaaaaccacgcgctcaatttcccgcatatccacattggactcggcgattttctcttccctctgttcatacgcctggtgtaccaaatcggtaatgcgctttgtcaggtctttacgcgtcaaacgatcaatgttttccccgtcttgtacgatgcgcacgccttgcggcaggcacagcctagcaaagtaggcctgcaggccgtccagatcccattcttccggcagcacgttctcctggcagtaaatatccacagcccgctgcaccagcgtatcctgcatctcctggatgttggccttcatatcctcgcccatgagcacggcgcgccgctgtgcatagatgatttcacgctgctgattcatcacatcgtcatattgcaaaacatgcttacgaatttcaaagttgcgcgattcaatgcggcgctgcgccgattcgatctgtttggacagcatctttacatccatcggcacctcgtcgccaggattcagccgctccatcagcccctgtatgcgttcagagccgaataggcgcatcaagtcgtcctccagcgctacatagaatcgagacgagccagggtcgccctgacgcccggcgcggccgcgcagctggttgtcaatccgacgggattcatgccgttctgtaccgatgatgtgcaggccgcccgcttccacaaccttggcatgctcctcttggcataccttattaaatttatcatacagctcctgatatttttcacgtgccttcaaaatttcttcatcctgcgtatctgcatgggatacggcatcctctatcctttcatcctcgtatttgaggcggcgcatctctcttcttgctaaaaattccggattgcctcccaagataatatcggtaccacggcccgccatgttggtggcaatcgtcaccgcgccgtacttgccagcctgcgccacgatttctgcttcctttgcatggtttttcgcgttcagcacctcatgctttacgcctcgttttttcagcatgctagaaagcagctcgcttttttctaccgaaacggtacctaccaggatggggcgcccgctctcgtgtacctcaacgatctcatccaccacagcccgcatcttaccgtctatggtagagaatacaacgtcgttttcatctttgcggatcatcggcttatgcgtcggaatactcacgacatccaacccgtagattccctggaattcctcttcctctgttttggccgtgcccgtcataccgctaagctttttgtacatgcggaaatagttctggaacgtgatggtcgccagcgtcttgctttcattttgcaccttcacgccttctttggcctcaatcgcctggtgcaggccctcgctgtaccggcgcccgatcatcagtcgtccggtaaactcgtctacgatgataacctgcccttcctgcacaacatagtccacatcgcgcttaaacagcacatgggccttcaatgcttggttgatatggtggttgagctccgtgttgtctatgtcggaaaggttgtccacatggaacgcctgctcagccttgcgcaccccttcttccgtcagcgttaccgccttcatcttttcatccacggtatagtcgtcttctgcttttagccgctgcacgaatcggtctgcacgggtatacatctccgtggatttatctccacggccggaaataatcaacggcgtcctggcttcgtcgataagaatggagtccacctcgtcgacgatggcataatgcagggggcgctgcaccatctgctctttgtagatcaccatattatcccgcaggtaatcaaatccatattcgttgtttgtcccgtaggtaatatcgcacgcataattggccctgcgctcgttggcgtccatatcatgaacgataagccctacgctcatgcccaaaaagcggtagatcttccccatccactcgctgtcgcgctttgccaggtaatcattgaccgtaacgatgtgcacgcctttaccttccagcgcgtttaagtaagccggcagcgtcgcaaccagcgttttgccctcgccggtacgcatttcagcaatgcggccttgatgtagcacaataccacccaaaacctgtacgcggaaatgcttcatgccggtggtccgcacactggcttctcggacagcagcaaacgcttccggcaaaagatcgtccagcgtttctccctgttttaatctgtctttgaattgctgcgttttcccccgcagctcctcatccgtcaatttcgcatagctttgttccagtgcttctacctggtccgctatcttattcaacggtttgattgggtcattgcccaatatttttttgaaaaaggacacccctagccctccttatttgctttttcctaaaattggtcatcgtccattgtatcatcattttttcggccaagcaatgaaattgccgttaactctcggggaaaaaggcccttttctccctttttaccgcccgaaccagcctctgcccgggaaatatcccttggccgataaaaagagccggcggctgccggctctataagcatcgggctatctggaagtttcaatcagcccatagttaccatccttgcgcttgtagatcacattgatctctcctgtctcgccatcctcaaagacaaagaaggaatgccccagcatatccatctgaagcgccgcttcttccttcatcataggcttcatcggaatgctctttgtgcgcacgatcgtaggctgtgcctcctcttgtgctgccagggtttcatccgccgttaaaaactggggctccatctccttgagcgccccatcccgcagatggcgctcccaccgcgtcctatgctttacgatttggcgttccagctttttacaggcgttatccagcgaagcatatacatcaccggtcgcctcctcgctgcgtaacaaaccgcccccaaaaatcactgtgatctccacgacctggcggccccgcagcatggacagcatcaccttggcctccgtatctttccggaaatacttatccaatttgtccacacgttttgtgatcacgtcccgcaaataatccgagacttccataccctttccgttgatcgaaatacgcatctatttcactcctttcaacgttcacataacgttcatatatagtataccacgcaacccatggcaaatacagcgccgctgtggcaaagggccaacaaaatcagagaaaaatcctacaaaaaagcccgcatactgcgggctttgggtacaggggttactgattgcgcatctgtgcaaagcattcactgcaatagaccggtttgtcgtttttcgggataaagggtacttccgtctccgcgccgcattttgcgcaaacggtgcgatagcttactttttcgcggtgcgcatttttctttgcagccctgcattcacgacaccgaacaggatcattcaagaatcctttttctgcgaaaaattcttgttctccagcggtaaatacaaattcctgtccgcagtcgcggcacacaagcgtcttgtcctggtacatttttttccctcgctttgattttttaacaacagtcgaacagcatcggctgacctggtctttgtccccacatccgccggctggaaggttcgctcctaaggcctttgcctccccactactacccctctcaggaatcttacatttgacggatgcccaaccgaagtttgtctttcctacaaagcaagtgcctggccggtcttacctctaaactgccccatgatcaccgctctttgagcggcttacgtggatcgcttcgcccgcagctggcatcgattttcaaccacagacccgagttcgtccaaccattattgtaccctcattgtagtggagaaccatccaaaaagcaacagatatttttaatttcctctctgtttgtaaggaatttaattgttcctatcgatttttcgccaagcttcttttcatttctttatgcttggcacaccgtgcatacccatacgctggcgccttttgcctctaatgcatccgcgcatgctcttaccgtacagcctgttgtaaccacatcgtccaccaggcagatacgctttccttccactgccgcttctgcttcaaacgcaccatatacgttggctcttctctgtaaagcgcccaacagcgcctgctgctcggtatgccgtatacgccgcagccaatccggctgcacatcagcatccatccaagctgccatgccctctgccaacaacgccgcttggttatagccgcgttcacgcagcctagctttgcccagcggtacaggcaccagcacctccgcctccagccctctctggcggcatgcctgtgccataacacagcccagtgcctcagccagatatctttgattgtgaaattttaggccttttaccatttcctccgctgttccagtataagaaaacggagatatcacagcgagggattccttgatcgtcaacggctcttcccgatgcggcaactcggcccagcagcgctggcaaaagcctgtattctctaccatctctcgttcctcgccgcatacggcgcaccggcacagttctggcaaaaacaaagatttcagcccctttcccattgccgttaatattttcatggcgccgttccgtcctgccccagcatcagcgccagcccgctgtatcgctgctttgttttattgttggcaatcatttgctggatcacaccttttcgcccaatcaatatgacatgctttttcgcccttgttaccgctgtatacaaaaggtttcggttatacagcatcggcgtaccgcccaaaagcgcaatggcgaccctatcaaactcgctgccctgcgatttatggatgctgatggcataggaaagggtcacttcgtccgcctgggcaaaatcatattccgataccctgtcgtcatcaaactgcacggtaaacatttccgcctccaattgaatggaggtaatgaccccgagttctccattgaatacgccttttccccgttccagctcctctcccctgtcgcgcgtccagggctggttgtagtcgttgcggatctgcatgacttgatcacccacgcggaaggtctgcccaaaacgggcaaactctgcctttctgcgccccgccggattgataagcccctgcagtttgccattgagcgaaatcacaccgctctccccttttttcatcggcgtaatcacctgccaatccccttgtgcgcatagctgctgcaggtgatgccagacttgccccgggttttccgcctgccacagttcaaacccctgccccgggaccggcatctcccctcgattgatgcgcctggcattgagggagatggcgcttccctctccctgtctaaagatggtatccagcgccgtaacaggaaagtggccgcattggataaggtcatgcagcacatggccagggcccacggaaggcagctggtcggcgtctccgatgaataccacccgcgtcccttgcgggattgcccgcagcaaatgcatcagcaaaaaggtatccaccattgacatctcatctacgattacggcctctacctccagtggatggtcctgatccttgccataaatctcttcgttctcctcaccccggccatattccagtaggcggtgtatggtatgcgccgcacagcccgtagcctgctccatgcgtttggccgcgcggccggtaggtgcacagagcgctacttccagccctgcctgctcaaataaggacaaaacgaactgaacaatggtggtttttcccgtgcccggcccgccggtgatgatggaaaccggcgacgccaccgccgtttctatcgctgccctttgctgtgttgccagtcgtatgccgctgcttttttgccggcgttctatgccatctgctacctctgtcctaagcggcgccaattccgcttggcaaagctgtttgagcagcatcgcgcattcctgctcagcacggtaatagccagccagatataccggctcgtttttcccctcgcccagcttcaatacgccagtttgcagcatgcgcaccgcagctcgctgtacccgttccacatctgtgtgtagctgcttggcagtaaagggaattaaaatctcgctcggtaaaaacatatgcccttctccggacgccagctgcaacgtatgccgcagccccgcctccatacgaaacggcgcatccgcctcaatgcccatcttctgtgcaatggcgtccgccgtcttaaagccgatgccgaaaatatcatccgacagccgatacggattctcttttacccttgaaacagcgtcctctccgtattccgctgcaatgcgaatggcctgcgataccgtgatcccatattccgaaagtcctgcaatcacctgccgtagctgcatgttttccgcatacgaagatccaatcttggccgctgtaaccggcccgatgcccggcaccctgaccagttggttgggggcaaaggttaaaatatctcccgcctcatcgccaaaggtctggattatggcacgcgccgtggccggcccacagccctttatcagcccgctggccaaaaaacgctccaattcttccgttgtttccggcagcataggacggcaaacggccgcctgaaattggcggccgtattctctatgcatggtaaacacaccctctagctgcacccgttctccctggcccagcatggggctgtaccctaccgcggtcaattcttctccgtcgtctgtcataagctccatgacggtatagccgttggcctcgttacggtagacgatctgcgtgaccatgccctccagcatgattttctcctgcccgtattccatcaaagctttttcttcaaatcctccatcagatccaatttctcccaaggcagatccagatccggacggccgaaatggccataagcagcgatctgtctatacagcgggcggcgcagccccaacctttcaatgatggcctgcggacggaaatccatcacctggcacagcgcattttcaatgtccgtttcctttgccttggccgtgccgcgcgtatcgatacgaaccgaaacaggatgtgccacgccaatggcataggccagctgcagttcgcattcctctgccaagccagccgccacaatgtttttcgccgcatatcgcgccgcatagctggcgctgcgatccaccttggtcgggtctttgccggaaaaagcgccgccgccatggcgcgcgtatccgccataggtatctacgatgatctttcggcccgtcaagcccgcatccccatgagggcctccgatgacaaatctccctgttgggttgatataatattttgtttcgtcatccaaaaggcgctgcggaatcaccttggctatcactttttccatcatatccttttcgatctgggcatgcgtggcctccggatcatgctgggtggaaataacaactgtatccacccgtgtcggcacgccatctacatattctacggtaacctggctcttgccatccgggcgcatatacggtacctccccgcttttgcgtgcctggctcattctgcgcgtcagcgcatgcgccaattcgatgggcagcggcataaactgctcagtctggttgcaggcaaagccaaacatcagcccctggtcgccggcgccgatatccaagccgccctgggccctcgtttccagcgcgctgtccacgcccatcgcaatatctggcgattgctcgtctatgctgaccaccaccgcgcaggtatccgcatcaaacccatatttgccccgcgtatacccaatgtcgcgcaccgtatcccgcgctaccttttgtagatccacatagcaactggtcgtaatctccccgaaaatattcagtagtcccgtgctagctgtacactcacaagccacgcgcgcggccgggtcatgccgtaaaatctcatccaccaccgcatcagatacctggtcgcaaagcttgtccggatgtccctctgtcacggattcagacgtaaagtatcttctgtccacttttttccctcctcatggtttgcagggtataaaaagaaccccgcggcgcggggcttatttttgtatccgcgcctcatcttccgggcatgccgcccgcaggaattggcaccttgcattccttgccggttgccgggcttcatagggcctgttccctccgccgctctggataaggcaaatccatggtttcattatactgcccttttatgcttctgacaagggccattgcatagcgtttttcgatacgctacaatagcacagaaccctgaaaggatgataaatcatgaaatataccttgggctgcgtccgtaaagcggacgacgattttgccctgatccagcccggcgattctattgctgtcggcgtttccggcggcaaggacagcatgctctgcttggaggcgcttcgtctttatcaaatgttttcccataagcaatactcgctctgcgccataacggtagaccctggatatggctttgatcccgcgccgttggcgcaatactgccaaatgcatagcattccctttcattttgcgccgggtgcggtggtagaaactgccaatgccctggcaaagccgggcaaaagcccttgctcgctttgcgctaaaatgcggcgcggtgcgctcaatgcaaaagcaaaagcgctgggttgcaataaggtcgccttagcccatcatcgcgatgatgctttggaaacctttttgctcagcatgttttatgaaggccgtctcaacactttggcccccaaaagctatttgcagcgagcggaccttaccgtcatccgcccttttctttatctagaagaaaagcatatcaagggcgcggtacgtcagctcggcctgcctgttgtgccctctccttgtccgtttgatgggcataccaagcgtgaaaccatgaagcagtatctcaaagagcttcgcaagcagttcaaacgcgcggatgagatgatgttttttgccctatccaatacggacggttatcatctctgggatcaatacaaacaaccgcctacaacataaaacagggcctttttggccctgtttttttgttcttgtttattcgtcgccttggtttgtgcccgtcggccgctgggtcgccgaatgtgttgtcgtgggcctaggcgttgcggttttcttctgcgtaggcttcggggtcgccgtcttttttgttgttttcctaggcgcagaggttttcttggtcgtcttcttgggcgacgtggtcttcttggtggtttccgtc

SEQ ID NO: 639 - DNA, 9936 bp, Unknown
  16S sequences of unknown bacteria
aaaaaggtccccgcacccccaaaaacttttgaactatattatatttattatatttcagaaagctgttctatcgtattacagccgaactttacagaatgcccgcgggggcgtcaggtttaagctttacgttggagtttgacgctatgcggcaaactcgcggacacggtaagttgacgtacagttactgctttacgttataccgtgtcctatcggcttcacgttggagtttgccgctttgcggcaaactcgcggacacggtaagcaaacgtacaaattcggttgaacgaaataccgtgttcagtacgcctgcgggagcgtcaggtttaagctttacgttggagaatgatgctttgcatcattctcggggacacggtaagttgacgtacagttactgctttacattataccgtgtccagggggcaaagcccccgtattattcttccgattcggatttctcttcctcttcctctttctcggaaggagtgatcgtcgtgttcacgatcgacgcgccctcggcaagcctcatcacgataactccggcggcggttctcgaataaaccggtatgtccgcaacgggagtgcgaatcagcgtgccctcgttcgtgattatcataatatcatcgtcgtcggtcgcggcggcgacggagcagagcttgcccgtcttatccgacaggcggtggcagagcacgccctggatcgcgcgtcccttcgcctcatactgcgacggctcgactctctttccgaatccgccttccgtcaccgatacgatatggtgcgtcgcattccactcctccgaaggctcgattatgacggctccgataacgaaatcgccctcgcgcagctttatgccgcgcactccgcgtcccgtccgtccgatcacgttgatcttcgacatcgcaaaacgtgcggcgttgccgtcgtgggttgcgatcagtatatcctcgtcgcccgacgtgcatgctacaaatatcagctcgtctccctcgtcgaggtttattgcgatctttccgcctcggcgctgatactcgaactccgaaagaagtgtccgcttcacgacgccgtgcagcgtcgccatcgtcagacagcgatctccgccgaagccgtcgatctgtatcacggcggtaagcttttcgcccggatcaagctcgagaatattcacgatattcgtgcccttcgccgtgcgcgatgcctccggaatctgatatgccttgcggcagtggacctttccgaaattcgtgaacagcagcagattcgaatggctgtccgcgacgatcacgttttcgatgaagtcctcttccttcgttccggcgccgatgattcccttgcctccgcggcgctgcgcggaataagtcgatgcgggctggcgcttgatgtatccggcgtggctgaccgtgataacgcagttgtggcgctcgataagatcctcatacagtatctcgtcctgagaatccacaagctccgtgcgtctctcgtcgccgaactttctcttgatctcgagaagctcttcgcggattattcccttgatccgattttcgtccgcgaggatcgcgcggtactcctcgatctgctttttcagatcggcaaggcgtgcttcgaccttgtcgcgttccattccggaaagccgtccgagcgtcatggagacgatcgcctgcgcctgctcgtcggagagagcgaagcgattcttcaggttctccctcgattccgcgacgtcggcggacgagcgtatgatcttgatcacctcttcgatattgtcgattgcgatcttgtatccctcgaagatgtgctcttcgtggagcgcctttgcgagatcgaatttcacgcggcgggtgatgacctcttcctggaacttgatgtattccgaaaggatggctttgagcggcagcaccttcggctcgccgttcacgagcgcgagcatattgatcgcgcaggtatcctgaagctttgtatatttataaagctgattcagtatgacgtgtccgttcgcgtcgcggcggtactcgatcacgatcctcattccggcgcgtccggattcgtcgcggacgtcggtcagtccctcgatcaccttatcgcgcaccttctccgctatggtcttgagaagatcgctctttatgaccatgtacgggatctcggtgatgatgatccggtggttctcctcatcgacctcggctctcgaacgcatcatgacgtgtccgcgtccggtcttgtacgcctcgacgatcccgttttttccgtagataagaccgtacgtcgggaagtcgggtccctttatgtactgcattatttcggaaagctcggcgttggggttgtccatgaggcagatcgtgccgtcgatgacctcgcagaggttgtgcggcgggatgttcgtcgccattccgactgcgataccgaccgagccgttgacaagcagattcggaaaacgcgacgggagcacggtaggctcgcggcggcggttatcgaagttgccgacaaaatcgacggtgtcgcggtcgatgtctctcatcatctcgtcggacagacgcgcaaggcgcgcctccgtgtatcggtaagctgccggcgggtctccgtcaacggaaccgaagtttccgtgaccctcgacgagaggataacggagggagaacggctgcgccattctgaccatcgtgccgtataccgacgagtcgccgtgcggatgatagcgtccgagcacgttaccgaccgtcgtcgcggatttgcggaacggcttgtcgtaggtgaggttgtcctcgtacatcgcgtaaagcacacggcgcgcgccgggcttcattccgtcgcgtacatcgggaagcgcacggctcacaatgaccgacatcgaatactcgatgaaggatttcttgacctccttctccatgtttaccggtattatcttctgatcggcaaactcaagagattcgtcttttagatcgtttttcttgtctttcatttacagtcctttcttacggaacggggagacgggattaagggaatagccgggggaaccccttttgacaaaggggattcccccggagccccctccctaaaacttttgaactatattatatttcagaaagctgttctatcgtattatagctaaacttaacagaacgcccgcgggcactgcccgctcagggatgtgggggcgacgcccccaatggggttttggggcaacgccccaacatataatgattccacacggtgttcggaagaacaccgtgcattttcagtctttcgtcggagtttgacgccttgcgtcaaactcggaaacatggcaaattaacgtacaactaccacttaaccgttataccgtttacagcttcacattggagtttgacgccttgcgtcaaactcggggacacggtaaactaacgtacatttaccgtttaacgtaataccgtgtcctatccacaagctacacgtcggagaatggcacttcgtgccattctcgcggacacggtaagctgacgtgcaactaccgactaatgtaataccgtgtccttttatacgtctatattctcggcgtatttggcgttctgcgcgatgaattcgcggcgcggctcgaccttgtctcccatcagaagcgaaaacgcttcgtcgcaggcgatcgcatcctcgatctccaccttgagtatcgtgcgcgattcgggatccatcgtcgtctcccaaagctgctccgcgtccatctcgccgagacccttgtatctctccgcctcaactccgtttccgccgagctcccgaatctgtgcgtcgcgctcgtcgtcggagaatgcgtagcggatgttctttcccttgaataccttgtaaagcggcggctgcgcaaggtaaatgtgcccgtcctcgatcagctttttcatgtggcggaagaagaacgtgagcagcagtatccgtatgtgcgatccgtctacgtccgcatccgccatgatgattatcttgccgtagcggagcttctcaatatcgaaatcctcgccgatgccgcagccgagtgcctgtattatcggaataagcgactcggtcgaataaaccttgtcgaggcgggatttctcgacgttcagaacctttccgcggagcggaagtatcgcctgaaaacggctgtcgcgtccgctctttgcgcttcctcccgcactgtctccctcgacgaggtaaagctcggtcacgtcagcccttctcgactgacagtcggcaagctttccgggaagcgtgcttccttcgagcacgctctttcgccgcgtgagctctctcgcctttctcgccgcctcgcgggcgcggaatgccgcaagcgatttatcgagcaccgcgcgcgcgaccgcgggattttcgtcgaagtattccgaaagcttctccgtcacgatgttgtcaacgatcgttctcacctcggaatttccgagcttcgctttcgtctggctttcaaactgcgcgtccggcagcttcaccgaaaccaccgcgcacagtccctcgcgcgcgtcctcgcccgagagattcttgtcggcatccttcaggattccgttctttctcgcgtagtcgttcagcaccttcgtgagcgccgttttgaatccggtctcgtgcgtgcctccgtcgatcgttgacatattgttcgcaaacgtcacgatcgtttcgttgtagctgtcgttgtactgcatcgccacctctgcggtgatgtctccctttttggagatcatgtagataacatcggggtggatcaccgaagcgtgcttcagcttattgagatgctcgacgaaggagcggattcctccctcgtagcagagatcgtacgtttcgtatttcgaagattcgctcgagccggtgcggtcggatgaaagtatgttctccgcgctcagctccttttcctcgtcctcttcggcggcggcggtttcctcggtatcctccgcctgctcggcgaatacggaataatctaccttgtcctcctccgacagctcctttctcatgtcggtgagaactatgcggagccccgcattcagaaacgcctgctcgcgcagacggttgagaagcacctgcgtgtcaaactccgtcgtttcctcgaagatttcggcatcgggcttgaacgtgacggtcagtccgtgacgtccgtcagcgggtccgacgtgggtaaagccgcgcgcggtctttcccttctcgaagcgcatcgtatactcttcgccgtcgtagaagttatcgacctccatccattcggaaagagcgttcacgacggacgcgccgactccgtgaagtccgccggatatcttatatccgccgccgccgaattttcctcccgcgtgaagcacggtaaacacgacctcaagcgtcggtatgttcatcttgtggtgcatcgcgctcggcacgccgcgcccgttatcggatacggtgaccgagccgtcgggatttaccgtcacgtcgatccttgtgcagtatcccgccatagcctcgtcgatcgagttgtccacgatctcgtaaacgagatgatgaagtcctctcgaggatgtcgtacctatatacataccggggcgctttcggactgcttcaagtccttcgagcacctgtatctgattttcatcgtaattctgaacgttcggattgtttgacatattatgctttaccctgcctccgctgattatttcgttcttttatccgtgtatcgcaccgcggtccgcaagcgactgcggcgaaagtctcgagaacaccaccttttcgccttcgcgcgcggcgctctcattttttttcttcttttttcttctgagctcttcgtatatctttttatcgtgcgcgtccggcgacatgtcctctttcggggatatcacgacgaacgagcggggaagatcgtctccggcaagggatgttatccccgccgcgtccgcgcccttcagaaattcgcccgtatcctccgttgtgatctcgccgtcgaggtcgaatatcccgacgatgtcgcaaagacgcacgatcctgtccgatccgatatgaacgtacatattacttgttcatcttcaccggcatgatgaagaagatgaatttctttctgtctccgttctcctcgggaagctcgactccctcggggatcggggaatcgggatcctcggcaacgaatccggagccgcgcgcgtcctctatccttgctccgacgacgggagaattcattctcattcttacggtgtacacgtcttcgggaagtgcgcggaatgcgtcaagcatattgcggcagttgaacgcgatcgcaagatcggcgccgtttttggcgatcggaatttcctcatacacgcttccgcttgtggataccgacgatatcttgagaagatcgccttcgaaatccatgcggacaaacgtgcggtagtttccgccgagcttatcttcggtgatgagcattgcacgttcgagcgccgccttgaaggcttccttattcacgaatacttccgtggtatgctccgtcgggattattctcttataattgatatagtccgtatcgataaggcgcgcgaaatagttgaagctgccgagcttgaatatgacgtgcttcgttgcaagggagattctcacctcgtcctcgctgtccttcacgatcttcgaaaattcgatcagtatcttcgacgggacgatgaacgatgcctccggataatcgtcgggcgcatccgattcgcagagtgccatgcggcttccgtcgcacgcgacgaccgtcattttgccttcgcttatattgaagtaaacgccgttgcacgcggggcgcggatcgttctgagtagcggcgaacaccgttctcgtgatgatcgcgcgcaattcgtactgaggcatgacgtagttgcggtctccgttcaggttcgggagatacgggaattcctcgccggggagggcggatatttcaaagcttccgcttccggaggagatcgtcgctttcagattctctccgacagagatcataagctcgcccgcggggaacgatctgacgatctggagtatcttctgggtattcagtatgaacttgccctcggaaagaattttcgcgtcgatcgtggtgcgcatacccttttcgagatcgtatgcgctcaggctgcatgtgccgttctcttcgccggggcactcgaagagtattccgtcaacatttgcggatgtatttcttcccggaacaactccggatgcggggataagggcgctgagaagctcgtctctgtcaaatataactttcattttgaaaccttcctttcgtcgggaaacttttcatctgcgctttcgcgccgtttttccgatagattattttcgtcacatgatttcggagcgattccgttttttttcggaaaactccccttatatatgtatgtatatatataataataatatgcagtagccgtagtagaggctgtctaaactgtagaaatctccgcgaagcgatgtattgcgggcatctccggggattttttcctgtgcgtaaggagtttctttcgtgtcttttcctgtagatgaaaaatccgcttttccgtcgattccggcggtttttcgtttttttccgaaaaacgctgttttttctacagccggtgaacagggaaaaaaagtatttattcctgttcatttctccgccgatatgaggaaaaaggagttttttctacataaagcggtgcgtgattttcctacacggaatgtcccgccgtatatggggctgcggggctttgaacagggtttttcatcagtttttctataggtcggaacaagttttgaacagaggaatgaacagtctgtagaaaacaccgcttcgccctgtagaaaccggatcaggcgtgagattccctcatcatttcctcgacctcggcggagtacaccgggtcggcgttcatcatctcgcgcaccgtattgcagttcgagattaccgtggaatgcttctttccgaagtattcgccgatcgcggggaacgagaggtccgtcatctgcttgattatgtacatcgaggcgtttctcgcaagtcttatgtacttgtcccgcttttcgccgaggatatcctcgggggtgacgttgtagtacttcgcgcagacgcggacgacgcgctttacggtatcgccgaccggctcgttctccctgagatattcgggaacgctgcggcgcaccgtctcgatcgtcagcggatctctcgaaagaaacgcgatgccggagagcttctttattactccctcgatctgtctgatgttcgaatcgagcttttccgcgaggaatttctcgatctcgtccgaaagctcaagtccgacgctcttcgccttatttttgaggatcgcaagacgcagctcgtaatccgggagcgatatgtccgcgagaactccgccctcgaagcggctccgtattctgtcctcaagtccggggagatccttcggcggacggtcggaggtgagtatgatctgcttatgctcctcgtagagggtattgaacgtgtggaaaagctcctcctgcgaagaattcttgcccgcgatgaactgaacgtcgtcgatcagcagcgcatccaccttgcggtatttgtttctgaactgctcctgctgctttttgtttatagcctcgacaagcttattcgtgaaatcctcgccctttatataggtgatgtttgcgttcggattgtcaagcaggatattgttcgttatcgcgtacatgaggtgggtctttccgactcccggaggtccgtagatgaagagggggttgtacttcttcgcgggatgcttcgagacgtatttcgccatcgaatgtgcgaacatattcgattcgccgacgacgaagttgtcgaaggtatagtcgggattgtaatttaagcggcggtcgccgtttgccgactgctcctttttttcctccgcgctattccgatcgccgaccgtgtggggtgcgtcctcttcttcctcctcgtcctcgtcttcatcatcgtccgcttcgggcatttttccctccatcgcgttgaacgggcggatatacgttccgcctctcggcgcgggcacgagggtctcgtctaccgacatctgaacgaagaggcggtatccgacgatctcggaaaggtaatcagcgagcacgtcggcgtatctctcctgtatcttcttgctgatgaattcgttctccaccgccaggatcgccgtggaatcggatatcgattcgattttcagatgcgcaaaccaaagattaagcgcgggcttcgggatcgcgtccgccgcgcggatcgcgtcgatcagaagtccttttataaagtcaagctctgacgtggattgatcgttcatttgaattctccgggataatttattttataaaactatacatatattattatagcacataacaaaaataatttcaagtcatacgggatttctttattctgacttctgttgacaaatgaaaaatgcgcgtttcgcacttcggcggaaagcgtgcgtccgccgtgcatgaaaaatttgtacttgattttttcgggaaagcggtgtataatttagttaacagtgttaactatcgaggtgaaggaacgtggatttcacatcgcttgcgaaggagcttatgattcttcggacgaagatcgatcatctgccggagtgggagcttctttcggatctctccggaggggaatatttcgcgctggggattttatcggatgcgaccgaggcgttttgtccgtcgggtctgagccgtgcgatgggggtgagccatgcgagggtatcggctctgctcgggagcatggagaaaaaggctttgatagagagaaggagcgatccgggcgacgagcggcgcgtgatcgttgtgctgacggaaaaggggatcgagaggataaggaaaaaacgcgaggagaccgccgcgcgtatcgcgcatatacttgaacgtataggaagtgaaggcgccgaagagtacgtcgccctccaaaagctgataatctccgcctcggaggacgggggtgaggggtaggatgaccgggggaaccccttttgacaaaggggattcccccggaccccctccctaaaa

SEQ ID NO: 640 - DNA, 1801 bp, Unknown
  16S sequences of unknown bacteria
tcgccgccgataccagactggcggacgccctgatggaagccctggaacgcctcgaagtgctcgcggttgacgtaggtctcgccaaacttgatctcgttcattgctctcatgaccgtgtcgtagtcggtcgtgtagatcgaggaggtcaggccgtagacgctgtcgtttgccatctcgattgcctcgtcgagcgtcttgaagctcgtgatgggcaggaccgggccgaagatctcttcgcgcatgatgcggctctcgtgcgtgacgcccgtgacgacggtcggctcgtagtaccagcccttgccgtcgacctgcgccttatggccgccgcactcgatctttgcgccttcggcaatcgcggactgaacgagctcgtcgacgtgctcctgctggttcttgttgaccatcgggcccatgtcgaagttgccggccaacgggttaccgtaggtcacgcccttcatcttctcgacgaccttggcgacaaactcgtcgtagacgccttcctgcacgtagattcgctcggcggcgttgcagacctggccggtattgatgacgcgggatgcgacgacgtggtcgaccgtctcgtcgagcttgcagtcgttcatgacgatgaccggcgccttgccgcccagctcgagggagaccttcgtcacattgtcggccgcggccttcatgatcttcttgccgacctcggtggagccggtaaccgtcacgatggcgatcttggggttgccggcaagcgcgttgccggtgagtgcgcccgagccggtcaggacgttgatgacgcccttgggaagcgaggactggtcgacgagcttcgcgaactcatatgcgccgttggggcagtcggacgatgccttgagcacgacggtgcagccggcgatcagagccggggcgaccttgcggccgatgaggaacagcgggaagttccacggcatgatctgccctgcgacgccgatgggcatcttgtagatgaggatgttctcgttggggcggtcggacgggacgatctcgcctttcatatgacgtgcctgcgccgccatgtactggaagtacgcaagcagccaacctgcctcgcccatggcctgctggatcggcttgcccatttcctccgccgtggtacgggccatgagctcctggttgtcctgcagaagcttgacgagctccatcaggtagttggcgcgctcgatggcgggaatcttctcccaggacttctgcgcctcgtaggctgcctcgacggcggcgtcgacgtcatccttggttgccatggggaactcggaaacgacctcttcggtcgcggggttgatgttctggcgcatctcacgatcgccgttgtcaaggaactcgccgttgatatagagctgaacttgcttcatgtacgaacctcctattgacgtggttacactgaaaccattatctcgagccagcacgatccgctggcgcgattccctaaccgagtgccgtgaacgacagcatcaggccgcctgcggcgtcgagcccgtcgtcttcaaagccgtactcgccaaacgtgaactcggcgatgaacgggactccgtcggcttccttgacaaacgcgtcggcgacttcgtcgatacggtcgtcgatggcggcgcgacgcccgccgcagtgcacgaagaagtacgccgcgggcttgtggccgatgcgttccttgagctcttcggcggtcttggagacagagccgaccaggcagtcgacgtcgccttccatgcggataacgcaggtcttttccgtgaccttgttgccgacgttgatcgacaggtcgtcgttgccgttcatcgggtgg

SEQ ID NO: 641 - DNA, 4097 bp, Unknown
  16S sequences of unknown bacteria
tggtaggcagccgagggggcgtagggaaatacagcacgtttacgcatgtggatgtgcgcggaaacaaggcaaggtggtagagcgcggcagggtgcgcggaaaaaacaaacgggggtatgtaggatggagatacagcagatcatcgtattggcgcttttgacagaagcgctgtggcagacgggcaagttggcttggcaaaagggtgcgctgaacgtcagcgccctgggagcgatggcggtgggcattgcgctttcgctgttgacgggggcggacctgatgcaggcggcaggattttcgatgaaaatcccattcatcgggcaggtttgtacggggcttttgatcagccgcggcagcaactttatccacgatcttttgcagagcattgcgaaatacaaacaaaaggcatgaaaacagggccccgaaaggggctcttttttttgtgcgaaaggaaaaggcataggggatgaattttcccgaataagaataaaacgggcccaagtgtggcaaaacgtagacaatggcaaaggaggcacagacatggcggaggaaatgaggctggcggtgcaaagggcggagcggcaagcgggcgttttgatggaaacggcgcggcggcacgcgaagaaaaccgaggaaacggcgcgagaaaacgccaaaaaggcggcggacgaagggcgcaaacaggcccgagaggaggcagaggcgctgcaaaaaaaggcggaagcagaggcggcggcctatacaaagcggcaacaggcgcatacggccaaggcggtggaagcgctgcgccaatcactgatacaaaatgaggaggaggcggtgcgcatcgtggtgggcgcgctgctcagcgaactgggacggggaggcgaatagagatggccaaacggcccatgaaaaaactagagctgctggcgttggcaaaggatagggacgcgctgttaaaaaccctacaaaaggccggcgtcatggagctaaaaagggcggaaacggaggggtggcagcaggcggcccaggccgaatgggcggaaaacgccgaagaagaggcgcaggcggcgcagcaggcggtagagattttgcgtgcgctacggccggaaaagcagcgcgcttggcagaagagccggggcgcatggcgcattacgccggcgcaggcgcaaaaaatggaggcgcacggcgcgctgtaccggcggcagtgccaagaggtgatccgcctggatgcggcgctggcggaacgcacggcggagcgggcgcgcatctctgagcggtgcgcgcagctgaggccttggacaaggatcgaaatgccgctgggcgggcttataaccaagcacacggtctgccgggtgggcagcgtgatggggcaatggacggaggaagagctgttgcaggccatctggaaacaacagccgcgcatggacgcgctgtgcgtacagacggctccggggccgctggggcatacgctggcggcagtggcgtgccttaggcgagaggaagaggacttgcagaatgcgctggcacagatgggctttgcgccctgcccatttcgcggaaaggaaagcgcggccgggcagctggcaaaggcggagctggccctccgggaggcggaggatgagatagagcggctaaagcacgagctgatgcaaagggcggcgcggccggagggcatactgtttgcggcggacatgctggcagctgtggcccaaaggcagcgcgcgatggacaagctggcgttttccgaaaagacggtggcggtggcgggctatgtgccggcggacgaggccgggcggcttttggacaggctgtgccgaaggtttccgttggcgtatgagctttcagacgccggcgaggatgcgccggtgctgctgaaaaacaaccggtttgtgcgcccggtggaaagcattaccaaaatgtacgcgctgccgggacccaaggacatagaccccagcggcgtgatggcgtttttctactatgtgtttttcgggatgatgctctccgacgcgggctatgggctggtgatggtgctgggcacaacatgggcgcttggtaagctgacactgaaaagggagatggcggaaacgctgcgcatgtttcgctattgcggggtatccacggtggtttggggcgcgctgttcggcagctggttcggcgacattgtacaggtgatcggccgttcgtttttttcggtggagatagggagcctggcgctgtggtttgagccaatggcagaccccatccgcctgctgctgtttgcctttgcgctgggcattgtgcacctctgcgctgggctgtttgtgcgggcgggcatgctgataaagcagcgcagagcgtgggacgctgtgatggatacgctgcccgtgctgctgctggtcttgggcgcggcgccgttggcggcaggcatctttatcccggtgccggagggccttacaggggcaggaaagggcatggcggcggccggggccgtgctgctgattttcaccagcgggcgcagcggcaaaaaggcacttgcaaagctgggcggcgggctatacggcctgtacaacacggccagcgggtatttgagcgatgtgctgagctattccaggctgctggcgctggggctggcgacgggcagcatcgccggcgtggtaaacctgatgggggccatgccggaaaaccttgcggtcaaggcggtggtgctgacggtggttttctgtgtggggcatgcggtgaacctggccatcaaccttttgggcgcgtatgtacacaccaaccggcttcagtttgtggagctgttttccaagttttacgagggcggcggccgggcctttgcgccgtttgccgcgccccagggatatacacacatagaggaggaaacaaaatgatcgggtttggaacgagtttggcgctggtaggtgcgctgacagcggcgctgatggcgggcattggatcggcgcgggccgtaggcatggtaggggaggcggcggccggcgtggtgagccaggacccgggcaaattttccaaggtgctgattttgcagcttctgcccggcacgcaggggctgtacggcctattgacggcggtgctggcgctgagccagacaggctttttgggcggtgcgccgctgccgctgacaatggcccaagggctttgctatttggcggcgtgcctgccggtggcggtggtggggtatttttccgccgtggcccaggggcgcgcggcggtggccggcgtgatgctggtggcgcaaaagccagaccaaaacggcaaggccatcaccatggcggccatggtggaaacgtacgcgattttggcgctgctcatcacgattttggcgctgacgagcctggcgtaaggggggcgcattgtcttgacggaaaccgaaccattgcagaaagccattctgctgttggccgaaaccgaggcggcgcagatagaaaaacaagcggaacaggcggccgaggcgcttttgcaaagggccagggaaaacgcgcggaccagctatcaaaaggcgcgcggcgaggcggagctagcatacattgggctgatgcaaaaggcgcagcggcaggcacagcacgagcaggcgctatcgctgctggcagccaaaaacgagggcatagagcgggtatttgaaaaggcgctgagccgtgcagcgcaggaccccggctattttcaggcgctggagcgcggcatattggcggaggccgtgccgggcaaagcggggcagctggtgttgacagaggaggacaacgcgcagatgcccagccaaatgcggcgtcgcatcgaccgggcgcttttggagaagggcgcctccatcacgccggcggacaggacgctgcaagagggcggcgggtttgtgcttgtgtatgatacggaagaaaaaaactgcacgctgcctgccttgctttcttcgctgcgcgggacgctgacgcagcgggtggcgcgcgtattgtatggggaggaaacgtcatgaggcagccgcggtatgcatatgcgtccgcggcggtacgggcccgggcggcgcgcctgctttccgcagaggaggccgcttggctgtggacggcggacagagaggcggtaataagggccttgcagcataagggctggcggaccgatgggccggcagagga

SEQ ID NO: 642 - DNA, 6357 bp, Unknown
  16S sequences of unknown bacteria
cgcggcccgcgccggcgcgcaggaggagcgcgccgcccgcgcccgcgacctgcaggcgcgcaccgcctctgcttccgccgcgctgcccgcccgccgccgcacggtggagaagatgcgcgccttcaccgagtgctttacctataacaagggcgtgacgctctccagcttcgtgctctcggcgatgctcgggagcgtcgccgagcaggcgaacgagctgctgcgcctggtccacggcggccgctaccggctggaggtgcgctccgcgcgcacgcgcgcccggctcgacggcctggaattgcaggtgctcgacgggtacttcggcggcgagcgcgacgtgcgcaccctctcgggcggggagaagttcctcgtctccctcgcgctgtcgctggggctgtcggcggtggtgcgcgcgcaggccgggggcgtcgccatggaggccatcttcatcgacgagggcttcggcagcctggaccccgcctccatccgcgacgcgctggacgtgctgacccgcatcggcgcgggcggcaaggtcggcatcatctcccacgtcgaggcccttcgggagaacatcctccagggcattgaggtcgtcaagggcaaggccggcagccgcgtccgcctgcacgtctgaaaaaatttttgcacctccccagcgcagggcgatcctgtacatgcggccttcgaggaaggcaaaacatgcaagagagaaagaccctgcggctgggcctggccctgctgctggcgatggcgacgctgtccttgggtgcgatccccgccctggccgccgagaacctcctgccccggagaaggaagagcagcaggcgcctccctctttgcatttttggcgcctgcgcaggaaaaagcggcgcgcggggcgaaagagaaagagagagctttcgagcgctttggatacaggagggaaagtatggcaatcacggttttgcaagaggaaaggatcttcaagatcgataccgagagctccagctatgtgctgggggtgctgggcaacaacgtgctcgtgcacctgtactacggcgggcgggtcgaggacgcgcacctggcgcacctggcgccgcagcggggccgcgcctcgttctggtccattcaggcggacgcggaggacgacttctccgcggacgtcatgcccctggaatactccggcgcggggagcgcggacctgcgcgccccggcccttgcggcgcagagcgagacgggcgacaacgtcacggacctgcgctacgactcctgcgaggtgctgcccggcaagcccgaccttccgggcctgccgcacgtctacctcaaccccggcgacgagggcgagacgctgcgcatcaccctgcgcgacgcggtcaagaacctctacgtggacctctactacgcgacgttcgccttctcggacgcgatctgccgctgggccgtcgtgcgcaacgagggcgcgcaggcgcagaccctcacccgcgcgatgagcgcctccctctccttcccggggatggactacgacctgatccacctgcacggcgcctgggcgcgggagttccacatggagcgcagccccatcccccacggggagatggcggtctcctccttccgcggggcgtcctcgcacctgcacaacccgtttgcggcgctggtctccaaggacgcgaccgaaacccagggcgaggcctacggcgtgagcctcgtctactccgggaacttccgcatcgagaccgaggtcgacgcctttgacgcgctgcgcctcaactgcggcatcaacgaccggggcttcgcctggcgccttgcgcccggggagcgcttctgcacgccggaggccgtgctcgtctactcgggcgagggcctgacccgcatgtcccagacgtatcacaatctctaccgccgcaacctcgcccgcggcaagtaccgcgaccagccgcggcccgttctgctcaactcctgggagggcgtctacatggactttgacgccaaaaagctcctggagatggcaaagagcgccgcgagccttggcatcgagatgttcgtgctggacgacggctggttcggcgcgcgcagcaacgaccgctgcgccctgggcgactgggtcgtcaacgagaagaagctcggctgcacgctgcacgacctggtcgagcagatcaaggcgctgggcctctccttcgggctgtggtttgagccggagatgatctccccggacagcgacctctaccgcgcgcatccggactgggcgctgtgcccgagcggccgcgcgccctccctgggccgccaccagctcatcctggacctgacgcgcagggacgtgcaggactacgtggtcgaggccgtctccgccgtgctgcgctcggccgacatcgcctacgtcaagtgggacatgaaccgcaacatggccgaggtcggctcctcgtcgctgccggcggaccggcagggcgaggtgttccaccgctacatcctgggcgtctacagcgtgatggagcggatcacctccgccttcccgaacgtgctgttcgagtcctgctcgggcggcggcgggcgctttgacgcgggcctgctctactacatgccgcagaactggacctcggacgacagcgacgccatcgagaggctcaccatccagcacggctgctccctggtttatccgcccagcgccatgacctgccacgtctccgccgtgccgaaccaccaggtcggccgcgtgacgccgctcaagacccgcggcgcggtcgccatgctcggttcgttcggctacgagctggacatgagccgcatgaccccggaggactgcgtccgcgtccgcacgcagatcatcgagtacaagtgcagccgccagctcgtcgcgcagggcgatctctatcgcctgctctcgcccctggaggggaatgacgcggccttcctgcaggtgagccgggacaagtccctggccatcctcacctatgtgcagaagctcgccgagcccaaccccgccgtccggcgcgtgcgcctgcgcggcctggcgccgctgatccgctactactgcgagcaggaccgccgcatctacgacggcgcgacgctgatgaacgccggctacgtcctgcccgagatgcacggcgacttcgacagcgtgcggctcgtcttccgctgcgtgtaaaaggggggaagggaacatgcccaccctccagcagctcgtggacagccacgcgcgcatcgccttcttcggcggcgcgggcgtctccaccgagagcggcatcccggacttccgcagcgcggacggcctctaccgccagcgccgcgccatccccgccgaggtgctgctcagccacgacttcttcttagagcacccggaggagttctacgccttctaccgggagagcatcctccagccggcgctccttgccaagcccaaccccgcgcaccaggccctcgcgcgcctggagcgcgcgggaaagctcacgggcgtcgtgacgcagaacatcgacggcttgcaccaggccgcgggcagccgccgcgtgtttgagctgcacggctccgtgcaccggaacttctgcctgcgctgcggccggcgctacgacgccgcctttgtggcgcagggcgcgggcctgccccgctgcgcctgcggcgggctggtccggccggacgtcgtgctctacggcgaggcgctggacgaggacacggtccggggcgcgctgaacgccctgatgcgcgcggacctgctgatcgtgggcggaacgtccctggcggtctaccccgcggccgcgtacctggacgccttccgcggcgacgcgctcgtggtcatcaaccgcgaccccaccccccgcgacggcgcggccgcgctgctgctgcgcgagcccatcggccaggcgctgggcagcctgcaaatcgaaggataaaaaaaggggcggcagccggagcgatccggcggccgccttgttttgcgcgggcggggggagtcgggggcgagcgccggcctcagcggcgcaggagcgcgtcgaagacctcggcgcaggcgatggtgtccgcgagggggacgagggggctttccttcgcgccggattcgaacagcgcgcagaagtgctcgatttcgtagacaaagccgtcctccacgtcctcggtgaaggtggcgacgcagtcgccgtggctgtcgtagagctcgcagcgcgtggagcgcaggaagtcccgcaccacgatggagccgcgcgcgcccaggatcaccgcgtcggtcggcagcgcgagcgagatgctgcagctcagctccgccatcgcgccggaggggaagcgcatggagaacaggtccatcgcgtccacgcccgtctccgccgggagatggacgccggccgtctccaccgggtgctcgcccaggacccccatcgcaaactcgatggggtagacgcccgcgtccagcagcgcgccgccgcacaggtccggattgaataggcgggactgcgggtcgaacggcgcgtcaaagcagaacgcggcccgcagcaggcgcaccgggccgatgacgcccttttgcacccactgcgtcgcccggcgcacggccggcatgcagcgcgtccacatgccctccatgagcagcaggttcttttcgcgcgcaaggtccgcaagggcccgcgcgtccgccgcgcagacggccatcggcttttcgcacaggacggccttgcccgccagcagcgcccggcgcacgaggtccgcgtgcaggttgtgcgtgagcccgacgtagaccgcgtccaccgcggggtcggccagcagggcgtcatagtcgccgtaggcagcgttcgcgccgaattcccgcgcgaaggcctccgcgcggtccaggtcccgcgcggccacggcggaaagctccgcgcagccgcactctttcaaaacggaagcaaagcggcgggagattccgccggcacccaggattccaaagcgtgtcgccatacccaattcctcccatatcatatgcttatggggttcattatactcccgaaggcggcaaagggaaagaggtttttccgtaaattttcgaaatttcagaaaatgtttttattttctgtgcgatttcaagcgattttggcggattttcagtagaatccaagcgaaatcgacagcgttcgacagggaaaggcccggtccgcgctccatgcaaaaaatgccgagcgggcgtttgcaccgccgcccggctcggtgtataatgagagaaaaagtctttgcgaaaggatggaatgcgcacatgttgattcgccagtgcctgaaggaacgggaggtaacgctctcctgcgagctgttcccgcccaaggaggggaggctgctctccgagtacaaggagatcgcgcgcaaggtcgcggccctgcgcccgacgttcatctccgtgacatacggcgcggggggcggcacctccgccttcaccgcggaggtcgccagcgaggtcgagcgctgcggcgtcccggccctggcgcacctgacgtgcgtttcctccacaaaggaaggcgtgcaccaggtcctgacccagctgcgcgagcgcggcatcgagaacgtgctcgccctgcgcggggacatccccaaggacgcggccttccccctgccggatcaataccgccacgcggacgagctcatcgcggacatccgcgccttcggcggcttctgcatcggcgcggcctgctacccggagggccatcccgagtccgccaaccgccggcaggacatggacaacctgcgccgcaaggtggacagcggcgtggacttcctcaccacgcagatgttctttgacaataacatcctctataacttcctctaccgcgcgcaggccgcgggcatccgcgtgccggtgatcgccggcgtcatgcccgtgacgaacggcaagcagatccgccgcatctgccgcctgtccgggacggcgctgccgccgcgctttgccgccatcgtcgaccgcttcggcgaggacccgcgcgccatgcgccaggccggcatcgcctactgcacggagcagatcatcgacctgatcgccaacggcgtcggccacgtgcacatctacaccatgaaccagcccgagatcgcggccaagatcctggacaacctctcggagatcttcgagccccgggcatgacggaggatgcggtgctccgccgcgccgcgcgctacgcgcagagcggggcggaggggctgcctgcgctgcgccgcgcgctggacctgctcctgcgggaggcgccgccgcggtcctgcttccgcctgctgccctgccgggcgggggagcggggcgcgcgcatcggcgggtgcgacatcgcgggcgaggcactggctcgtgcgctccagggctgcggcacggcggcccttatctgcgccacgctcggccaggccgcggaccggctcctcgcccgcgcccaggtgcaggacatggcctgggccctgatg

SEQ ID NO: 643 - DNA, 3235 bp, Unknown
  16S sequences of unknown bacteria
gccgccgagcccgccggaggcgggctgccctgcgggccgaggccgcggtttgcgggggctggccgaggaaggggccggaacttgccgggacaagcgcctggatttttagcacatgataaacagggcagaaatgataaaccaatacaacggatgagtggagcgtaaaaatgaagatattatttgtgggtgatgtggtgcggcaggcgggctgcgattttttgcggcgggagctgccgaacctgcgccgcttttacggggcggatatgaccatagtgaatggggaaaacgctgccgagggcaacggcatcctgccggggagcgccgaactgatcctggacgccggggcggatgtgatcacgctggggaaccatgccctgcgccgccgggaaatttatccgatgctggaggagagcgatcgcatcatccggccggcgaatttccacgccagcgcgccggggcggggctggtgcctgtatgactgtcccggcaaaccgagagtggcggtcatcaacctgcaggggaactacctgctggaaagccacgaaaacgcttttgactgcatggatcggctgctagaagaaattgatgcgccggtgaagatcctggatttccacgccgaggcgacctctgagaagatctgcatggggctgtacctggatggacgggtcagcgctgtcattgggacccatacccatatccaaacggcggacgaacggctgctgcccggcggaacggcctacattaccgacgcggggatgtgtggggtattcgattccgcgctggggctggcgccggagcctgccatccggcggttccggaccgggctgcccacccggtttgagagcgtgaaggggccggtgcggctttccggcgtattgctggaggtggacgggaaaaccggcaaggcggtttccatcaagcgggtaaatgtggacggataaactgaacatctgctgaacaaatggcctgcatacttgccagaaccaaaaaagtatagtataataaaaaatcagcaaaaaccatgcggccgccccaaaacggccgccaccaaaacggagggatacgatgataggctacgaaaacacactgggtaccgtggagatctcgcaggaatactttgccaacctgatcggcatggcggcctccgagtgctatggcgttgccggaatgatcaattccacctaccagggactgcgctacgccatcaccaaaagtgatgtgcccgataagggcgtgcgtgtaaaaaccaccgacggcaaactgatcgttgatattcacattgctgtgacctacggcatcaatatcagcgccatcgtgcagagcatcatccacaatgtgcgctatacggtggaggaatgcaccggctttaaggtagcgcgcgtaaatgtatatgtggatgagatgaccgcgtaaaacggctctcgctttattattgcaatttgcagggagcgccgcgcggcgcacccggaaggagcgtacgatttgatcaccgcaaagcagctgtcggaggcgtatatctccggcgccaataatattgaaaacaaccgccaaaaggtagacgccctgaatgtatttcccgtcccggacggcgataccggcaccaacatgagcatgaccatgggcgcggcccgagaggatctgctgcacaatgactaccccaccgtgggcgatgtggccggtaaagcggcctccgcgctgctgcggggcgcccgcggcaattccggcgttatcacctcgcttttgttccgtggcttcagcaaggggctaaagcacaaaagcgaagccggcgccgccgatctggtggaagcgctggagatcggtgtggcggccgcctacaaggccgtgatgaagcccaccgaggggaccatcctgacggtggcgagagtggcagccgaaaaaagccggaccgccctgaccgacaccatggagccgctggagatatgggatctgatcatccaatatgccgaggaggcgctggcccagaccccggagcagctgccggtgctgaaaaaggccggtgtagtggatgccggcgggcagggactggtgtacatcctgaaggggatgcggcaggtctttgccggggagggcgtggtgcccggtattgccggtgataccgctgccgcccccgctgaggaggctgccactgtggtgaacgccgctggcgaggtggaggaagtggacatcaacaacccctactgcaccgagttcctggtgatgcgggacgaccccaagcatgaccccgccgggctgcgggcttatctggaatcgataggtgactgcgtggtggtagtggacgatgatgagatcatcaagtgccatgtgcacaccgcccacccgggcctggcgctggaaaaggccgggacctacggcatgctgaccaagctgaagatcgagaatatgatagagcagcacaaggcgcaggtagccagcgtaaaggagcagcagaaagcggcggctccccaggcggcggagatagacccggcgctgacggcgggctttgtggcggtggcggccggcgacggcgtgcagcagctgttccgtgatttgggcgtccagcagatcgtgagcggcgggcagaccatgaatccctccactgaggatattctgcacgcggcagagcaggtgcccgctatggatgtttatgttcttcccaataataaaaacatcgtgatggcggcggagcaggccgcgcggctggcccggaccagcggggtgcggcgcatccatgtggtgccgaccacgaccatcccgcaggggatcagcgccatgatggcctatgatgaaagcgccgagataaaggacaatgtggaggccatgcaggaggcggcctcccgcgtacagagcggttcggtgaccttcgcggcgcgggacagcgactacgacgggcatcagataaaggaaggcgagctgctggcgctggaaaacggtaaggtggcctttaccgggaccgatctcggctcggtgacggccaaggtggccaaggacctgatgcgggaggacagccagtttatcaccctgctgtacggcgccgatgtgagcgaggagcaggctgccgatgtggaggaggcggtgcgctccctgctgccggaggaggtagagctgacggtggcctatggcgggcagccggtgtactatttcctgatctccgtagaataagaaatgatgactcccccctggccggaaggctgggggagtttttatatctgcaaggggaacggcgggccgcaggccc

SEQ ID NO: 644 - DNA, 7138 bp, Unknown
  16S sequences of unknown bacteria
tacctcttctttcccatgcgaactccaaactgtctcattctgagtccgcacatcccggcccctcgtgccatgtggctagcgttcggcggcgatgaggcgcgacggcgtcaagatgtactgtacgccgcggtcgtgcgtggtggtggggatctcttcggcaatctgctcgtcgaaggcgatgccgatggtcatgcaattcgggccgatgtagggcaggtaacggtcaaagtagccgccggcatttcccaggcggtggccgtgtttatcgaaggcgacgccggggacgaggatcacgtccagggtgcgcgggtcgaccatgcgctccttggggatgttcgtcacgagggtcttggggttgaccagcacatcggtgttgtcgtcgcgcgtgaaggtcgtgtagaccatgagcgtcttcgagacgatgagcgggtaggagatgaccggggcggttcccagatcgcgcagggccctgacggcattgttgatgttcagctcggagccgaaggcgctgtagacgccgatgcttttggccttcttgatggcgggcagagcgagcaatcgcgtctgaagcgcgcgctcgtactcggcacgtgtgcgaaggctcatgttgtctcggatgctgcgcatttccttgcggagcgcggcttttgtctcctcaatacccatgcgtggaagaataacacgtctttttctccctgtcagttccgacctccccaaacgaaccgaggacctgacacgaggggccgtgggtatcggttcattctggcacgaggggccgtgggtatcgtgccatcttggttcgaagggacagggcaagcggacgccgtggggcgctcctcgaaaaagctccaactaacggggatttacagcgaacttgcgcggtcgattttgctagtatgtcacccatgtcaacagtagtagcaaaattcggtggtacttcggttgccacgccggagcgcgtgataaacgtcgcgcgccgcattgtcgagcgcaaacgcgccggcaacagggtcgtcgccgtcgtctctgccatgggcaaaacgaccgatgacctcatcaaactcgcgaactccatcacagatgcgccgtctccgcgcgagatggacacgctgctctcgacaggtgagatggtctccatgtcgcttctcgcgatggcggtcgagtcgctgggcgagaaggccatcagcctgagcgggcgtcagatcggcctgatcacggacaacgtccacggcaaggcctcgattcgcgagattcacgcgacgcgcatcaagggcgcgctcgccgatgacaacatcgtcatcgtcgccgggttccaaggcatcgacgcggcgggtgacatcacgacactcggacgcggcggctccgatacgaccgcggtcgccatcgcggctggcatcaaggccgacgtgtgcgagatttacacggatgtcgacggcgtctacacggccgacccgcgcatcgtgccccgcgcgcagaaaatcgacgagatttcctacgaggagatgctcgagatggctgccggcggtgccggcgtgctccataagcgctgcgtcgagttcgcgcgcaacttcggagttgtgattcactgccgctcgtcgttcaacgacgaacccggcacgcttgttaaggagatggacccgaacatggaaaaggcaatcgtcagtggtgtgacccatgacctctccgaggccaagttcacgattcgcgacgtgcccgacacggctggggtcgcggcgactgtcttcggcgcgatggcagatgccaatctcgcggtcgacatgatcatccagaacctctccgagcagggctacacggatatctcgttcacgtcccccaaggccgacgcggcgcgtaccgaagaggtcatgcgcaagatcgtcgaggacctgggcgcacgcgagcttatcgtcgccgacaacatcgcgaaggtctcgattatcggcgccggcatgaaggtcaattctggcgttgcggcaaagatgttccgcacgctggcggatggcgatatcaacatctcgatgatcagcacatccgacattcgcacgagcgtcgtcattcccgccgatgaggcggagcgcgcggtgcgcctgctccacacggctttcgggctggacgggacgaaggtgttccaagagacgcagctttctgccgaggaacttgccgcgaaggcaaacaagggccgctaagctctaccgtgttcaacaaataaccggtcgatgggcctggggttgtccccgggcccattttttgtccccgcatcccgcatcggggtcggttctcggtggtcctgatagcagacaacatctagtagcggttgcagcgaaggcggggtcttcgggtgtggggtcggttctcgatggtcctgttagcagacatcgtctgctaacggcagcgacggggtcggttctccttggttatttccttgagggcgggggaatgctatcgtcgctgcagaaacagacgcgattcaagttgtggtgaacatggagaagagaccgaacgtcaagctgaccctcgaccaggggtacgccgtgcagcaagacctgcaggcggattgctcatctgtcgagcttgccaagattctgcatgtgaagaaggcctacttgctgcgacgctcggtcgatgcgcgccacaagaacgacgtgcacttcatcgcgaccgtcggcatcggcgatggcgcgtgcgcgccgcaagctatccagccgctgcgagagcgcgaaacacccgacccgcatctgggcaacagtcgccccatggtagtgggaatggggccggccgggctgttcgccgcactcgaacttgcggaagcggggctgtgcccgatcgtcatcgagcgcggcgcacccgtcgaggagcgcacggccgatatcgacttgtaccatcggactcgcgtgctcaatacgcgcagcaacgtacagtttggcgaaggcggtgccggcacgttctccgacggaaagcttacgacgggtaagaactcgccgctcatcgcggggatccttcagacgttcgtggcggcgggcgcgccgcaggagattctctggcaggcaaagccgcatatcggcaccgatgtgctgggcggcgtcgtcgcagacatccgccgccgcatcatcgcctgcggtggtgacgtgcgctttcacacgcaactgactgaccttgtcatcgagcgtggctccctcacgggcgtcgtggttgaggggccagacggggcgagcgagcagctgcctgtgggcaggctcgtgctcgcggtcgggcattcggcacgcgacacgtttgaggtgctcaagcgctgcggcctggaactcgagcagaagcccttctccatcggagtgcgcatcgagcacagtcagcagcgcatcaacgaggcacaatatgggcgcgcggcatcgcatccggcgcttggggcggcggactacaagctcacgccgccgaaaatttcgagcgggcgcgcggtctacagcttctgcatgtgcccaggcggcgaggtcgtcgctgcctccagcgaggagggcgagctctgcgtgaacggcatgtcgcgccaagcgcgtgcgggaagaaacgcgaacgcggcgctgctgtgcaacgtcgtgcccggagacttccccgacccgtccgatccgctttccggtatcgccttccagcgttcgtgggaacgcgccgccttcgagctcggaggctcgagctggcgcgcgcccctgcagacgctcggttccttcctcgaccgttcctgccgaaagggcaccgacctcgagccgacgtacccgctcggagtcgaggaggcgcccatcagctcgtgtctgcccggctttgcgtcgcaggcgctgcgcgaggctattccgtttttcgaccgccgcatcaaaggctacggggacgcacgcgcgctgctcacgggcgtggagaccagaagctcatcccccgtccgcgtcgtgcgcgacaaggcatcgctgcaggcaacgcgcgtcatggggctgtacccgtgcggcgagggcgcgggctatgcgggcggcattatgtcggcggctgtcgacggcattcgcgtggcgcggcagatcatcggagacgcagcttcgcagtagccggcccttttcgcgagcggctgcaatcctcgtcgccttcaacagaataaaccgacgcagtaccagatcacgaatcccggcatcatcggtacgtgcgcatcgattgccctgcggtacacgagaatggcgattgctgcggtacccatgaccagcgagcaggcaaacatacccgcgaagttcccttgaaagcccgaaaacaggcacaacgcgggaagcagccgcacgtctcccgagccgatcggctggggcttgtccaagcgccgggcaacccaattcatcactgccgcgccacccacgagcgcccccgcaagagcgagcagctcgagggggagcacaccgccggtctgcgccagcacaaacaccgccccgagcacgagcagtgccgccgatacttcccaggggatgatgcgtgccacaaggtcgcaaagcagggcgacccccatacaggcggcgccgagcgtggcgagcaagcacagcaggagtggcagaatctggaaggctatgcgggaaaatacgacgagcgataccgcgcacgcgacgcggacgaggtaagtgcgcacctcgctggcatgcagacgattggcccgttggggcgggcggtcggcgcgtgaacaggtggggatgagcgtgcgtccgacgacaatgctgcgatgcctgagcagaaagaccgcggctcgcggcacgacagcccagccgagtatcagggctgccagggcgagcagggccatgcggttcacctccttcggtcgtgtcgtatttcccgcagctcgtacgctacagatgaaatctgagcagacaacctgagaaagctagagctgactcggactacccggcagaccaacaccagacgcaaccacgaccgaaatcagagcccgttcagacccagataagacctacgctgctcaagaagctgctaccgataagccaccgagaggttgcatgccggccttcggctgtcccacatcagtgaaaagctagtccctatgagaagaggggcatcagggcgcatggcgtccgcagcgcgagggggcacgagcgaacagggggacccgcgaaaaaaagaggcggcaagctccacgcttgccgcctcttgctgcagattgtatgtcctcacgcctactggaggtatttcgcgcgcgtgcgctctgcgtacgcggcggaaatcgccgagcacgcgtcgtctgccatgagcgaaagcgtctcggcatcgttgttgcgcaggtggatgtagacggcgcggcgtccacggctcgaaagcgcggagaaatcgccgagcgcctccgccatctcggcgtcgcccagcgtgaagctctcgtgcgggacggtgatgtcgaaggtctcgtcgctgctcaccatcaggaacacgccgcggtcggggccgcctttgtgcagctgaccggtggagtggaggtagcgcgggccgatttcgaggcacgagcacgcgtcgaggcggtcggccacacgatggcggatgcgctcgaggcattcgcggcgacccgtccccttgaatggcaggaaggcgttgaggctgaagtagtcgccctcctcgatcgagccgaacagcatgcggaaggccgcgttgacgtcgatgcgcttgtcgtgcagcggcatgcggtcgtgcagctcggcgctgacgtataccttgtccgcgtacaggcagtcgtcgagctggtattcctcgtatgcattgcggccaagcgcgttttgcgggacgctgaagccgccgtcctggttgaacagcagctggcgggcggcgatcttggtgctctcgacgtcgggctggtcaaacgggttgatctgcatgagccacccgcacatggcgacggcgtactcccagatgatgaagtagcgcgtcatcgccgtactgtcggggatgtcgagcctgaagaccgggatttgcgggttcaggcaggtgcgcgcgtgctcgaacgcctggtcgttgttcatgttgcacaagatggcggagcggtcggtgaagttgtcggacaggatgcccgcatcgatttcgacgttgggcaggatgccgtgccccagcttgccgagcgattcggcgacgagctgctcgacccacaggccgaagacttggttgcgcgccggcatgagcagcgagaacttgtcacgtccctcgagcaggcactcgtacaggaagcaggcgagccagatagcggggttgtccgccgagtcggtggcgcacaagtgctccatcggggtcgcgtcaatcagcgtcttgaccggatcgacccccaccatggacatcgggagcaggccgaagacggacagagcggagtagcggccgcccacgtcgggctgcccgtgcaagaccgcgcgccacccgttcttcttggccgtctgctcgagctcgctgcccgggtcggtgatcgcgatgaagcggctgcccgcgttctcctcgctcagatgggcgctcacgtacgtccacgcgacgtggcttaggagcgtcggttcgagcgtggaacccgatttgctcgagacgatgtagatcgtgtgggcagggtcggacgagccgaggatgtggttgacgtagaccggcgagagggagtccatcgtgcggaacgggacctcgtcggtgagctcgaggctgcgcagcttggtgatggtctgcgaggcctgggtggagccgccctggccgatcaagacgaccgcatcgagtttctcaccacgcgcctgctgggcgatgacggcgatctgggccgggtcggtcgggggttcgctcgcgagcgtcgtccaccccaggcgggtgttcgcgcattcggctgcagcggggtcaaagccaaagacggagccttctttggcagccatcctcgaggcgaccctgttctcgatgaggcgcttcgcgctttcggtctcgccaagggtcttgctgtcgataaaagccatggtagtttcctcggtgttttgttgcattctgtttacaatccaccgttgtggtggagagcttaaatctgtcaaagtataatacatgacaagtagttgcagaaatgctacactaatgcttcatctgtcgcaggaggcaatcacttaatggaagaaactatcgtcaggcaggg

SEQ ID NO: 645 - DNA, 1540 bp, Unknown
  16S sequences of unknown bacteria
agatgggctgttccgcttttatctttattgcttttttcttcagtttcgcaaggcatttcgatttatattcttcgacgaaagcctttacttcgggcgtcatgacaccgtttttatagcctcggcactgcaccaccgtcatggtcttgggatcgacttccatggtatagtagctcactgtcggggcggacgtttttcggacaaatacgatcacgctatttccgtcagtcactcggtctatgtatgagcccacgcaatgcccctgtattttaccctcaacaacgatttcctctgcctttttcggtacgatcaccgccagctcgccgcttgtgtaaccataatgctcctccatcgccagacgtttatcgcatctctcgtatttttctttgttttgcaacgccgttacttccgccgataatcgggtgtgcaggtcgtagaaattcttcggctttgcgtacatcgtgtccgagatgtccaaacgcagggtctcgcaatcccgaagatgatccgcataatctccgataaacgtgcggaacgatacgttccgacggtcggcttgcgctttatagtaatcgtacagtccctcgattgatatgactttttctattccctcaatccgatcgccgtgccatttcatcgcacgatagattttgacgttcttttccgtgtagggaatattctttttaagaagttcccgatacgcctcgaattcaccgacgctcatattttgctcaatagcaaatttcagttcccgatacgatttcagacctaaaaatctgatgacgttgttttcgttatgattgcaatataagccgtaacggatatatcccgcggccaaacggtaaagttttagtttgatcagatattccagctggggcgtacggagataccccatcaatgcgttatataaattgaatttttcgccgctttccgccaattcccaaagctggctgtattcgaacggcgtgcctttcaattccgttttcagattatacggatacgtctgacgagtgagttgaaaaacgttacagccgtatccgccgatcgtaccccgctcccaatactcggcatgactaccgcctttcgtgaccgcatatctcgtaaacccgttgtcgtttttatagcgagtctcccgcgaaaacaccatgctgtacgtatatctttgttttagcggcaggcctaaaacctccatctgcgcttcctcgatatgcacctcttgcctgccgttcggccacagttcacgcgccacgcggaaaatgcggtgtaacagaaattctccgtaattttccaaataccccacaaagtaattttgaaaatcgcctgtcatttccgcccgatccgtcgctttgatcctcgctccgcactgcggacagaggatatacttccctttcggtgccttgtcgggccgtatccgctccccgcaggccgtacatacgcctatacggtgttttttatccgccgcggcgtcaaacaggaaataattcgtcatgacgtttttaaccgtccagtccgcgatctccgatttcggcgccatgcggcggat

SEQ ID NO: 646 - DNA, 32759 bp, Unknown
  16S sequences of unknown bacteria
ttccacagtaaatacattatctgtttacacagaagaatatgatgataatggaaatataataataaaaaatggtcttattgatttgcaaggcaatatagtttgtcctttcgaaagtgataatttttttgaaatatatattgaccaattttatagattaaaagattacaaaaagcaagaaactagattttatgatgataatggaacacttatcgcaaaagcgccttctaatggtagagatagtatgattctggctgaacacaatggtcaatttttcgcatatactcaatcttcttatgactctagtgttgcttcagctaatatatacaataaggacggtaataaaatactttcatccgactataaaaatatcatgatttttggagattatattttattaacaacacaagataacacatatggaatcattgattgggaaggcaatattataattccctttgataataatatattaagtagagcttccaatatcacagacgatagctttcaatggttcacagtgcaagataaaactccctatacagattatctgatgaatataaatggagaaaaatttctggagggatgtaattatgaatttttaacgatactgccagataaaaatgttagagcaacaaaggatcataaaaaaggtgtagtaacactggacaatgagattttaattgattttaattacgattatattaatacattttcatttaacgataagttatatctatattgtgaaactcaaaacaacctaaaacaatataataaagatatttccatctctttatacgatgaaaattatcatcaaattgctagttttgaacatcaagatgacagtagctttaaaaattacccacaatttggaatatataccgtaaaaaataattctggagatatgggtgcatatgattacaatggaaatattgtcgtacctttcaattatcaatctgtaaaagcattaaatgccacacattatgttgtacaacagcataatcaatattatttatttgattctcaatctcaatccgttatttctcaaccatatgattctatagtttttaacaaagaactagtaatagctgaaaaaaacaaaaaacaatctttctttaatcataactgtgaaccaatccaattatcttataattcgaatcaagccctaaatatacaacttgaggatgatgaaacgtattatcttagcaaccaaaatggttcaaacagcattgctatactaactacctctgattccggaaaaaagggagttgcagttattccttgcatctaataaaaaaacttaggagttgttataaacatcctaagttttttttattatgcaaatgctaaaacagccataattgctataagaataatacctcctattgtcatagtcgttgccactgaagtctcactaaaaaatgaacctatcgcttctctatcaatgatttgaccactggaaaaacttctatacaatgcagttatattttcaaatatttccatttcttgcccttcttgatcagatggaggacgcttttgttttatgatttgggtgagttccatagacatttctacattagaaccattagcaagtgaaatatcgttcatattaataatgtaagaaatagcaatttctgaataagaatcagtagcaacaacatttttaacagaaacagcaagatttcctgacgacattttcaaagctatgtctcttaattcctttccattctctaaaaatatagaaggagtcatttctgctcctaacactggaaaagaacccatatttaaatcaacatctaatctgccttttgtaacattgtaaatagcatttgtattaataggcataaagtttaatgtctcacttactattaattcgacatcaactgtatctgatgtaagtaaccttatagttttttcaaactcgatacttccagatggcaatttatcctttaccatttcaaaagctgatagtacttggcgcactttccattcacgtgcagttcttgcatcagcttgaatcacaactgcttgactaccctgtgctttatatgctctgtctacagcttcctttctgtaataggtacgggctttgctgtctcttgggtcattaaaataataaaaataatcatcataaccaaccaataataaacaatgttccggcgcaacccattgaatttttctacctgtccaagcagtccatgttttactaatatacggcgttttcatttccatagtagcccatacaatgaccggaatattattatcgatatattttgaacaaagttccggtaaagataagcctgtaatattttctgctgtataataagtattggcaaatattttatccagagcagttttaattaccggagcataacaaccatatccatccattgttctgggatttccaccaaaagtaatataagggtcaaaacttacagggagcagtggattaagtggttcaattggcaaatattggtcaataaaagtatcaacagaaatattttttccagcatactgcagtgccataaccgtggccacactttcgcagccagttggataattgggcatctgcgaaataaatggtgcgtctataattttagattgacctgatggtgtttgaggagtatcaggaatatccgtattgttttcctcaaaaatacgtacttcaatgccactaatgttttttccatcaatacctgcatagtaagctttttcgtccagtaacccatctaagttatatttcgcctgtacacttctcatccattccggatttgcgttacttacccatggcagccatctgccttctacataggcacggtacataaccactacacctgttaccaattttgtaccgtcatttttatatacatacaaacttagcagctgaattggtttgccggcagaacctgcgtaatcgttttcacggcttgttacaaacggataataagttccttgtccttggttatgtgtacggtatgtaatataatacggtttgcttgcatctgtctgaattttcaaaccatccaaacgaccgggaatcacactcttatcaaagttggtccaattgttgtctaccatataacttaaggtcggaggggcttcttgtccaaccaatccttcaatcggtgtatcattggtagtacctacaaatgcacgaatttcaagaccgctgatgttttgtccgtcaatacctgcatagtaagaagtataatcaagtgtaccgtctaaattgtattgactttttacactgtccatccattgtgggtcagcattacttacccatggcaaccaacgaccatttaccaaagcacggtacataatcacaacacctgatgttagcttggttccatcgcttttgtatgcgcgaatgctcagcagctgaattggcttacctgcagagcctgcataatcattctgcaagctggttacttcaggatagaatccaccttgcccctgattccatgtttgatatgtcaaatagaaaccatgggtagaatctgtttgaattttcacaccatctatatggtctgctgtcactgttttatcaaatgtattccagtttgataaattgtcgaacatatagctggttgccaaacgaatttctgagcctgagaagtcacctgaacccggattggaggaactatcttcaaaaacatgaatttccaaaccggaaatgttttgtccatccaatcctgcataatatccggttgtatccaatgtaccgtccaaactgaatttatttttaacattttgcatccattgcggatcagcattgcttacccacggcagccatctgccaccgacaaatgcacggtacatgacaattacaccggatgttaactttgtgccatctttactaaaagctctaatacttactaattgaattggttttccggcagagcccgcatagtcattttccaagctgctgacggccggataaaaaccgctttgaccttggttccatgtttgataggatagataatatggtttgctgggatttgttgtaattttcaaaccatctatatgatctgcaagtacaccggtacccatatcctcccaaccaccatctatcatataaccgataccgggcgcgacctcaccatcaattaaaccacctaaactaccgccggtttgagaattacattcataaacgcgaatgtccacaccatcaatattttgtccgggaagtcctgcgtcagctgaagttgtatccaatgatccgtctaagtgatgtttatcaaatacactttgcatccattccgggtcggcattacttacccatggcagccatctaccgccaacatgtacacgatacatgactactacacctgtagttaacttcgttccattattatcaaatgcttgaatttgcagtagttgcattggttttccattagagcctgcataatcatcttgtgagcttgtgacatatggataaaaatcaccctgaccttgattccgtgtacgataggtaaggtagtatgggcgtactcttgtcgcttggattttgataccatccatattcgacattgcttgatttgtaaagattgtccaacttccaccgtttagataagacaattgaaaagcgtcgcttaaaattccaccatttggagtgcctccggatataccgccgcctcccggaatggttccgccggaagcgccgtcatcataaacaccgccaactacattgggaataccactgatagcattaatatccaatggtgtcattgttcctgcaacacggcagcaataatgacaatgactgcctgtagaatagccggtagaaccctccaaaccgatgatatccgtaattttaacagtttggcctacagaaacataaatctgtgacatatgaccatagtaataatcttggttacctactcgaatacaaacatacaaaccgaagccttgagaatgattggatgggttttcccagccggcatgaattacagttccgtttactgtactgtgtatctgtttgctgtccagaccgaccaaatccaatccatcatgttcggaggtaaaggcctgggtaatttggaatcttcccatataaggactgttcatttcttctttctccttttcataataatataatattccaacttttgacgtcatagttgtaagaaggtgaattttctattaatttacatcttctctaaaaattactatatcatgtgaaatccgtacaaaacgaacaacagatgtgtttcagataaactattggaacgtaaatttattggaaacaaaaatcaaactgatataagaaaaaattaagggctatccgtacggatagccctaatttttatagtaatgtaaatttatttttttcaaatttcaaaattccttcatctcgcattttacccaattcacgcgacatagcacttcggtctgtacagagataatccgctaatttgttacgatcaaacggaatcaaaaaacttctgcttccattattttctgcttgtaattctaaatatgccaacaatcgctcacggatagaacgttttgctaatatttccaatctacgattcaacctcaaatttttaaatgcaatgatacggagcatattcccaattaacctggtatgaaaactgcaagctgatgaacaagaagtaattactctatgataatcaatccacataatattacaatcagtaattgcctctacagtgaccggacaatgtttggtctcgatacaagcaaatgtttctccaaacaagtcgcatcccttcaattctgttataatcatttggtttccatcaacatcctcacgaacaacatgagcttgaccacttaatacaattccgacagaagaaaccgtatctcctgccatgagaggaatttcaccctttttataagaatgaattctggctcccagacattttaacataaccaacatatcagaatcttctatattttcaaatagtgtaaccttttttaataatggaatatatttttgcataaaatcatctccatgttgcaaatgcaacagatttattgctatcagtatagtacaatgccattagaaagtcaaaataaatttagcaggagcaaaccaggtatgaaacgaaaaattattaaaatagaagaagcgctttgtacaggatgcgcattatgtgtatccgcttgtcatgaaggcgctatcggaatgattaatggaaaagcaaaactacttcgagatgattactgcgacggtttgggcgactgcttgcctgcctgtccgacaggagccattacatttgaagaacgtgaagcactgccttacaacgaagctgctgtagtcgccgcacaacaagcgaaacaaaaagcaatctcttctaccccttgcggttgtccaggttctcaagtaaaaacggtaaaacctttagaacaatttgttcagccgatgcacacttccgtcccttcgcagctgcaacaatggccggtacaaataaaattagttccggttaatgcaccttactttcatcaagcacatttgttaattgcagctgattgtactgcatttgcttatggaaattttcacgcagactttatgaaaaagaaaatctgcctcattggatgtcctaaattagatgaaggggattacacagataaattgacagcaattatacaacaacatcaaattcaaagtataactgttgtacgcatggaggtaccttgttgcggcggaattgtaaatgcagtaaaaaccgctctgctgaaaagcggaaaaatgattccatggcaagtggctgttgtctctacagacggccaactgattgcttaacgataaatgataaaaaaggagaaatgaatgatgtctatgttttgttttcaatgtgaacaaacagccggttgtaatggctgtaccaaagtaggagtatgtggcaagcaaccagatactgcacaattgcaagatgaactaaccggtgcattgataaaccttgctcttgccgcaaaaggaaaagagcataaagtaacacctgaactgaatcagcttgtattggaaggactatttattaccgttaccaacgtcagctttgacaatgaacaagtacaacgtcaaattgacaaaacacatgaagcaaccttatctcttttgccccaatgcggctgctgcgctgctcatagtatgggcaaagattatgacttagaggaaatttggaatgagcctgatgaagatatccgctccttaaagtccttaattttgtttggtattcgcggtatagcagcatacgcttatcacgctatggtattgggatatacagatgatacagtaaatcgctttatgctgaaagcattaagaaccatcagcttggattttagcatggaagaattgctgccgattgtgatggaaaccggtgaggtcaacctaacttgtatggagctgcttgaccgtgccaatcgtgaaacatatggcaatccagtacctacaacagttccgttatctattgaacccggaccgttcattgtagtttccggacatgatttgcatgaccttgcattactgttagagcaaacaaaagacaaaggtattaacatttatacccatggtgaaatgctgccttgccatgcatatccaaaattaaaagagtatcctcatttaaaaggcaactttggtactgcatggcagaatcagcaaaaagaatttaaaaatatccccggtcctgttctatttacaacgaattgtattatgcctgtcaaagaaagctatgcagaccgtatctttaccacttctgttgttgcttatccggaaatggttcacataggagctgaaaaagattttacccctgtcattgaaaaagcattggaattgggtggctatgaagaaacacagcacatgacaggtatcaacggcggcacaaccgtaaccacaggatttggctggaataccattttatctgtagcggataaagtaattgacgctgtaaaagacggtgccattcagcatttcttcctggtaggcggctgcgacggtgcgcgtacgggacgcaattactatacagagtttgtagagaaagcgccaaaagacactatgattctgactttggcctgtggaaaatatcgttttaacgaccttaatattggagaaattggaggtttgccacgtattttagatatgggacaatgcaatgatgcttacggtgcaattcgtgtggcattggcactgtccgaagcatttgcatgtgatgtaaacgaattgcctctcaccttagtcttatcctggtatgagcaaaaagcagtatgtattttactgactttgctgcacttaggtataaaaaatatttatcttggtcctacacttcctgcctttgtatctccaaatgtattaaacttcttagtggaaaattatcaaatccatccaatttccactgcggaaaaagatttggaacaaattttagcaaaagcataatcatattgtgatatatgcaatcccctcctgtatgataacaatacaggaggggattcttcttgcatcataaaacacagcaaattaaaaccatcgcgaattttctcttctcaaagatgaggatacatctttctgatatgggtcataacgatttacattacagccaaattcttttaaaaactcaattttattttcctgtgtccattgaataagagaaactccatcaaacatttctatcgtaccgtttttcatctggttcttaaaaaaccattccaccatagtttgattttctttatgaaaatattgtttgatatcccattgcaagacacttccgcgagtattccattcttcaaaccaaagtttaattttttcattccctctatattcggggccccagctttctatgtatactgcatcttttgaaaatatctcctgaattcctaaatcgtttttttgcagccacattgtaaaccaaaggtgaacgatagattctttatgattcatcttatctgtcctttcacacattctatctgaacataaatgttttccggaggctatattgaaacaaagattaaatatccctattagtaaaattaataatcattataccaaaagtaatttattcagaaagttttttctccattaaatagaattttccttttctgaaattggcaattcccacctctctgtatccaagcttttcatataatttcaaggcatgaggatttaatgtaaatgcatccagacgaatggtttctgcacctatatttttggcttgttcctcaatatgctgaaccgttcttgtcccaattccctgtttttgaaaatgtgaacttacgcatagccgatgtattacataataattcgcatcgggatatagccacattccattttgatattcatcatcgcattcttggttcaacacatatgctaccgctgcttttccctctatttttcctacatataattcttgttgttccatgtcatgcagtaaatcatcacggcatggatagatttcatcccactgaggaattccatttgcattcatctcttttatggtataccgaaacatatcaacaatttcatcaatatcgcttctctttgccttggtaaattcaatttttttcataaaaacctcaatatcatctttttgttttctcctattttatcattaacgattgttttttgtaaacttcttattgctaaaaagatatctattgcttttattcatacaaacatattcacacaaaacagttcctaaataaaattttttattgacattataaaaaaatcatgtaaaataaaaaatagaatacaattagatagtaaaatcctaagagcaaaagtaagtaacacataatacggtgtttcagagagtcggcggctggtggaatgtcggcacacacgctatgtgcgaatgggtttgtgaggagcataatgaaacggaatttccttagtagttatcgccgtatctcctgcgttaaaggaaaggatattcaggcaaatattatttgctgcgtatctgtaatgaggaaacatgatttttattgcatgttttaaatttgggtggcaccacgagtctatcgtcccttttgatatgggatgataggctctttttatttttatcatttcaaaatctttcagtaaagaaggagaatttattatgttatatccaaccttaaatgaagtaacggaattactaaacgaatataaagtgacacctgtgttttgtgaagttctctcagacacatgtaccccaattcatatttacaatgcgctggaaagcaaagaagaaaactgttttatgttagaaagcgttgataattctcagcaatggggtcgttattcttttattggtattcatcccaaagcagaaattaaggtaaaaaacggaactattacacatacgcaaggtacgagcactgcgacgctgtatatggaaaatcctatttcttatttatctcatatcatggaggagcatcgttcccccaactttccaaacaaacccaaactgaccggcggattaatcggatattttgcatatgatacggttcgttatatggagcaaactgtgtccagctctcctgaagatgacttagatatgcccgattgccatttgttcttatacgatgagattgttgcttttgaccacttaagcaacaaagtggtaattattttaaatatctcacaaaaaggagacgctgcggtgcaatatgaagcgtgccaaaaacgtgctgacgaaatcgcggaaatcattcgcagctatatccccataccaaagccgcgtggtgagaaaaaagatattacagttacatccaatgtaacggaagcagaatttactgatatggttgtaaaggcaaaagaacacattgtaaacggagatatttttcaaattgtactgtcacagcgttttgaagtggaaaatccaccggaaccttttgatgtttaccgcatgcttcgtgctgccaatccttctccctatctctattactttaaacataaagactaccaaattgcaggtgcatctcctgaaatgttggtaaacgtcacaaaaggaattgtatccacaaaaccaattgcaggcactattggaagaagcattttagaggaagaagataaaaaactggaacaacagcttctcaacgaccccaaagagcgtgccgaacataccatgctggttgatttgggacgcaacgatgttggcaaagtttcaaaattcggcaccgtggaagtcacaggatttatgcatgttgagcgctactccaaagtcatgcatttggtcagtgatgtgaagggattgctcagggacgacaaaactgcattagatgcattattggcagttctgccggcaggtacgttgtcaggcgccccgaaagtccgcgctatgcagctcatagaccaattagaaaacaaacggcgtggattatacggaggcaccgtcggttatttgggatttgacggaaacattgacacctgcattgccatccgcaccgtactatttaaaaacaagaaagcttatgttcaggcaggcgccggaattgtagccgactctatcccgaaaaaagagtatgaagaaacacaaaagaaagcgttggctgtcatcaatgcaatcaaagatgcaagtcaaatttgaataggagggatacaggatgattcttttaatagataactatgactcttttacctacaatctctatcaggcaatcggacagttgtatgaagatattactgtcatacgcaatgacaaacttaccattgaacaaatacaaaacatgcagccggaagcaattatcatctctcccggccccggttacccaaaagatgcaggcatctctgttgccgctattgagaaattcagcggaaccattccaattttaggcgtatgcctcggccaccaatccattgcacaagcatttggcggagatgttatacatgccaaacaactgatgcacggaaaagcaagcaccattacggtaaacaatcaatgtcctgtttttaaacatctgtctgatgatattacggttgccagataccattctttaattgtagatgagaacacccttccctcttgccttgaaatcaccgcgagagatgacacaaagcaaattatggcaattgcccatacatctcacccgacctatggcgtacaattccatcccgaatccatcttgacaaaagacggcatgcaaatcattgaaaattttctctattatgttgcaaaagtgaaaatcacaccgcttcatacagagaaaaatctattacctcctgcccaacgaaatgccttaaaaccttatatctttaaaattatagaaggtacgaatttaacagaagcagaagcttatgacgcaatggactgcattatgaacggcggcgcaacagatgcgcaaatcggctcctttaccactgcattgcgtatgaaaggagaaaccatttccgaattgaccggttttgcaaaagtcatgcgtcaaaaggccgctaccatcgaaaatggaacagatgcaatcgacattgtgggaacaggcggcgatatggcaaatacgtttaacatttccacgaccacatcttttgtggttgcaggcgtgggagtgaaagtagcaaaacacggaaatcgcagtgtttccagcaaaagcggaagcgcagacgtactggaacaacttggtgtaaacatttcacttactccggaacaggcagctgcttgtttggaccaatgtggaatctgttttctgtttgcacaaaaatttcacggctctatgaaatttgcagcgccttcccgtcgagaagtgggtgtacgtacagtgtttaacattcttggtcctttggccaatcctgcgcttaccaattatattgtacttggcgtatatgatgaagcactgatggaacctatggcaaaggtgcttatgaatctaggcattaaaggcgctatgattgtacatggcaatgatgggttggatgaggttaccatttccagccacaccacggtttgcgaaattcaagaaaataaattaatcaaatatgaaattacccctgaagattatcacattcctattgttgatttaaacgaagtcattggaggaaccgcagaagaaaatgcaaaaatcacattggcggtgttaaatggcaagcagggacctcaacgcgatattgttgtaatgaatgccgcttgcgctttatacacagcaggcaaagcctcctctttggcagaaggtattcgtctggcacaagaatcaattgatagcggaaacgcattggaaaaactggaagaattaaaacaagtcaccgcacagtatttgtaaataatgaatctattttcatagaaaggagtttatgatgatattaaatcagattgtagaaaaacgtaaacaacagcttctcaaagaacaatccgcaattggttttgaagaaatgaaagcatttgcaatgcaggattcaagaacttgtatctcactttatgacgcactgaaacaggatacgctttctgttatttccgaagtaaaaaaagcatctccttcaaaaggactcatttgtcaagattttgagcctgtatccattgccttacaatataaaaaagcgggaaccaatgcaatttccgtattgacagaggagcattattttcagggcagcagtcaatatttaactgcaattcgtcagcaaattgcttctattcctatcttaagaaaagactttatcatcgaaccgtatcagatatacgaggcaaaatgtattggggcagatgcaatactgctcatcgctgccattttagacacagaaaccttagcgcaatttcgttctatcgctcacggtttagggttggaatgcttggcagaggttcacaatcaagaagagcttaaccgcgtattggaagttggatttcaaattgtaggcatcaacaatcgcaatttaaaaacgtttgatgtctctttagaaacaaccgcacagctcgcttcttatataccaaacgaatgcgtcattgtctcagaaagcggtattaccaccaatcaggatatgaaaacagtacgcagtcacggtgccgatgccgttctgattggagaaacactgatgagaagcagccatattgcagaaaccatggcagcattgaggaagcaagtatgaaacaacaatgcaaaataaagttttgcggtatccgccgtttagaagacgtgacatatatgaatgaattcatgcccgattatgtaggttttgtatttgcaccaagcagacgtcaagtgtctcctgccgtcgctatggcactggaacaggaactgcatccggatatcaaacgtgtaggcgtatttgtaaacgaacctatagataagctgatacaaacagcccaaacagcgcaattagatgtactgcagctacatggggacgaagattgctcctatatggataaattacatgaaacgctaaaacaggaaaatctgtcatatgagatatggaaagccgttcgtgtaaaagatgaagatacaatacgaatggtaaatcaatttcaagcggataaactgttgttggacagctttacagcagttgcttacggaggcagcggcaaagttgccaactggaagataatacaaacagcaaaaatagaaaaaccattttttcttgcaggcggccttaccgagcaaaatattgtagaaggcataaaaacagtacagccgtacgggattgatttatccggcggcattgaaacagacggctgcaaagacagaaataaaattgcaaaaatcatagaactggttagaaattgttaaagagaaatgaggtacatccatgaagaaaaaagtaggcagattcggagatttcggaggacaatacgtacccgaaaccgttatgaatgctgttcacgaattggaacaagcatatgatttttataaaaatgacccacagtttcaaaaagaattaacagacctgtatcacaactatgcaggcagaccttccatgctttactatgcggaaaagatgaccaaagatttaggaggagccaaaatttatatcaaacgggaagatttaaatcatacaggttcccataaaattaataatgtattggggcaagcgttattggcacaaaaaatgggaaaaaagcgtttaattgctgagacaggagccggtcagcacggagttgcaaccgctacggtagctgctctgtttggtatggaatgcgaaatctatatgggcgaagaagatatggaacgtcaagcattaaacgtatatcgtatgaatttacttggcgcaaaagtaaccggcgtaaaaagcggtacccgcactttaaaagatgcagtaaacgaagctatgcgagactggacagcaaacgttgaaaatacatactatttaatcggttccgcaatgggccctcacccataccctaccatggtgagagactttcaaaaaattattggtgaggaaacaaaacgccaattagaggccatggaacacacactgcctgactgtgtagttgcctgtgtgggaggcggttccaatgccattggtatgttttatgactttattccaaatgaaaccgtgcgtttaataggagctgaagccgcaggtcatggtgtggataccgctttacatgcggccaccatggcaaaaggctccaaaggaattttccatggtatgaaatctttattcctccaaaatgaagaaggacaaattgattctgtttactctatttctgccggtctggattatcccggcatcggtccggaacatgctcatttacacaccagcaaacgtgctgaatacgtaagtattacagatgaagaggctgtttgcgcctttgaatatttgtcccgtatggaaggtatcattcctgcaattgagtctgcccatgcagtagctgctgcaagaaaaattgctccaaccatgaaacagaatgaaattatggtaatatgcctgtcaggacgcggagataaagacgtatatcaagtagccagatacagaggggtggatattcatgaatagaattgacagcatgtttgcagaattaaaaaaacaaaacaaaaaagcattgattacctttattacggcgggtgaccctgattttgataccacagaacagttggtactggaaatggaacgtcaaggcgctaatctcattgaattaggtgttccgttctctgacccaattgcagaaggacccatcattcaagaagcaagcctgcgttccttacagggcggaaccactctggaaggtatttttgaattggtaaaaaaactacgcacaaaaacggaaattccgttggtattcatgatgtatatcaataccatttatcgttttggagtagagcgtttcttttctctatgccaggaaacaggaattgatgccgtcattgtacctgaccttccgtttgaagaacatgacgaaattgatgaatgtgcttacgctcatggcgtgtatccaattaatcttgtcgctccaacgtctaaagaccgtattgctgccattgcggcaaacagcaaaggatttttgtattgcgtatcctctaccggcgttaccggtgtcagaaatacattccaaactgattttgacagtttttttgatacaataaaacaacatgcctctatcccgtattgtgttggttttggcatttcctcgcctgaacaagtgaaacagatgaaaacgtactgcgacggtgtcattgttggcagcgccattgtaaaaatgataggacaagaacagaaaagttctgtagcaactgtgggtacatttgtaaaaagtctacgaaatgctttggatgatatttctaaataaaaaagagcagcatatgctgctcttttttatttagagattgcggttggtaccaatactacggattgtttccctagctcttcccagcgttttgttaccaaatttttatggtattttacagtaccattgctgttgtatggatcattaaaataataataattttggtctgctcctaccaataccatgcagtgttctcccgctgtccatgtaaaccattctcctgtatcttccagtatccagctatcccctacggaagttggagccaaattaatgctggcccacagcaatacaggtatattacgttttacatagttatcgaccaacgtatctatatccgtattggttgtatccatcgctaaagctgtattgccaaccgcattatttaaagcacttacaataaccggtgcataacatccgtatcctccggaagacctggggtccccaataaaagcctgtgtaggacttgtactggttaaaagacctgtctccgtatcaacaaaaatatccgcttgcggaagataatcatcaataaagtcatcaacggatacatcatatccataataggaaagaaccataaccgcactcacaatttcacatgctgtaggatattcaccttcttgtgaaagatacggaacatccaatagaaagccattgctttcttctgcctctttttgattcaccgtttctgctttttcaattccggtattgccaagatttaaagtagacatagaatcttcttgatgaaataaacccattgctatcagaacaactcctatcactaccagaatggtaatcacaaaactcacgatgctaaccaataaaataaaacgtttctttttaaaatatatgtataaggatacatgtttatttttcatttttacacattctttccaaaataactttttcattccattatttgtaacgataatattatgtcatactatattacacgttgtttgtaagaatatgtaaaaaaagtgtaaaaatttcaactttatttatgcagataatttttccaggctcattccggctatttgctccataggaacattgtaaataaaaataaaccgataacctgaatccaaggtataaatcaacaaaatttgctggtcttgtatcacaacatcataagaattatggtcagagtttaaaaagttttctaacgctgtagcagctttatcttgataaggatttgtcaaacataagtggtacaaatcagttgctgcaatatctacgatatcgccttcagaagtagcatcagactctttggaagttgtaaacttattgtatgcttcttcaatttgagttctatcagcagacttttgaagactctctttatcggccacatgtaaatacaataattggccatattggtctactgcacagttcacaacttttgtctgttttactgcattgttggatacatgatttgctttctcttctatagcaggagattgctcggaattttctcctgaaaatgaatatccggtacattcaaaattctttagaaagtataccggaacattatttgaagttaccttttgaaaatgagatataaaatctgtttctttattcgattgagctgcctgattcagtaaaccggaaatatgaatttcactcaaaaacatcttatcatcttcagttaaagatgtcacagcatcatttttatataatccccatggataaatagtgatttcttcttctctattccagtagagaggctgcatttgaacattttcttcgcctatatatgtcattttatttttataacttggaatccaatattgcagactactgattaaaatatatccaaggcccaaaatagctgctgaaataagaagtgttataaggagcctgatgacatgaaactttttttctttttgccgtggtttcattcggtctccccctttttatcaaagataatactcacgcaagtaccctttctagattcgctttcaatttggagtctggctccgtgtaatcttgcaatttcggagcataacgccaatcccaaacctgctcctcctgcttttctggttcgtgatttatcaatcatataaaatggctgcataattttattgatttcttcttttggaataccaataccatggtcttttacggcaattgttaatattccatttgtttcttcggcgaagacttcaatttcctggccggattttgaagctttaattgcattgtcaatcaagttataaatcaatgacttaaataattctttgtccactgacacttctattttacatacttttatattcagtgtaatgccggacttagataaagaaatttgcagtgcctgtcctacttcttccataatgctggtcaaaggaatggtttgccaatccaattgtgtgcttcctactgtaatcaattccatcaatttaccagacaatgtttttaagcgtttggtttcctctacaataataccggcatattcacgccgttctttatcatctaccgtacgtttaatgcgaagtaaatcaccaaagcccaaaatagaagtcagaggtgttttcatttcatgcgccaaatttgcaatgaaggtatttctgtcttctgcaacgctttccaaatctttaatattatgttcaattgcttccgccatctcgttcatattacgtgataattgagaaaattccgtactacctttttcaggcagtcgtttgctataatttccctgcgcaatttgtcgtgttccttcattgattcttcgcaaaggcaacagtaatagccacactacaatcaataaaacagaagcaatcaccgttgcacatatcatactcattaccaaaacatagtttaattgctgcttatataatgtataaatttctgttacgtcagaggaagtcatcaaataatatggctgactctccaatataatttgagaaatgacaattaaataagacgcctctccgtcatctacaatttccagcgcataaccgcccaagccctgcacttgatttaatacactggattgagatgcactttgcaaaatagaaacctccaattgttccgaacgtccattatagctaagcaaccgcctttgccctgtatatagcgacaagcctatggtacgtgcactggattggggttcaaacgcagactgagttacctgaattacttcctcttcggtcagaaacactttattttgttttaaccgttcataaataacattatctttcagcatcacggataagtatttatgctcagaaacggcattctgttcttcacgcatgacggttaatctatggctgttggacagcagcaaaaccgatgtaacatcaattgctaaaattaccaatgccaaagaacacaaaaatatcttttgccaaagtttcatttagttattcctctccaaacgataaccaagcttcggtattgtaaccaatttattgtgtaatcccatcttttttcgtatttgttgtacgtgtatatcaaccgtacgggtttcccccataaattcatatccccatacagtagcaagcaagcgttcccttgtcagcgcaatatcctggttttgcaggaaaaaagcaagaatatcaaattcttttggagttaaactaacgtagtcgtctcctttttttactgtatgttcgtcaatattcatggtaatatcaccataatgtatggtattgttgcttttatgttttctacgcagtacgacttcaattctggctaataattccactgtttcaaacggttttacaatataatcttccgcacctaattttagcccctttaccttatccataacatcctgcaatgctgttagaaaaataactgctgtctcttctttatcaatgtattcaattactttaaagccgtccatatccggcagcataacgtccaataaaaccaaatcataagactgagaagttaccaaatctacagctttttttccgttatcacatctctcagattcatatccgccaatggacaacgtcacttccagcatttttgctatatttacatcatcttctacaattaatatttttgccattctttcacctcatttttaaatttaatatagcattcataacgttgttttacaaccgtacagccctattgttccagatttttctacatgtttttacaactcaattacaaaatgatacatcgaacataaaaagcgctatagaaaatgaatctttcccatagcgcttttgagtcaatgtatttcttaatgataaatatcggatgttgattttccactttcttccggagatgtttcatgttcttccacagaccaagtctctgtatgatgaatagacatattatgttttctttgagcaaaggattttacattattttggatgcctgtcgaagtatagaccagcagaaacaacatacctgtttgtatccaaaaaatagtaacatccgtacagccgtgaattaaaactgctgcaaacatgaccaataccagaatatttctgtttttacacacattcacttggaatcgtttcatcagcaattttaactgagttaaaacataaaagaaaatggcacatccgcctactacaccaaagttcagcagtgtatctaaaaataaattgtgtgcatgaaaagttggataaccgctgtaagcaggccatactaactgataagcacttggtcccataccaaataatgcatggtcagctataccttttaacgcagtgctccacacatctatcctggtgcggaagatatcggtagttgtatcaatacgcggaaatatttgtcctgataataaagcaaaagcaataatcgcaatgaataaaaataaagctgttgctgacttcttttttccttttatcatcagatatattaacattgttaaaaataatgtcatgcacgatgacatactcatcgacatatatagaccaatcagattaaccagaataatacctatataccactttctcatttttacattttgatttgtaaaaatacggtacatagcaataattactacgaattctatcatcatgccgtaataattagcgttagtaaaggttgacggcggtctaccgtctactgttaccccaggaaaccaaaacatttgaattgcagcaatcggtacacaaatgatactggtaaaacaagctacatccatcatattgtcaaataattttcgcgtcatgattgtttttccataaaacataacaatcaaggccaccaaaaaaaccagcgaatacataattcctgtaaaattcatatatacactgctgacaatgattccataaatcataatgctcataagaaataagttagatggatttaaaaatacggcttttcgagaattcttttggataacagaaacaattaccacaaaaatcatacacgccaaagtgatataaaaaggaaggaaaatagaaactgttaacgaaagcattaaaatactgttaaagcctccaagtgttttggtatgtttcaaaacaccgtttaatttttttataatatgtaaaccctccgaatataaaaaatgatatacattgttattataacataaaagaaattgcaaagcaattttactcatacaattactaaaatataccgacaatagctaaaagttccctttatgtgcctatctaaagctatcatcttataaaatatgatataaagctaccctatatccagccatatattatgatatatttttttgaacacaatatttatgttttataaaatttcattaaaccaacataaaagttacaaaataacttcaatatcataatttatctacaaattacggtcaaaatcatgtataatatgattatatatgtttcagcgcaggacatatattaatatattgaatactaatatctaaataatcctaatatattaatatgtagctttattggcgtatataaaaaatatgcggtaaatctgtgctctaacaatacatatatctattataggagatgaatatgcacttggaccaaaacaatgttgaacataccaagccttcttcagaacaattgcatgggctaacagatgcagaagtccggcagcgtattgaacaagggctcgtcaatcataatagtgacattaagtcaaaaagcatcaagcgaattgtactggaaaatttgataacaccctttaacattttaaactttgtactagccgttatgattttaattgtgggctcttataaaaatttattgtttatgggcgttattatctgcaatatttttattggtacggtacaagaaattcgcgcaaaaaaaaccattgataagctctccttaattgccgagccaaaagcacatgtaatacgcgacggtatcaagcaagaaattgccattcatgatattgtaatggatgacattacttttcttggagcaggcaaccaagtttgctccgatgccgttgtcattgaaggtgaatgtgaagtaaatgaatcattattaacaggagaatccgaacctgtattaaagcaaccgggagaccatttactttcaggcagttttattatcagcggcaactgccatgcacgtgtagaacatgtgggaaaagataactatgctgcacaaattacagataatgctaaatatgtaaaaaaaccaaactcagaaattatgcgatggacaaaccgcattattaaatatattgggtttaccttaattcctgttggcattgccttattctgcaaacaagtttttatatcccatcagggattcaacgatgcaattgtaggtgttgtagcagctttaatcggtatgattccggaaggtttaattttattaaccagcgttgtatttgccgtaagcattatacggctgtctcaacacaaaacattggtacaagaactatactgtattgagactttagcacgcgtagatgtgttatgcctggataaaacaggcaccattacagaaggaactatggaagtaaccgatgtactgccactacacgatacaaccaatgaagagttgaatattgcattgggttctttaatacatgcattggaagacgataatccaacgtttaatgcagtaaaaacctattgtgaccaatatgataaattgacctgtaatcatattgttccattttcatctgcaagaaaatggagcggtgcttcatttgatgaaaacggcagctatattttcggtgctacagaatttattttaaaagacagttctccatatcaagaaattattaaagagtattctgaaaaaggacaacgcgttttaatgctggcacattctccacatcaaattcaagataaagaattgcctgcagaaattcatcctatggcatttttatttatcagcgataaaatacgtgcggaggctcccgacacactggcttattttgcggaacaaggtgtagacatcaaaattatttcaggcgataatgcaattacagtagcaaatattgcaaaaaaagccggtttaaaaacggctgaacaatatgtagatgctaccaccctacagacaccggaagaaattaaggaagctgcacaaaaatacagtgtgttcggacgtgttacaccacagcaaaagttagatttggtaaaagcattaaaagaacaaggccacaccgttgcaatgacaggagacggcgtaaacgacgtattggctttaaaagaatccgactgcagtattgctatggcttcaggcagtgatgctgccaggactgtttctcaactggtactgctggattccaattttgcttctatgcccaaaatattaaaggaaggcagacgctcaattaataatttacaacgttcctcttccttgtttttaacaaaaacaatcttttctacaatcaatgcaattttatttatctttctacattttgactatccgttccaaccaattcaacttactttgattagtgcattgacaatcggcgccccttctctcattttggcattagagcccaataaggaacgaattaaaggcaagtacattgtaaatgtcatacgcaaatcgattccaggtgctatgacaatggtatttaatatcgtggcactggccattgtatgctcatttattcattttaacagtacagaaatctcaacgcttgccgttatgattaccggatttgccggtctgttggtattattaaaagtctcgttaccgtttaactggatacgctgtgctttattctttactatgctcggagcatttatattcgcaatttttatcttaaaagatttgttttctcttgcatcaattactttgcctatgttctattgttttttagttttggcaggttttgcaattattgtttttgtactgttttcactactaattgataaactattaagcaaacaaattgaccgcttagaaacaaaaataaaataatcaaaagcctttgcagaaattgcaaaggcttttttaatgaataacacaaaactccacagcaaataatcatccatacagatgtttttactgtggagcgataagtgaagagaaataggaatagcaatttataatgaaaaagaaaaacaggtattgtacttgtaccagctattaacttgctgttttcatttgcaggcgcaatttatcgcttatcattgcaataaattcactgtttgttggcttacctcttgtattgtgaatggtataaccaaaataagaatttaatacatctacatcgccacggtcccatgcaacttcaattgcatgtcgaattgccctttctacacgagaagatgttgtttcataacgttttgccacggatggatacagctgtttcgtcacagcatttataatttcaggggtttcaattgccatgatgatggaatctcttaaataatgatatcctttaatgtgtgcaggaactccaatttggtgtaaaatttctgttacttgaatttctaatgatggcaggtgattcacgttgttttcctccaatttatcttcaattttattttgataaccagttaattgcagcattctgtctgctaaatcttgtgcatgaaatggctctactgtaaagtaagagacaccgttactcatcaattcatgttccaacgtaggactgctgaatgaagattttacaaaaaataacggttttttatttatttttaagcgttgtaaagaacggatgacaccgattccgtctaaatgcggcataaataaatccattaacactaagtctggttgttcctcttcaataaaatctaatacttttaggccgtcttttggagcaaaacatagctgaaagcctgcattttcaaatacttttgcgtactctctattaaattcgtcacgttcacttgaaattaataattttagagcgtttttcatattttctccccctgtttttttagtgcagatacatattaccatataatggaaatattggcaatagtttgtaagattaaatttttaaattgggagaaaataagaatattctacaaataaaattgtcgaaaataattttttaggaggctttttgcacagactcttgttccattgaaaccagattctctaccatattctctgcaaaaatgccatatcctctggtaggatcatttaaaaatacatgagttacggcaccaacaattttaccattttgaataataggacttccactcatgccttgtacaatgccacctgttttttccaacaaaacttcgtccgtcaccaaaacaactaaattttttactcgggaagaatttttgtattctatgctttcaatggttacattgtaatattgaggttctccgtcagctaccgtcgttaaaatttgagccggaccttctttcacctcttgtttcatcgcaaccggcagtgcttgttgttctacgggggaagcatccagttgaccataaacaccttcatcagaattaataaacaaattgccaattgcttggttactgctaaaatagccgcgcagttccccagcagcacctttctggccttttgtaacaccactaatcgttacagggacaatatcaccatttttcataggcattaaactatttgtgtcaacatcacaaataccatgtcccaatcctccgaataatccgttttcaggattataaaaagtgactgtaccaatacctgccgtactgtcccttacccacaagccgcctttgtaagatccgtcttgtgatgattttacaggatttaaggaaatttctaatgtctcggtatcacgttttactgttaacaccaaaggttcaccgttacaatcttgaattgcttttgatacttcttcgttttcgttcacagtttcaccattaacattagtgatgatatctccaatttttaaaccggcttctgttgccggatttgtcttaccggattcagagtcaatgtcggacattccgacgactactacaccattggtaaacattttaattccaaaaggtgtaccgcaaggtaccaacatcaaaggctctgttacatccacatggaccgttttaatcggtatggtgttaaataataaaatatctgcgtcatattcaccggttgaacgattcatagaaataacatctacttcattttctgttgccggctctgtactgaaaccaagtgtttgtaaatctaattcttgcccttctaccactctgaagctgtctggaagggtttgttcggcaataccaacagttatgccaaatgccagtacaaacgcggctgcaacaccgcttaaagctctaaaaacatttttcatattaccattgattcacctccttttgcgcggcttatatataatctgccacaaaagagaaggttttattttggtaattaaataaatgaggtgtaaataatagaacttttattgcctaatcaacaagttgctgttttcgcagaaacagattggtatattttttctcaatcattttcaaatttttaaatggggagacaataaaaacaaaaataatttggatatactatttatggtgtcctctataaatgtatttgtttttttcgtttatttcttttacgtacagcaatcaaaattcctgccgtcgcagcactaacaacaattaccaaaccaaatgcaagaatatgtacagtgggagatgtttgatcctcagatttgttttcaatggtcattgctgctgcatgctgtgttgtttgctcgtcatcatttgtttctcgcgcatgaatagtattcccttgagataatacgcatataccaatagtcaacagcgccatcacaatgataaaaacagattgtaactttctaaacctttttctgctaaactcactcaacatatgctctcttccctacattttaaaattcattggtaacaaattagttacagtttatcacagctttgtcaccatttcaagtgaaatacgatattttgttacttttaacggtataatacgtgttaataccccattatgtagtgtaacgctcattgtatattaggagagaaattgtcttcttctgcgataaaaccacagattatgtcgaaaaaagatgtattattttttgttgataaaaataattatgacatgaaaatccgcatagataccgcacttaataaaagaaattttaattttttgtgtaaataacaaaatttttgtaacttttaccatatctttgtaacttaacaaaaataaatagaatacacatcattataagtgatgcatttttaataattgtaagttttagcagtataaaaatatcaaatacattctgtaatgacaaaactttaaaatacgtctttctaatacatgatatccaaaaacgaatgaatcattattgtaaacatgctacaacagtataatttttaaatgcagaatactcacaaccaaacactttgcataaataaaatttcataggcaatcaaagatatccaacaaaactccaacaatacaaacatcttatcacaaatttataaaacgctattccaaacaactatgataaacaatgtttcaaacaagactacataaaaacgctccggtcaagtaatccgttgtagaatacttgccggagcgttttacatgttgtttcaattttaacataaacagaactgtttatactaaatcaaaacataatatttaatttcgctttttaatcaatactttcaagttaacaaaacattaagcgtttttgtttaaagcttttttctcagcttgttcaatcataacacgttctacgattaggatgaaccaacctgctagtacgaatgcgattgtgcagcttgggaatccgaaggcacccaagatggtttgtgcaccgaagttgataaggctggtcataaccaaaccaaggaagaacaagaaccagtatcttccggagttgattctgctcttgcagaaggtatccaaagcaccaacagtaagaatggagctgtaaccataaagagcaagacccatttgacccatgtcagcgccaaatagtagacccatgccaatagcaaatcctgtagcaagtaaagcttttaatgcaaaatcccatttataccagaaatatgctgcgataacaattaaggaagcaataaagccgtctgcaacataaatttcttcaaatgcattgattgcaaatagaccccagtgacttgaagtcatagagccccaatcccagcccatggagttccagtcaaagccagtcatccagctgccgccgttaccggttagaccattctctaagaatgtgttcatacctgttcttaacactgggtcgttaccaacagccaataggtctgtttggaagctgattgctgtgaagaaccaaaccatcacgatgaatgggaatgtaaaaccaggtagaccgaagtgatttgtaaatctgttgatgaacatttgcaatggaacgcacaaaatgcatcctacaaccaacatgatccatgcagaccaccagttacctgcagcatcagcagatgctgtgaatgtacatgagccgatagcaatcaggttcggacagaagccgaatagtcctgaagtaattgcatctctgtcagcgcccatgagatatgcaacaaggttagcaaggtttacgccgataaatgcgaataccataattctccagctataccagttaccaaaatcccaaccattcatttcaaggccagcgatgaagaatgatatgaagattaaaaatcctgcgataacgttttcaatgaaaaccacctgtccaataccattaaagaaagctctaattggttttggtaatgatttaatatcaatgcccatttttctctccccctaagtctttttcaaactaactgtcgtcggtttgctttgttgatttgcaactaatgtatcaaatcggtcctcccttctgtgtttttcaaatcaacctcttttttgtcacagtgttatgcttaacactgcaatcattataaatttataacatccgttataatttataacttattttataaaaaaaatatttatttgtcaagagctaatatcgaatattatatatatttatatatataataaggaagcaaactgtcatcaaaacttataaaaacctttataaattcttttacaaactatacattacatacaacccgtttacaaatttatgcaaatctattcataattcggtcacacattcccatgagttatcgagtatactattaaccatagtaaaacagtatagtttcagctgtttttgtgaagtacaaacaagtcatcatgaaataaaagcagccaaaacggcgctaaactccatgtttggtcaatttattgcaaagccccggctactgcttcgttggcagccttttttattacgtgtttcaaatgataaaatgataacctcctctccctcacaataatccgctttttcagaatagatatcataaatttataacataaaaattttactcttaacctaaccctcttttctaaaatatatctttatacattgtacaatatgtcatatagacatcatatatgttttccaaaacacgctccatgatattttactaaaaaataataaaaagctgcaaaatttgcagctttttttgacattccaaaaaagtactccacagaacgtgggtacttttttatttttatagaaatgcttttacaatttcgtcggttttcatgctacgagagccttttatcatcatagcatcttcttttttcacaatttcttttaaaacatgaatggcttcctgattattcttacacataactaccgtcatgtcaggcttcacagaaattgctccttctgcaattttcaccgctcttgggccaactgtaattaatacatccgttaatgtacttcctacggcaactcctgtatcaaaatgtgcttgttcgctcatatctcccaattccatcatatccgccaaaacagctatttttttcccttgattgggtaaactgcaaagtacatcaattccgcttttcacagaatcgggactggcattgtaagaatcgtcaattacggtaatatcatctatatgataaaccgtttgtcgcatttcaggcggctgatattcatttagtttttccaccactttatctaaattcaatctcatagtctgtgcgacagcaattgcagataatgcatttaatacattatgtatgcccaatacaggcaaggtaactttagaagtataagttggagtatgtactgtaaatgttgtcttcataccatctgtttgtatgtcttcggcacgataggtacaccaaggttgtgtaccgtaatatacaacaggcagtgtggttgtttcgcaaatgcttgccaacatctcgtcatcgccgtttaaaaacataatggaatattcatcaaaagcatccgcaatttttaatttttcatgcataatatgttctctggttttcagctgctcgatatgcgcaataccaatgttcgttaccaccgcgtaattgggttgtgcaatatgtaccaaacgttccatttctccaaattcactgatacccatctcaatcacagcggctgtatgctctttttcaaactgaaacatggttagaggcaatccaatctgactgttggagttgcctttggtctgcattacatttttttcagctgacagcgccagcgcaatcatttctctggtgctggtttttccaacgcttcctgtcacacctaccaccggcacttgaaattggttgcgataaacagtggcaatttgctgcagtgcatcttgcgtttgctccacataaatccaacaatgggcagaatcctccatagatgtatgctcttgtgttaaagcagcgactgctcctttatcaaatgtttgctgaatatattggtgcgcatctgttttttgacctataatcggtacaaacaaagccccgggttctattaatctgctgtcggtttcaacagaggtaattacggtttcagggtctccacacaacaaaacgccgttgcatgcttttacaatatcttttacaagcatttgcatattccgttccttctttcacatccaaattatgcatttctcatgctaagattcaactcttttacaatctcatgttcatcaaaggggtattttacaccctctatttcttggtaatcctcatgtccttttccggctaacaccacaatatctccctgctgtgcatgctgcatgcaatacgcaatggcttcttttctatccggtaccactacatatgctccatttgttttttcaagacctacttttatgtcttcaatgatatccattaccggttcaaaacgggaattgtcggctgttacaacggataaatctgccagttgaccgcaaacttcccctacctcaaatcgtcttgatttagaacggtttcctcctgcaccaaacatacaaataatacggtttgggtggtattcttttaacgtttttaataagctttccatgctgactgcattatgagcataatcaattaataatgtgtaaggaccgtctacaggtatcatttctactcttccctttacttttacggtatccaagcctttcaaaacgtgttcctgtttgaccggaaaataagaacaagctgtaattgcggctaatgcattgtatacactgaatttaccgggaatcgccacgtctacctgtaaatcacattttccatccaattgaaaatgaacgcccaaatatccgggtttactaatcaaatgttccttacttgcatgataatccgctatatccgaaaatccgaatgtagcaatattttcacaggtattgccatctatcattcttttccataccgcatcatcgcaattgactgccccaaaacgacactgtttgaataa

SEQ ID NO: 647 - DNA, 2517 bp, Unknown
  16S sequences of unknown bacteria
cgcatttgtctggcacccgcctgtgacaaaggaaaaaatgtaaccgggcaatcgagccggcggacggcgcttaataccggcagcgctcttgaatttgtggtcttgcgtgcggaatattcgattattttttcaaggcttttatctcccgtaaacgccgcggcgctttttctgccgccggttaagatattcattgtaaaggtattgcgctcggcttcggggtacaagccgtcgttttcctcggttatgtagtacacggcgcgggcggtgtttttggtatataacattccgttaaagcgtgccgtacctaatgggtttttattcttttcccgcctaagtgcaaaggacggtaaaaaggaaagcgggctgtttcggtcgggtacggagctgcaaaatacatcagtctttccgccgaagaagaacagcatcaggtttgaagtattaaggcgtttgtttataagagggcttgttcctctgaactgtgcgtcctgctcgtaattaaatcctatacccgaaagcagtctgtttcccgcctctgttactctgatacttttatgatttttactcgttcttaaaagtcctgcaagaaataaggcggacacctcatattcaggtaaaaacggactttcaagcggcagatccttacaccacgcgcacagcctcaaaattaggatttctgtattgctcaaaaacaaactgcactacctcccatactaaggtcagttaaaccctgaaaacatactccgaaattgcctgtaaatcctttaacaatgccgcctcataggttgtgcagtttgttgtgtttaaaaaactgctgttttttgaggtttttaaaaccaactgcactaccctaattcatgcgaaagccgcatatccgtaaatattccggcttcatcatccggcagtacaaagatatgacaggcgctctcattccgctgctcggtaaataatccgagggacatttcaaagcggtcgtcatccgggaaaagcctgccctttaaaacattctgtaccgccttaaagcccttgttgtcgtggtcaaaaacatcgctgcaatcccgcgggcagaactctattattccgagatacgctttgctgaaaaacggcagctttattccgtcaaactcggcagagtttaaaagccttaaaatactgtcggtcacatactgcgtgccgcctgttactctgcaatggggcagcagggcgttcagctttatatgtacccacccttcgggcgttacggatatttctccgtatatttcctttgctttgccgggcttaatttcagcattagtttcttccttgctttttaactgccagtaaagccgacgcatttcaatacacgccatttcctgctgctggagcgctacctccagcagattattaaagcgttcgctctccggcggcacgcctattagcgaatccacgcaagccccgcttgccagaacccgctttttcatttctttaagtaattgaaaatttgtagacaatttaaaaatcctttcttgacactttttgaattgtacgctataatgtacatataatagaataagaggtgaacggtatgacaaatacaaacattacgaatttcagacaaaatgttttcgattacatcaatcaggcgattgaatacaacgacatcataaatgtaaacaccaaaaacggtaacgccgttattatgagcgaagaagaatataacggaataatggaaacactgtatttatcctccgatccgcaggtcagaagtgaaatactgtccggaaaggatacgccgttatccgaatgtattcctgcttccgaggttgagtggtaatgtataccgttgtttatacaaaggctgccgcaaagcacattatgctgctgaaatccgcaaatttggataaacgggcaaaaaaactggtagaccttataaccgaaaacccgttccaaaacccgccgccttatgagaagcttctgggcgatatgaacggtctttactcacgccgtataaacatacatcaccgtttggtgtatcaggtattctcggaagaaaaaaccgttaagattatcagcatgtggtcgcattacgaattttaatttttcactctaaaagacttgtcttaatcggacaggtcttttttattttctttcccaacctgcaccagacacatagttacagtgccgaccaagccgccgaacattgctccgcacacaaaacatataacttccattttctattcctcccgttttattgttttcatttaatcgctttttactctcttcgcaaggctttctcggtcggtggttataaggtcaaactcggtgtccgacgaacggatctccaccgctatacggtttcttcccgcgcataaaagcccctcgcctctgcccgcgcggataacctccgccgtttcgctttcggtaagcatcagcttttcctgtaatttaaccgcctcggtttcctctaattgcaatagcagctttaatctgctgttgccgagtaatgcgtccccgaatttaccgtcgttcagcgcgaagtaa

SEQ ID NO: 648 - DNA, 10170 bp, Unknown
  16S sequences of unknown bacteria
acaggttccattctttctctcgttgtttaattttcaaggtcctgtgctctctttcaagcggctttcctttcagcttttcgctttcagttttttgccgtctctctcgagcgcttgtatataataccacggggagccctttttgtcaacactttttttcgttttttttaagtttttttcgattttctttcttgtgtacatatattgtgttttgcttgcgcaaaatcaacaacatacagtgtaaacaaaaccgccgctttcgccttttcttttgcgtttttcggttttttctgaaaaaagtccgaaaaacttttgaaaaaactttgaaaaaaatcgcttcaaaccgcttttactctcttttacagagggacaaagtatgctatactgaaacgtatcgggcccctgtgccctatataatagtatatatgacggaggtaaaaaaagcaatgcctattcgtatacaggcggatttgcccgccattgaggttttggagtccgaaaacatctttgtgatgacgcacgagcgtgccgctttgcaggacattcgccccttaaagattgcgatacttaatttgatgccgacaaagatcgagaccgagacgcagcttttgcgtttgctgggcaacacgccgctgcaggtggacgttgagttgctgcacatggcatcgcatgtcagccgcaacacgagctcttatcatctgaatacattctataagacctttaacgacgtgaaggaccagcgctttgacggcctcatcatcacgggcgcgccggtggaaaagatgccgtttgaggaagtagactactgggacgaaatgtgtgccattatggaatggagcaaaacgcatgtgtattccgttctctatatctgctggggcgcgcaggccggtctttactaccattatggcattcagaagcatttgatgaaagaaaagctctccggcatttacaatcaccatgtgttgaacccgtatcaccccttgatgcgcggctttgacgacaattactttgcgccgcactcgcgctacacggaggtttaccttgacgacatcaaaaagcacgacgagctcattgtactttcgctctccgaccttgcgggcgtgcatatcgtcgccgaaaagagcgggcgcaagttctttgtgacgggccacgcggaatatgaccgcgacacgctggcgaaggaatacttccgcgacatcaataagggcttgaaccccaaagtgccgtacaattacttcccggatgacgacgaccagaagacacccccgtttacgtggcgcagcaacgcacatctgcttgttgcgaactggctgaactactacgtttatcagcaaacgccgtatgatctgaaccatttggagggctgagcgccctctcccctatactattatatataaaggagaaagatttccgatgaaatacgatggcattatttttgacctggacggcaccctgtgggacgccgtggaggaaggacgtctggtgctgctcgaatatttaaagacgcagccggacgtgacgcacctgcccacaaaagaggaatacgcaggcgtgatgggccttggtatggacgatctggcggagaagctgttcccgtacctttcttacgagcgccgaatgcaggtctttaacgaggatttcaagttggaatgtgaatatcttgcggagcacggcgcaaagctatacccgcatatgcacgagacactgaaaaagctttccgaaacgcacacgctgtgcattgtgagcaactgcgacaacgggtatattcaggcgtttttgaaggcgcacaacatggcgcagtattttacggactatgagtgcatgggcagcacaggtaagccgaaggcagacaacatcgcgttggtcgtggagcacaatcacttgaaagccccggtatacgtgggcgacacggtgtgggattataactccgcgacacaggcgggcgtgccgtttattttcgccgcttacggctttggcaatgtggaaaacgtgccgaagatttacgatattgcggagctgccggcgctggtttaagacgccgcttccgcttacgatactatgagggatgggagaaaccgaaatgagaaccgaattgctttttgagagctgcccgtttctcaccagtgcaaacgtgacgctgagccgccttggctttgcggacggcgacgcgctgtgggagattatgcaggacgaagaactgtaccgctacgaatatgaagcgcccgccaaggagcgcgtgcaggcggaatataaaattcaggatgcaaacgcgcagtttgccgcaaagcgcaccgtaacgctcggcgtatatgcaaacaccgacctcgcacacctcatcgggtggatcgagatcggcggtgcggacgagggcatgaacatggtgcagctgcgctttttgttcggccgccgctgtgtgggcacggaatatccggcagaagccatgggcgcgctgtgccgctacctgtttgagatggcacgcgtgaaccgcgtgcagtccgtttgcttagatgcggacattgacaagcagcgcattttggagaaatccggctttcagcgcgagggcgttctgcgcgaatgccaccgttgggagcgccagggcgttgtgaatttggcgtattacgccatgctgctgagcgactacaactttttaaagaacacgcgcaccgttttggcgggcgcggaaacaacctcacagcagcagaccacgcagacggaggagtaattttttctcgcgacggctgatttgcacctgtgtggtaccgagccttttggccgtttccgtttgggtctgatttttaaaatagcgatagtagataaggcgctggtcctcctcgggcagcgcctttagtatttgctgcaaggcgaggtgatcggtgattttttcttccggtgcgtcgacgggaatgtccgtctcgttgttttcgtcgtcgccggtgagggagacgggctgtgcggcggcgtttaaggcttccgcgcacttttcttcgggaacaccgagcttttccgcaagaacagacacactcggcgctttgccggtctccgtttcgatctgttcggataggtgtaccgctttcatggaaagctctttcagcccgcgcgaaacctttaccgtgccgccctcgcggaacaggcggcgcatttcgcctaaaatgacaggcacggcatatgtggaaaacttatagccgcggtcggggtcaaagtgtgcggcggctttgatgagcccctcgcagcccgcttgaaagaggtcgtcgtattcgatgccgcgcccgagaaaacgcggcacaagcgcacgcacaagccccacgttgcgctcggcaaagtctttattctccattcggcttgcgctcaaaccgttttgtgagcgtcacggtggtgcctttttgaggctttgaaatgacacgcacgctgtcgcagaagctttgcatcacggcaaagccgagccccgcacgctcctctcccccggtggtaaacagcggctccatggctttttcgatatccgggatgccgcagccgcggtcgcgcaccttgacctgcacggtgccgtccgcgtagattacagccgttatgtacacggtgccgatggtatcgcggtagccgtggacgatggcgttcgtcacggcttcgctgacggcggtctttaaatcgtttaagtctgtgacgagggggtcaaggcacaggacgaacgcggagaccgcgccgcgcgcaaagctttcgttgacggagccggacgggaagcgcagctccatgcggttgatgatctgtttcatgttttcgctcctttcccggcgtcttccagcaccgcaagcgcggagacgccggaaagctccgccattttctttaactgcggtgacaatccgcgtacggtgacgcgcccgccccacagtgccgccgtgcggacacggccgagaatcagcccgatgccggaggaatccataaacggtacctctttaaaatctaaaatcagcttttgcgggcgcacttttttcgctgtactgtcgatctgctcccgcatttcaccggcagtgtggtggtcaagctcgccgcgcatggaggccgtcatcgcaccgccttttaattcaattcgcaaattcatcgtgttcgctcctttaaggcccgaaatgtccgtttgaaatttaaataataacaaaaaggacaggctccttaggaaattctaaaggaacctgtccgtattttttgccgcagtgtgtcggcagattaaatttgtgttacgccttgtatttttcgatggcgaggtcgcgaatttcagatgctaagaagaatgaaccgcagatgacgagcacttcgtcgcctgaaacggtcgctttttctatcgcgtctttcatgctctgcgcaggctgcacgtctttgcagaagtgctttgcttcgtctgcgagggcttccgccgataaagagcgcgggttttgcggctgcaccgtgataattctctcaaagtgcggcgcggtcagctccagatagcgcatgctgtccttatccgccatcatgcccataatggctgtgatatgacggccggaaagatgtgttttgagcacctcatgcaacgcagaggcacagccggggttgtggccgccgtctaaaagcacgagcggcttttgggataaaatctccatacgcgccgggatatacgccgaggcaaatcccttttgcagcgcctcatcggtgatgtttgcgtgcttttcgcgcagaacgtcgagcacggtaagcgccgtggcggcgttgtgcacctgatgtgcgcccgtaaacggcaacgtaagcggcaggccgcgccacgtgagcgcggtgcccgtaagcgccgtgccgtttacctgcatgttcttttcatccggaatatgcaggtgtgcgccgcgctcgttgcacgccgattcgatggtctcgaacacggacggatcctgcacggggtacagcacgacgtcgccgccctttttgatgatgcccgctttttcgaacgcgatcttcgcgtaggtatcgcctaaaatcgccgtgtggtcgagtgaaatggacgcaatggccgcagcttccggcgtatcgatgacattcgtcgcgtcaaatcggccgccaagaccgacctcgagcacgacaaaatcgcagtctcgctgcgcgaaccaatcgaacgcgagcgcggtgatgaactcgaactccgtgacggtatcgcctgcggcttcaagctcgtccgcaacgggcgacacgcgctttacttcttcgatgagttccgcctcggggatcatttcgccgtcgatgcgaaagcgctcgcggaaatcgagcacatacggggacgtgtagaggcccgtgcggtagcctgccgccgtaagcacgctcgcgataagcgtgcaggtggtgcccttgccattcgtgccggctacgtggacaaaacgcggcttcttctgcggatcgccgagctttttgcaaagcgcttcaatgcgctccagccccggcttgatgccgaagcgcagccgggaattgatcttttgcagtgcttcttcgtaggtcattattgatagctctccaatgcttcgaggatcagtttgatctttgcttccagcttttcgccgtttgcctttacgccgtcgatgacattctgcggcgctttggaggtgaatttttcatttgcaagcttcgccttgacggtatcgagctgcttctgtgcgtttgcaagctccttgttgagacgtgcggtctccgccgccttatcgacaagatcgtccatcggcaacaacgcctttgcgtcgtcggtcacagccgttacggccccctgtacatcaaagcccatgccgatctcgaccttggagccgtaagcgaggcgtgcgatgaattcgctcgcttcctcatacggtgccggatgcgcggtatcgatatagatgtgcgctttcttcgacggcggtacattcatctcattgcggcgggtgcggatggcacggatgagcgccataacgttttcgaggttctttgcttcctgcgggaaggagagagcttcgtcgtactccggccactttgcgacaatgagggcttcaccgtcatgcggcagcgtctgccagatttcttccgtgatgtacggcataaacgggtgcaggagctttaaggtgttgctcatcgtccagacgaggacacggcgggcgctgtctgcgctctcttcgtccgcgccgttcatgcggatctttgcaagctcaatataccaatcgcagaaatcgtcccagataaagtcatagagcttgctgaccgccatgccgagctcgaacttctcgaggttttcggtgacggctgccgtgacgttattgaagcggtttaagatccacttatcgcttgtatagagcttcttcggcagggcgcagtcgatgtccttgccttcgatattcataaggataaagcgtgcggcgttccagatcttattggcaaagtttctggaagcgctgaccttttcctcggagaaacgcaggtcgtttccggggctgttgcccgtaacgagcgtaaagcgcagggcatctgcgccgtaaacgctgatgacatcgagcggatcgacaccgttgccgagagacttactcatctttctgccctgtgcgtcgcggatgaggccgtggaagaacaccgtgttgaacggcacttcgcccatgtgctcaagacccgagaagatcatgcgtgccacccagaagaagatgatgtcataacccgtgacgagggtgttcgtcgggtagaaatatttgagctcttcggtgttatccggccagccgagcgtggagaacggccacagcgcggaggagaaccacgtatcaagcgtatcggggtcgcgggtcaggtgtgtgccgccgcacttcgggcagacggtaggcacggtctcggagacgatggtctcgccgcactcgcagtaccacgccggaatctggtgaccccaccacagctgacgggagatacaccagtccttgatgttctccatccaattataatagaccttatccatgcgctccggaatgaagcggatgtcgccgtccttaacggcatcgatggccggctttgcgaggggctccattttgacaaaccactgcgtggaaacgcgcggctccacaacggtgccgcagcgatagcaggtgccgacgttgtgcttgatcggctcaattttaatgaggaagcctgcttcgtcgagatccttgacaatctgctttctggcctcgagcgccggcataccggcgtatttgccaccattttcgttgatgacaccgccgtcgtccatgacgttgatgacgggcagattatggcgcagaccaacctcgaagtcgttcgggtcatgtgccggggtgatcttcacaacgccggtaccgaagtcctgctccacatagctatcggcaatgatcgggatttctttattgacgagcggcagaatgaccgttttgccgacgagtgctttgtagcgctcgtcatccgggtgcaccgccacggcggtatcgcccagcatggtttccggacgggtggtcgcaagctcaatgtagccggagccgtcgctcaacgggtaacgcagatgccagaaggagccttccttttcctcgaacacgacctcggcgtcggaaatggaggtcttacagtgcgggcaccagttgatgatgcgctcaccgcggtagatgagccccttatcgtacagcttcttgaaaacgtggttgacggccttgttgcagccctcgtccatcgtgaagcgcaggcgatcccagtcgcaggaggagccgagctttttgagctgctcgacaatcctgccgccgtactgatccttccacgcccaggcgcgctccaggaacttttcgcggccgatttcttcctttgtgatgccctctttgcgcatggcctctacgatcttcgcctccgttgcgatggaagcgtggtcggtgcccggcagccacagagcagaatagccctgcattctgcgccaacgaatgagcgtatcctgcagcgtttcatccatggcatggccaaggtgcagctgacccgtgatgttcgggggcggaatgacgatggtgtacggcttctttttgggatctacctcggcatgaaagtatttacccttcatccagaagtcatagatccggtcttcaacttctttcggctcgtaagccttagcaagctctttagacacgttttctccctccagtttatcaaaacacaagcgtgtttataaatagtgtgtttgatgacattctattgacttaatattattgcattttcacgggattttgtcaaggtttccgcggtttttacggatacactcaactttcccccacagggtgagtgatttgtggaaaacccggcggtcctataacatttcacagcgtgaaacattctgcgttttcggtgttgtatacagatagtataagttccttcgcacatgagaacgaataggggttgcatttttgtaatctttgtgatacaatgttaccaatttgtaataactattgcccacatctttgcggcggaccgtccgccgtgaacacacgcttatacgtttatataatgtaatgacgaacggaggaacacaacaatgcagaacgtgaaaaagctttcccgaacggctgcggtctttttgcttgccgcgcttattttgatatgcagcactgtactgccgaacaccggcacgaccgtcagcgcggcttccgcggagctgacgtccatcggccttgcggagcacgctttaaaggcctatcgcgacggttggcagtattcttacggcgcttacggcaacttcaactcgaacggtgtgcgtgcctcggattgcagcggtcttatttattcttacttctgctgggtggatgataacagcaacattcagccgaactggaactatccccgcaccgttacggcgcaggcgaacgacgcggtggaatccggccctatcgatacgatcccgcgcacacacggcctaattgtgaccattgcgaactatgaccacgtgggcgtgtacgtcggcaacggcatggtggtggacaacagcacatggggcgttaatatgcgctacgaatccattccgggccatggttggctgcaatggcacaagctcggcagcattacataccccacgacaggctggtataagtttgacggcgactatttctattatgaaaacggtgaatatgtcatcaacaccacccgcaccatcaacggtgtgacgtataccttcggcagcgacggtgtttccgacaaaacgccgtcttccgcaaacggcagcttctccgaagcagactccgcattcaacgcgaagacgactgccggtgtgcgcctgcgcaagggcccgggccttagctatgacaccattacggtgctggcagagggtacaaaagtgaacgtgacaagcacgaagaacagcgaacggtatgccgtgacaacggcttccggtcagaagggctacgttttctccgaatatctaaacgtgaccggcacggtgaacgaggatgattcttccgactccggcagctccgacaattccaacacgggcacaaacggcgaggccgcaaaaacgaccaccggcgtgcacctgcgcagcggcaagggcacgaattacagttcactcggcgtgattccgggcggcacggccattaccgtaacggataaaagcgacgtgtggtatgcagtgaccgtaaacggcaaaagcggctacatgtacagcgaatacatcaagctgaccgacacggggagctccgataacaacacgtcttccggcagcacagacggctccgcttccgcacagacgaacgaagacgtacacctgcgcgaaggccgcggcacaaactaccgctccctcggcgttatcgcaaacggtacggccatcaccgtgacggacacaagcgtgagcgactggtacggcgtgaccgtgaacggcaagagcggctatatgttcagcgaatatatcacaatgaacggcagcaattccggcagcacggacagctccgcttcttccgatacgatgcgcaccacggcgtatcttaatttgcgttccggcaccggcacggacacaaatgtgctgacggtcatcccggagggcgcaagcgtgacagttttggaaaagactacaagcgagtggtacaaggtgagctacggcagccgcacaggctatgtcttcaccgaatacttaaggcaataccgcacagaaaagtaggcgcgatactgccagaagtgatataataagac

SEQ ID NO: 649 - DNA, 6589 bp, Unknown
  16S sequences of unknown bacteria
ggtttttgcacctgtccccttttttaaacctgtggccgccgtagcaattttgtgcggtgccggccttggggcgcaagccggctttttgtgcggtgcaatgataatgcttgtgtcaaattttatgttcggtcaagggccttggacagtttggcaaatgttagctttcggccttatcgggtattttgccggtttaattttttaccgcagaaaaaattttcaacagcctgttgtaatgtcaatctacggatttttgttttatgtatttgcaacagggcctattctcgatttaagcggtattttcggtttcagcatggggaataaagtctctctttatgccactcttttggccggtctgcctgtgaatataaccggcggcatcgccacatttatttttcttcttattctcggaaaacccactctaaaaaaattagacagattgactaaaaagtataatttatcttaattttaacaaataatacatcatttagccgaaattttatgatatgatttatacaaggattgcgaaaacaagcgctgtaacggtaaattgcggcgcaaaacaagaaacgaggtataaattatgggtttcaaatcaccacaggaagatttaaaaggcatgatgacaacatttgccgccactcctgccaagggagaatactcctgcaattatctgccggacatagtgtacgcctgccacgagggcagaagtttaacattgcagataataaaaccggaatatgagggccgcaaatatccctgcatattgtatgtaaaaggttcatcctggcaaaagcaaaaattgtacaaaaacatacctaagttgtgccaaattgcacaaaaaggctttgttgtggcgcaaatagaatatcgtgagggcaattacgccaatatggttgaagatactaaaaccgccataagatttatgaaaaaagaggcggacaaatacggcgttgacaaaagcaaaatcggacttttcggcgattcttccggcggacacatcgcccttatgtcggtgatagaaaaagacaattataacggcgttttatacccggaagaagacagctctgtggctgcagttgcggacttttacggtgtaaccgatttaatatctcttgccaaggactacggtatgactgccgaatatgccgagggctttttaacggccaaccttttcccttatgcggataaggatatttatactgcggcggtaaatgcaagccccataaaccatatatccgacgatttggacattccccctgtattggtagttcacggagatcgggacagcattgttccatttagccaaagcactgaatttgtaaaagcaatgcaaaagcacaaaaaacaggtttatttttacagagttgtaggtgcagaacatgacatcggagtgtggaacgaagaaagaagcgaaattcttgcaaattttttcaactctcaatttataaatattaaataataactaagcaattacgacaaaatgccccggcagtttaaactgccgaggcatttgtttttgtaaaagtattcaaattaaagtgtaattgtttttgcaacactgccggctttaacgcctttgaccgtaagggttaaatcggtgccgggttttgccttgacaacccattcgatttgctttgtaaaaggatcgtgcttaaatgtgtttacaccgccctgcacataagccgcattaacgccggaaaagccctcaatatggcctatgttctcggttttattgcccattacaacttcgccctcaaaagcaatgtccgccgtcaacggcttgtcaactttcaaagactttgcctcgttgcaaacaaatgtaggcaaataaccgatattagaaacaactgccgtaatcttgtaaatatcttctgcctctttttcggctttaagactgtctattgtcaatttaggcaatgtcatagccatacgcaagcagaaagccgtgttcttttcaacttcccgttccaagtatcccggagggcaattttgccacgtgtatttaaagtcgatagagccgatttccaccttgccaagctgcggatggtcaaattcggtccactcctttataggtttgccggatttaacttccggaacattttcatcaatccacttgtagcaaagatattcctgatcttcctgttctttcggggtaagcggttttgtacgggggtaaacattcggcacacctgctctgatagccaaatcccaaagttctgccgtgtatgtgggaataccctgtgactgatacatccagtcgtcaaaagcaccggaagagtaatttaccgtgtctgtaaggaatgcatcgaaaatgttaaaacattcgtagcttgtttcctctgtggccattgcgccgatttccttgaacattctcatatcacggctgtctgcccggacttccggctttgttcccggcggataaatatagcaaccgccgcttgtgtgaaatgttacgccgcaacagatattcgggtgaccgataacaaaatccgcaaccgccttattttccgggttggaaaggggatatttgcctgcccccggctgtcttacatccgggaaccaaccaagtggatagttacggttgaagtccaagccccatttattcggagccatttgaatatgaatgccgtcataatccacaatgtagccctcagggtagcagttgtagtatttgccgccgaaatccgaaggctcgcgctttgtcataatcctcgggtctctcttgctctctttccaaatgccgttagggctttctacacgcataatgcggataacgccgtccccgtccatatccttagggtgaagccccggtgcaggtttttcacatgggtatggtctgtttacactgcgcattttttccgatgttgtaagatacaattcggcgccgtccgggctgatacgaggaataacataaactgaatttgcatccagcaaagcctttattttttcgtccttgccgtattttgtaacaagggtgtaaataaggtgaatagcagccatagagcctgtcacctcaccggcgtgatgattgccgtcaacataataggcaggttttgagagaacatcgccgcttgcgtaattggtaatttccgccgcccaaacttcgtgattgtcgggtgtggtacatattgatgacactttgataagcccggggtaccgctgtgaaagatcggtaagcattgatgtaagttcggcatactcaaagtaatggtcaaagatgtaagttttcatttttatctcctttgcttttaatttgtctaaattataaacctttgatttttaaattgcaatagcattgactaatatttttgcatttctagtgtataaattttagtaaaaagcctgtttaaaattgttattatgcacaaatatacttactgcccctataattcaagcatcaaaacctgttttctgcggcaaatttcactgttgctatatttataaagtttaagtcaacaaagggatttgggcaatttaaaagatgtgtcaaaattcttggcacatctttattctaaaattaaaaatatcttattttatacacattttgtactgccgacggcatatattatccacgatattttgttctgtaaccgtggttttcctccgggcgtaaatcgtttggatacatggtgtctgcatatatatccctttgaagcttttttataagccgatatacatttgcatagtccgaaatgctgtttaaagctataactgccggcgtacccttatttgtaaattgatttgttgtaagctgaacatctcccacattgaaaaactggtcaaaaatacctctgtggagatttatatgtgacaactcggcaaaagtcttggtttccaaattcattgtaaaaatgccgccggacacatacacccggtgatcggttacaatgtaatatgtatttctgtattttctcaaagagaatacagcgcctgccagataaatccaaaccggcatcaagtgcaaaagcataaacggcaaaagcacatagcccatgcctcccatggcattttttaagaaattaaaatcaaacaacgcccaaacaatagccaccggcaacagcggattaaaaatgctttcaaatataaaacatgataaattcggtttgccctcataaagaacagtctcgtctgttccgaccatagttcttaattcttcaaccatattctaccctcctattacagagattatatcaaacacatttaattttgtaaacttatattttgaaaaaggctcttgaatttccgacaaatcacaggatattcaagagcctttattttacataattttatttttaaagctattaatatgtatcatttcattttatcatttaccgtcaaaaaaatttccaaagccagtatataatcggctttggaaatttgcgattttgttttattcttttatcttttccacataaggcaaattctttttgttaataattgcccacattcttataccgaatacaagaatcaatgttactgccgtagccacggcttcgcctaacatatctatgctcaaatagtaaataatcgcaccgggcaatgcagctgtggcataaatttcttttgaaaaaatcataggtacacggtttaccattacatcacgccacataccgccgcctacggctgtcaaaacgccgcagaaacaaatgataaacatattttccttgtgaccgcatgtaatagccacattgcagcctacaaccacaaatattgccaaacccatagcgtcaagagtgtttattacaaacataatatgttctttaaactttgacttcataagcggtttgtacaaagcaatggttataaaagccacaaccatggcaaccgttacatcggttgggtctttaaacatatttgcaggtatattgccaagaataatatcccttgtaaggccgccgccgcaagcagttgtgcatgccataataacaatacccagccaatccatgtcaaaatttatggcaacataagcaccggaaaaggcaaaggttatggcaccgattaagtccaaaataaatgtaaatgttaaattcaaaataaattcctcttttaagttgatatttctcccttttcaacttccgcttgatattttagcatataatttgatttttgttaattatcttaatatacaattttttgttaaaaaaagtatttattttgccataaatctatgttatgattaggctaatatcattcaaaaaccacaggaggataaaaatgaaaaaaataccggtaattatggacgttgacaccggcattgacgacgccgttgccattatcttggccgcaagcagcccggagcttgaaattttgggcattaccacggttcggggcaacaacactatacggcataccacccaaaacaccattgatgttttggccttacttaaaaaggaagatattcctgtttacaaaggcgcaagccgcccacttgtaaaagaggcaaggacttccgagggaacccatggtgacaacggtcttggcaatgttgtactgccgaaagctaaaaacgccgttaaacccgaagatgcaattacatttatgcgcagagcaatagaagaaagccgggaaaaagtaacccttgttcccacaggccctttgaccaacgttgctctattgcttttggcatacccccatttaaaagaaaagatagaaaaaatagttatgatgggcggcggtgctttcaccggaaatatgaccccaagtgcagagttcaacatctttattgacccggaggctgcaaaagttgtaatagaatccgggttgcccatagttttgtgcggtttggacataacaaataaggcttacgcaacacaggctgacattgacaaaataagagcgttggacaacgatgtaagtaatttctgtgccgatgctttacagtattattttgaaagatacacaagaaacccaagatttaaaggttgtgccattaacgatgcggtggcagtggcgtatctcacccatccggagattatcacaactaaaaaatgcagaattttagttgatattgacggcaaatatacatatgcctgcacagcttgtgacttccgccccgaccgtgacagaagtttggataacggcgaagttgggcttgatattgaccgtgaaaaatttatagaactgcttgtaaacgcctgcaaggccgattgaggaggaaatattatgattaaaagacctattataatagacaccgacccgggtgttgacgacacaatagcaattatgcttgcaaacgccgatccaagtcttgatattaaggccataacaccggttacgggcaatgttcagtatgctcttacaagccgtaacgccctgtttttaagggaatacttagatatggactgcaaggtgggagacggcgcacacacaccgctttttattgaaaataaagatgccggggatattcacggcacaggcggtatgggcggttaccgggtgcctgcacctaaaaaaggttttgacggctacgcttgggatattatcaaggaggaggcggaaaaagccggcggagatcttgaaatagtaacccttggcccacttacaaatatcgcaatcacttttttaagataccctgaaattaagcctctta

SEQ ID NO: 650 - DNA, 4278 bp, Unknown
  16S sequences of unknown bacteria
ggcggccagggtgacaaattcttctcgtgtcatgtggtctcctcctgctttgcgttgcggaaatgcagctccggtgccttgatcgtgacgcgggtggcatctttgacggattcggtgatgaacgtgttgccgccgatgacggtattggcgccgatgaccgtctcgccgcccaggatcgtcgccccggcgtagattgtgacatggtcgcccacagtggggtgccgctggccggggacggagtcgtgcccgccccggggagagagggcgcccagcgttgcgccctggtacatcttgacatggtcgccgatgatcgtcgtctcgccgacgacgatgccggtcccgtggtcgatgaagaagtattcaccgatggtcgcgccggggttgatgtcgatgccggtgtggtcgtgggcgtactcggtcatcatccggggaatcatggggatctgcatgcgatagagcacgtgggcgatgcggtagacaaagatggcgtagaagccggggtaggagaagatgacctcctgcttggaggtcgcagccgggtcgccgtcaaagttggcggttaggtccttccaaagcagctgctgaatctcgggcagctgctgcagcagctgattggccgcgtcggcagcgctgtcgtctgtgcaggtgccggtggcccgggcaatctgctcggtcagcttttccgccagctcctgcagcagcagggcgctgtactgggcaggcggcaggcgcagtagctgcgtgtcgccgaaataggcggggaagagaagcttttgcaaaagctctaaaatcgcgatgacggacgcccggtccggcaggcagaggcgttgaccgtacatggggacctccgccgtctcgtaattctgagcgatctgcgccgcgatctcgttgatcgttttgttatccataaaaaagacctcctaaatgcggcgtagtttattccaattcatccagattcaactggaaggcgggcaggcaattggccaggaaccaatcgacctccggcagctgcatctggtccagcgcccgccgggtctgctttgcggcggactcaaattccaggttgcccgccttgagctcctcgatacatttaatatgagctgagagcttatcggccgccttgaccagcgcgccagtggcagggtcggattccaaaacgaagggggcgtagctgggctgcagtgctggcggcagcatttgcagcagcttttcgccgctgacccgttcgacctgcttataggcgtctttgatttcggggttgaagtatttgaccggcgtcggcagatcgccggtgaggatctccggcacgtcgtggaacagcgccgctgtggcgcagcgctctgggtcggcctcgccgcccaggatatcccgccggatgagagctagcgcgtgggccagcacagcgaccatatggctgtgttcctgaatattctctgaaaatgtgttgcgcatcagcccccaacgggtgatataccgcatccgggagatccatgcataaaattgataagcctttttcatagtcgattcgcacctttctcacttgggaatatcttaccacagtctgattttaaagtaaatggcaattccaaatcccggcagtttcattgcaatttccgccgttgtggtgtagaataacaaaaaagagagaaaggcggtgcgatgccggtgaaatatctcagaaaagccctgctggggctggccttggcgctgctgctttgcgtgggcgccggtgcttataccttttcgtccgtggacggtgtctgtgacgtggacaccagcgggacctgccgctttaccgtctccggcgtgattgactttgccgaaccggtggcggagttttccatccccctgggggagcatgtcagcggcgcttcggcggagatctatgcgacgtcggtgcggaaggaaaacggcgtcagcgccctagtctttacccgggaggcggggttctccgggcagatgaatgtcacctggtcctatacaatccaaaatacggtgacggagaatggaaagagccagatgttttccgttccgctgctggcagcccagggcggcgatgtggccaagctttcctataccgtgaagctgccgaaagaattttctgccagcccggtcttttccagcgggtactacgccgatgggatcgacaattatatggatatttccgtcgagggcggcgtgatcaccgcagcagtcaagcaaaagctgatggcaggggacgcactgaacctcagtctggacctggacgcggggtatttctccatgcgccatgtcgcggggcagacgctcctggcagaccggctgctgctcattgcctgctgggtcttggcgctgctgctctggttcttcaagatgcgctaccgcctgccaaagccgggcagccagacccgtccgcccgcgggggccaatgctggggtcatgcgttgcattttggctggtgatacgccggagcttgctctgatggcagcagattgggctgccaacgggtatttgacaatcatccgccgcgccgatgggacttgttgcttgcatcgccgtatggtcatgggaaatgagcgggagagctatgagacgaaggttttccaggcgctgttttccaagggggatacggtggaggtgccggggcggcggtatagatctgtggcgcagtatgcgccgaagccggcgctacatttctgggtgcagcggctgttccggaaaaatgcggttagcccgctatttttgcggttgatttgcctggcggcgggtttggcggccagtttggcgacggcagatctggctatccccagcggcccggtgcggctgctggctgtcatcccgttgacgctggtgggcggcggcttgttctggctagtccaggcgggagcgctgcggttgctgcatcgcggcgtgcggcggcagcgcctgtgtgccttgggctgcgctgcgctgctggagctgggcggtgcgctggccggatgcggcggcgtgatgctggcggcgctggcgctgcagctggtgcttggtgtgctgctgctcttcggcgtgcagcgcagcggcaatggcgtggcgatgctggagcagagcttatcgctttaccgctacctgcggggcctgcgtgccggagatgcggaaaagctgcaggggcaggcgagccagtatttttacaggatgctgccctatgctgaggcccttgggctgggacggcgctttgcggcggcgttttccggcgtgacgctggagccctgcggctggtacgaggcagacagggcgttgctgcccggcagcctggcattttatgaggaatttcacagctgcatgcaacagctgcaggcggcgcctccgcaggaacggcgtccgcgcccagcgcggaagcgtctcgcgcgcaagcagcccgccccggcaaagcggcgccgcggcggcgcccagcggtctgcgcggccttgataggctagagaaccgccgcagatggaaaacccatctgcggcggctgccaaatcggatacgggagaaaaaaagccccacacagcgcagcgctgcatggggtttggagcgggtaatgggagtcgaacccacctatcaaccttgggaaggtcgcattctaccgatgaattatacccgcatagcttgctattataatagcgaaagaaacccgattcgtcaataggaaaaagtgtcggacggcaaaaaaattttccgcccgcggagcatggaggaccgatggaagacgaaaaatggatgcaggcggcgctggagctggcgcgccaggcggcgcaggccggggaggttccggtgggctgcgtcgtcgtccggggcgatgagattgtcggccggggcagcaatcgccgggagacggggaagaacgcactgcaccatgccgagctactggcgattgacgaggcgtgctgccgtctgggtggctggcggctgtgggaatgcacgctttatgtcacgttggagccttgccccatgtgcgcgggggcgatcttgaatgcacggatccctcgggtcgtcttcggcgcggcggattcgaaggcgggagcctgcggcggcgcgattgacttgatgaggctgccgaattatcctaagccaaatgtgacgggtggggtactggaggcggaatgtacggcggcactacaggactttttttgctggctgcgtgccaatccacgccccgcttggcggggcaaacgcaaggaatagagcccgattctgtttaaaataggtgaaaattatacgaaaactgctggaaaacatgcatacaaagcggttaagctgcatgattttgcggcgcggtgg

SEQ ID NO: 651 - DNA, 9561 bp, Unknown
  16S sequences of unknown bacteria
atgtcgcccggccgcagctgccgcaagagatgatcgatccgttcgcagtcatcttctgacagcatctttttactttcctgcggctgttctttttctgccagatattcccgaaagcccttcaaagagtcaaatggcagaaacagccgggccctggcagcgtgcttagcgggcattatgtcctccgatcagcgtgtttcttttgcgtgtcgtggcctgatcaagcagattcatcccgcgcaatactgcgtttttgccatatttcccgcgaatggccgaaatggcctgcatgagctgccgctcttccttgactgcttcggcatcggtaaacagatccagactttcccatgcttcatctttcacgcgctgaaagccgatgtcgatagaacggatcggagcattgcggtccacatacgcatcgaacagccgcctgaattcccgcagcaacagcggataagcatctgtgcggatgcccagccgggcactgcggtgcacacgcgggaggatatcccgggaatagccgatcgacaagctgatctcatcgctgaccagatgctggtcgacgaggcgctggatgctgagctccaccatctcgctcatcaccagccgcgcatgcgcaaaatcataatcatgaaacaagatctggttggatgagatcgagcgcacagacggacgataggccttgatgtccgcgatacgcaccggttcgatgccattggcatgatcatgcagatattctccgccgataccgaattcatcgatgagcagctgcttggggcagcgagccaccgcctgcatatcaaagatgccataacgggcaagcctggacgcggtgccgcggcccacttgccagaaatcgctcagcggctgatgatgccagagctgctgccgataacttgcctcgtccagctcaccgatgccctccggctcatgcttggcaatcagatccagcgccactttggccagatacaaattggtgccgatgcctgcggtagccgtgatgccggtggtctgccacacatccgccatgatgcgccgcgccagctccctggcgctcaggccatacagcctcagatagggcgtgatgtccaggaaagcctcatcgatggaatacacatggatatcccccggggcgacatagcgaagatagatgccatagatgtccgccgccgtgcgcatatacagctccatgcggggcaaggccgtgatataagcgatcgatgcggggatttcaaagatacggcagcgattgcgcacgcccagcgctttcatctttggcgagacagccaggcagatcgctcctttgccccgcgatgggtctgcgaccaccagcggagccgcaaacgggtccagcccgcgctgcacacattccactgaagcataaaaggtcttcaggtcgatacaaagataaacgctgttcatgttttccctcctacgctctcattatagccatgaacaacacaaaatcaacaaaactttgtattcttttgtgtgaaaattatggaaaaccttttctttccggcttgtttttcctataatgcagttgaggtgatctcatgaagctgcaacagctcatccgccggtataagaaccagacgcatcagaccaatgaacagctggccaaacaattccatgtcagcgaaaataccgtcagccgctggctgcgcggcgaagtgacttctttgcaagaagagacggcccacaacgtcagcgccgtgctcggctttgatgtcagcgccatgctcaagggcaaagcgatcacgctgaagcagccagtgctgggtcatgtcaaagccggctatgacctttttttggaaagcgactacctgggtgaggaaagcgtcagtgacgaagaatatcagcaaggcgatttctttctgcggatcagtggcaattccatggtcatggacgggatcagcgacggctcgctcgtctatgtccgccgctgcgactgcgtggaaaacggcgccatcgccgtcgtggcgatcggtgaagaagtcacgatcaagcatttttggaaagaacaagaccggatcatcctgaaagcggccaacccggatgtgcccgatcgcgtcttcaccgcacaggaggcacagcagctgccggtaagcgtgctgggccgagtgctcttctgcaaacgctatttctgacagccgggctgatctgtccattcaagttttcctgcctggcgcatataatgatatcatcatgaagaaaagaggcggtttcatggaccgaacggaaaaacaacgcgcgttcatcattcatttcctatatttcgtcatcgtcgccgggctggtgctgatcttcctgaaatatgtgatctacgagatcatgcccttcctgatcggctttgcgatcgctttcctgctgcagccactcatccgcgcccttgcccgcaagagcggaggacacgagcgattatgggccgtgctcaccgtcatcgtcttctacatgaccatcggcgcaggcatcgccatcctcttctatcaaggcgcgcagttcgccgcagacctgttccggcaagttcctgcgctttatcaggaatacatacagccgctgctgcagacgctgagcgcttctctgcaggagatcatcagctttctgccctttgacgatttcagcgatgtgttcgcgcagctgtccgcttcattggacagcgtcgtctcttccgtatccagcgatctggtttcgctgctggggcaggtgaccgtgggcctgccttcctttgtggtctcgttcatctttgcgatcatctccagcttcttcatcgccatggattatggaaagatcacgcgtttcctgctgctgcagctgaacgaaaaacagcagcaggtcgtcatgacgacccgttacttcatcaaggacaccatcctgcagtttctcatcggctatggaaagatcatgtgcatcaccttcgtcgaactgtgcataggactcagcgtgctcggtgtcgacaacagcatcaccatttcctttctgatcgctttgttcgatgtgctcccggtcttcggcaccggcggcatcatgatcccctggatcatcatctcgctgctcatgcaggacatcaagctggccgtcggcctcaccatcgtctacctgatcatcaccctcatccgcaacatcatcgaaccgcggatcgtcggcgaacagatcggcctgcatccgctgctcatgctgctgagcatgtacctgggcatccgtttcttcggattcctcggcctgttcctgctcccggccacgctgctgctgatcaaggagctcaacgaaaagggcatcctgcatatctataagaccgaaaaagaaggaccgcctgcgtaagacgatcctcaattcttctccttccttctgggaacaagcgttctcagaagttttcttttgtctttgcccttcatgcagaaatacccaaagaaggaaaacagcacggcaccgatgaaattcaccagcagatcctgcatcgtatcgatgaggccgatgtccagataaccgcccagccccagcgaagtcccgttgaccgccacatcccggatatcctccaggcggatcggcgtattgccatgggaagggtcgagaacgaccgtggaaaatgactggatcaccgtgtctttctgcatatccagctgaaagacctgatccatgaaaaactcaaagaactcccacatcacgccgatggtcatgctgacgcagaaagcgaccagcaccgcaaacagcggcgagagcgagaacgagatccgctcgctgcggttcatcagatccacaagcgagaaaccgatggccgctgccacaaagccattcaccgtatgcagcagcgtatcccacagtgggatccgctcataaaacgcattgatctctcccaggatctcagcgcagaagataaagaccagcaggatcacttccagcagcgtgggaagctcgatatggaattccacctgcacggccgccggcaagatgagcagcaacagtgtcagcaggcagagaaagacgttttcgaaattgccgttgagcagctgcaagatcagcgtcagcacgacgaagccgcgcaaaagcagatagacggcaaagctgcccttatgttcactgatctcccgtttcagcgcctcatacgatagtttcatcctcatccccttccgcgtcaattgcggcggtcacgagaacctgcgatcaaaaagacacgcaggatctgcaacaaggtagacaagacgccggcgacataggtgaacgccgcggccttcagcatcgtagaagccatcggccgctcctgttccatgatcatgccgtccgcccgcaggatcttcagcgcccgggaagacgcattgagctccaccggcagggtgatgagctgaaacgccagcacgaccaacagcatgacgccgccgatcacgagcagcgtggaagaacgataaaacagcatcagaccaaggaacagcgcgacccagccgatctgattggccagattgaccgcgggcaccatggcatcgcggatcttcagcggcgcataattctccttgtgctggatggcatgtccgcactcgtgcgcagccacgctgagcgaagcgatggatgttccctgatagatgtccgcagacagccggatcaccccggcacgcggatcataatgatcgctcagcgtcccgcccttaggattcatctccacccggatatgatccagtccgttgcgatgcaggatatgacgggcacactccgctccgctcatcccgcgggcattggctgtatgtgctgctcagccagccctgcgcgatcaccgccagcaggatgcccagcagatacaggatgtactgtgtcgatgaaccataaccaaaaccataaaacatatcgatcactcctttttctgacttcgctcagctttccgcttcatgattcacttcatagaaatgccgcgtcagctgcgagaacacgctcttcttcccgctcttccattcccgggcgaacaatgccgtgacgatcagtccggcaatgaacgcgcaaagcatatccgtcatcgtatcatgcacaccgctgtcgaaatgatggatcgcgtcattattgaatacgacgagcatgaaatattcatagaattcccacagcgcggctgccgccagattggcgaatgtgatgaacaacagaaagatgcgccaggttttcgcatcttcccactttgacgcatgcatgacccactggaacagcagcactccgacattcgtcagcaggatgccgctgatgaaatgcagcaccttatcgaaaaacggcacgccatagccgccaaagcagctgccgatcagcgaggcaaagaaagtgaacagcaggtcgatgatccagatctcctccgtcatcttcagccggcacagccgcatgacgaccggaacgatccacggcgtgatcagcgccaccacgcccatgccgaccgcctgcatatcctgtctctgcacattcatgacaaagccgacggcagagaccgcgagataaatgatccacagcaggatcacccgccatgatttctgtttttgcattaacctctccctttcacgctgtatccgctcatctcatctagtatgacgccgtcaatgcgcattatgcagcagacaccgctcagatttattgtaagaatattttccgggaaatacatgtcacactttcaccgatctgttacaaaatcagacgttttcctcctgctgctcgtttcctctgggcaaacgctgcagcacagcgagcgaagtatggatcagaccggtgcggagcagatggatgaaccgccgtgaggaaatatcctcctgcttcaggatccacttgcggatagacatcacgaacgcatcggtgtaaaacccgatatagaacgccatatcttcctcattctgatccgcaaacatctttttcacttcctcgctgatcacagaggcgacaaactcactgaaatattccgtgaagcagttctgcccctctgccgcaaataccctgcggtaaaacgcgcggttcgcatccagatattcgcacagcgtctgcatcaggcgccattccttcgccccgcgatgcgccctggcccgatcgatgaactcactgcaaaagatccaattcaccaagtcatacttatccttgaagtgataataaaaattcttcctgctcatcccgcataagctgcagatctgcgtcacggtcacctcgctgaaccagtgatcccgcagcaaagcgcgcagagcgtcagcgagcatccgcttggaaacatcagaaccggccatggcatcacctcataatatgttgatgatatcatactctgttcatcagctgaatgtacctgccgccgcttttagacatttctgaagaattgtccacatgacaaaaaccggacttctgtcgaaatccggtctgtttctctcatgcggctgtgctcagctttccctcatccatcaccaggatccgatcgcatcgctttgccagctccatgtcatgggtaacgatgatcaccgtctttccctgcacgttcatctccttgagcagctcgtatactttttctttgttttgcggatccagattgccggtcggctcgtctgccaggatcagctcacacggcttcagcagcagtcttgccatcgctgcccgctgctgctctccgccggaacactgacacactttctttttctccattcccttcagccccacagcctccagcgcctccatgatccgctgccgtttctcttcccgcttcatcctgccgctgaacacgatctccagattgtatgcgatgctcttatcttccaacagcgcataattctgaaacagatatccgatcttttccttcagcagcacctgcgcctgatgagaaaacggccgtatgttcttttcgccaaacaagatgatatccccttcatcctgacgatccagcaaaccgaggatgttcagcagcgtcgattttccacagccgcttgcaccgacgatagccaggaactctcctttttgcacatgcagttccaactgatccagcaccgtatgcttttgaaatgatttcttcacgttttccgctgtgatgatcgtttccatcttcctactctcctttcagcgtctgcgcgatgctcttatgctcaaaacgatagatgaagaacaacatgactaccgtatcaaagatgaagaagatcaccgcgaacttcaggcaataagacagcgccagtccttgccaagccatcgcagccaggatcatcgccagatatacgcacaaattgatcagccacaaattgccatatcgattcaacctggattttccgcacatatacgagatcgacagctcctttttgtgatcctccagatataaggtcgcaaactggaagatgaacaatccatatacgaccgcatacatgatcatccgtccggctgccgtctgcacagcgttcatcgtgcggaccttggcataattgactccgctcgatatatcattcaatctataatcatatcttgtaacattagataatatcatttctgcgtcagctcggctcggttgtttcaaatataccctgctctccgaaattgccatcgtatcataacggccatacagcacgatgatcgggttgcttacctgatataccggctcccgcagctgcaagttttcatgtgttccggtatccctgacatatacgatatccccatcttccggcgtatatgtctccttatactgcagcgggatcagatatgtcttatcgcccagctcatccgtatccaatacgcttccatcctctgcgatgatcttatgcgctcgcagatacggcttgtttactctgatcaatggcagattatattcatcgatcctgtcttcctcattcaacggcatcccgctcaatgcataagctgccgcatcgctcatcagcgcataatcggtcatgtcaaaataaatggtctgttcataaatttcctgcagttcttcccttctgccttcgaaatagctgatattgtaataaccctcatatttctccgcattcatcgatatatggatatactggctcagattaggtacaagcatgttcatggatgtgacaaacggcatcaggatcagcacgctgatgcagaccttgagcacgatattgatcagatgcatgcgattcaacggctgtgtttctttcaattcgatgacatgtgtcgtcatcacgatatatacatagctcaacaacaacagcggaatgatcaatcctgcgcccactgccgcaaaacgaagcagatcatggttaagttctgcgtaaaacggatccccggaatggatcacgatggcccaggtcagcgccagcgcgaatgcaaataccatccaggcaatggccaatacaggcaaaaactgcttcagcacgatgctcagcgcgctttggccatgcatccggcggatgaggatctcccgtttttctttcatgatgatgcagaacaagatcaacaagatcacaacgacactgcagccgagtgccaacagaatatctccctgccgatataattccagaaaaccttcttcaagaccgccatggacttccatttggatcatcatggctctgtctccaaaatgttgattgacctgatctgcaatcaactgaccatgctctgccgtatcaaaataaaacaatgccgtatcattctcgatgtatcgaaaccagacggccgcattcttaaactggaggacctcatcttcactttggaaataggtattgtcatacgaagagaatgttccggccgcctcttcatcatgaacatcagaggaaagatatcccgtatcatgaacattcgtaaaatccactttcttccctgaggtcatccgcagccgcgcatagatccagtcatcattttccgtcaggatatagtaatcatatttcatgattcccttatcatttggaataaaattctgcgaaacaaactgcacgtcatttgtctccgccacatctacgataaagcgaatgacttcttcctttgcttcccgatcaataaaagtcagatcatacgcataatgtgtatcctcattatctgtcattccattgaacacactgctgattcgataataattgatcaaattatatgaatcataggaaaagctaaatagcaatatcgcgataaatgcgatatacgcatacaacagttttttcatctcctcacctcagatcccatcaatcgtatatcccctgtttgtttctatttttcttgaacgaggcatcgttaaaatgaggagagcaggcttgatttgatactcctctccccacattaacacaaactacacaatatgttcaaatacccgcattcgcactattctttgttgaagcagcttagtgtttaaaagattcagtttgatttttcctcggtctgcacttacttatttaatcattgataaattgctcatttctttatcttcatcatataatgatctattcaaacaagcaagaactttctttaaataaaatatcatgttcatcagtttaaaagttactattcacagcagggaaatgaaagggcgcgggaaaaacacgatgttagaatcagtcttctgattctgcatcgtgtagtttcatttctgcaattgtgatatatctttctcctaacgccctttttatcaattcg

SEQ ID NO: 652 - DNA, 11646 bp, Unknown
  16S sequences of unknown bacteria
agcttcttgaggaccgccgctacaagctcctcgagcgtcatcgaaccctcgccgacagccgccgcgatatcctcgagcatctgccggtcgatattgccgagtcccggctcatcgacatctgtcatagcgagcgccgccgccgcggtcttctgatctatatgcccgttcccgcgcacctgcgcatagtcgcgcacacgcttcagcagtctgttcgagatacgcggagtcccgcgcgagcgcgacgctatctcaatcgaaccgtcaaggtcgatatctatcttaagtatctccgccgaccgcctgacgatgaccccgagctcctcgaccgtataaggctcaaggcgcatcggtatgccgaacctgtcacgcagcggcttcgggagctgacccgccctcgtcgtagcgccgacgagcgtgaacttcttcagcggcagatgcacgctctgcgcgctcggccccttgccgatgattatatcgaccgcaaagtcctccatcgccggataaagtatctcctcgaccgtccgcggcagacgatcaatatcgtcgatgaacagcacatcgttcttctcaaggttagtcaggagcgcaacaatatcccccggattctctatcgcctgcccgctcgtcatacggatattgaccccgagctcatgtgcgatgatattcgcaagcgcggtcttaccgagcccggtagggccgtagagcaaaacgtgatcgagcgattcctcgcgcatcttcgccgcgtctatcgctatcttaagcgtctccttcgccttttcctgaccgataaagtcagacagactctgaggtctcagcagatcctcgttaagcatgaacaccggagacgatatcttgtcattgatattatcatcattatcattatccgactcttcatcatcgaactcttcgtcatcgaactcttcatcataatcaaactcctcgtcccgcaaacctcacacctcccgtcacttcatgagcttcttgagcgccgccgtaataagctcctcaagcgtcatagccgaagcgtcaagccccgcaagcgcctcgaccgcctcgctcttcgtatacccgagcaccaacagcgcgttcaccgcgtcagacgtccgtcctcccgcctccgcgacaaccttagccgccccggcaggcacggcagccccatactccttcgtcaacttctcgcgcagctcaagtattatcctctccgcgcccttagctccaagcccctttgaccgcgaaagcgtcttcccgtccccggaaatcaccgccgctgcgaactgctccggcgtaagcgtcgaaagtatcgaaaccgccaccttaggaccaacccccgaaaccgatataagctgacaaaacgccgtatgctccctctcagtctcaaagccgaacaactccatagcgtcctctctcaccgaaagataagtataaagcttcaccgtctccccgacgtgcgacccgatacgccccgcagtattcccgctcacagtcagcttatatccaaccccgccgcagtcaatgaccgccatattgccggtgacaaatgataatattccgttaagataataatacatataaacctccagtaaggggaacggtcgctttttgaaaaaagctccgcaaaaactttataaacgctgattgtagaacccctgcacgcgggaacccgaacaattcgcgtggcatatagctatagccagtgcgtcgcacgtatcgtcaagcttcggcgtagtctcgagcttcagaaggagtgacaccatgtgcatcacctgcttcttaacggcgcgcccatagccgaccaccgactgcttcacctgcaaaggcgtatactccgccacccgcagcccattctgcttagcgcacagaagtatcaccccgcgcgcctccgccaccggaaccatcgtcgtatggttagtattaaaaaacaactcctcaatcgccatctcagtcggatgatacatctttattatcgagtcaagctcatcataaatcatctcgagccgcgcctcaacgtcagtatgcgccggcgtctgtatcgacccatgcgccagagtcacaaaccgcgaattcttaaactcaatcaccccgtacccgacaatagctatccccgggtcaatcccgagaatgatcactccgccgcccccggcgcgatagccaccatcttccgcgcgatgacctcagccatcctctcgtgccccttcttccccgggtgcagcctgtcgcggacagtattcgcgaacatatccgcgctctcgtcaaagcacgggaacagccccgaaacgctgtgcagatcaataagctccgccgcccagattcccgccgcctccttaacgaccgaaacataatcgtcgatataaagtccgagatgattcgggtaatcctccgggaactgaatattgtcaggcccgaactccgcgaacccgcgatgtatcggcgtcataagaacgatagccgcccgcggataagaatgcctcagctcgctcatcacgatatttatacacccgcggaaagtcgagcggtcaaacgaaaaactcctgcgcgggcgagtctcggaggaaacgacattcccctcggcgtcctttcgcgtgatgacctccgcgtccgagatatcgtaccagttcccgagcggtctcgagccgttgtagtcgttcgttccgccaaagacgaaaatcgcgtgcggcttcacgttatccttcttcatccgatttatctgatcgataagatttatgaactgcgcgccgttgacgccgtatccgaccgactttatgccgatcattccgtccatcaggtcgaaatacctctcgcccgctccgaccccgacgccgtcggttatagagtccccgaggaagcacacagtcttcccctcccactgattcacgttataataatcattcatcgcaaaacacctcagccccggcgcgacgcggcgccggaattttccggaaaaatccgatatacatctattataccacaccctgaacactttttcaagctgatatcgaaagaaaaacactccttctgaaaaatgtttacatagtgcgcggacagaacaaagaaaaggcgcgccgcggcgcgccctcaggtgtgtcgttatccttcgtttatcttccgtacaaccgcctcgatttcagacttttcagaggcgattattgacgatatgtcggtatcgccttcaaggagcttcgcggttatgctcttcatcgtggctttgccgacgttgtagattgtcgccagttcaggcataccggagttcaggattatgtcgagcatttcgatcgactcctcattccggagattcttctgctcaaggacaagcctgcggtaaaccggccagactatatcgcgcgacagataattcagcgcgtccgcgagagcgccggccatctccgggtcaggcgcggtcaccgggattgatatgccgcaggacggccatgatttgcgggaataatatctcgactggctctcgtcatacttcgggttcggcaggacgctgaacgtgaagtccgcctcgcggagctgctgtgtcgtacttatctcgccatacgcgaaaagggacctcgtcttgctgaactgcgtgctgactccgtatctctccttgtagaacatcaccgagccgttatcgctcattatcttcgcgatcttatcgcagacattgtagaaccgctcgcttccgccggtcagtgtcagctttccgtccacaatcccgatgaacggctcgcccgcggacgctatcagaccggtgagcgccgcggcgttcccgggctggtcataattccatctgttctcctcgtccggcgtgtcgggaccgagatttatcgccgcgcccgccttcatgtactccgcgaaaacgtcgagcgtccatttcccgtcgctcaccgtcttgtacggcatcgcgagcgacagctcgcctgcgatgtcctcgttgaacatcatgatattcgtcgcgtcgatgaccatcagctgtgagtacccctcagcgctgtagagctttccgccgggcatacagaggtcgttgttctcatgaagccaccagtccgccccaagcgaaatggctttgttctccgcgagattcgtcagaagtccctcggacgccagagggtacatatcgttcatgttgacatagatgatatcgaacgagttatcaccggacgacagcatcgcgcgtacgttcgcgccgtactcctcatatgtacggtttgtctcctcaacgatgacgcccgttctgtcctcaagggtcgatatacacctgaactgcgtgtcgttgagtacttcgccgttctcggtctccggcgagattttcgcgtgcatatcgaaaacgtcctcatagttgagtacccggaaggtcttcccgtcataattcctcgtgaactcatattccgtctcattttgtgagctgcctgagccgttccttccgctgttcgatccggggtcgttcccgcaggacacgagcatccccgtgaagatgagcagagccagtaccgcggataaaactttttccattgcgttgtctcctttcagataatttttttattcccacttgaattataccataatgtatggtataataatttacagaaacagtaaaatacaaatgattttttggtataatcttattcgacagaatgcgaggcgacatatgataaaatatgaaacgacctatgagaaaaacacccagccgttattctttccgcctgacaggtcaaacggaacgcgcggattttcggatgtcgcggcgcatatacacagacacgtcgaggttcagtacatatacgaaaactcagcgtttttcatggttgacggcattgactccgagtaccgggacggtctgctgttcatttttccgtactgtgttcattcctcaagagccaacagcgactgccggcatatatccttcaatttccagcagcacgcgtttccggagtacgagcggatattttcggacaatataccgctctcgccgttcgttccgtccggacagctcccgcccaccttcgacgccatgatacgctacgcgagggagctgtatttcgcggaggatttcccgctgagggagaagctccttcacagcgtcatctcggtcgtgatcggcgaggcgctgtcgtcgatgacgctcatcccgcgctcatccgggcaggatctcagcacgacacccgccatcgggagagtgataaattactgcatgacgcatctgtcggacgatctctccctggacgccgtggcaaaggcgctctttctcgacaaatactacatctcgaagctcttccccgcaaagctcggggtcaggtatgtcgagtttgtcaggtcgcagaggatttcgaaagcctgcgaaatgctgaaagcgtccgacagggcaatcaccgatatcgcgtatgactgcgggttcaggaatcagtcgacgtttaatcgcgtgttcagggagatgaccgggatgtcgccgagggagtacaggggaacgaaataaaaaaggcgcgcctcgcggcgcgcctctcctgtttcaggtttattcaagataactttccatagacttgtcgataagagtcttcacagcctgttcgttcttgttatagagtgtcgtgaaagtcagcgtcgtgttgtgaacgaggtcataccccgggttcgcgaggttgcctccgaactgcgtgttgttgtagtaaccgaggtcgaagatcgcgccctcacggatgtagtcgagcatatcgaccgagcgctcgtcgcggagatacttgttctggagcgtcacgtcgtagtacgcagggatgatcatcttctgtccgtaatacgccattgtctcaagaaccgcgccggtgcgcgcctgatcctgattcgtcaccgggattacccacatggtatgaccggcgtcaacgaacgaataatacttgtcaaccgacttttcggacttcggccacggcacgagaccgaactcaatttcggcgtcgcggaagaagctgttcgaaaggtgagatatgttgaggtcaacaaatcccatccgtccgtcgcagaacgccttctgatggtcatccccgccgagctggttccaaccgcactcggaaagcagcagcttcatgaatttgtcgtaaatattgacgacatcctccttgtagagcgtcagctccgggtagccgtcgttattgacggttatgatgcgctcgccggtgcagtaaagcgcctcaatcgaaccgagccaatggtttgaaccgtaaccgaacaggtcgtcagaaatgttcatctcgccgtcgccgttcagatcctgagaaaagttcttcgcgtaatcggcgaatacatcgaaagtccagtcgccggaatcgacgagatcatacggatacgcaagctgataatcgtcgagaagccccttattgaagaccataccgaccgacgcgccaagcgtcgcgtatgttatgtctccgaccatcgcgtacagcttgtggtttatagcgaggttttcggcggcgtcctgactccaccagctctttgtcaggtcgaggttgtcaacatcataccagttcatgaccgcgttgctcttcgcgtaaacaaacgcggcgcgcgcggcggtcgcgacagcgtcatacgcgtcttctccggcgagaattgagttgagcgcgtcggtctcccagctggacgagctctgcgctacctcgaattttatgccgagtttgtcctcaacagcgatattgcgcttatagaccgaatccgcgaggacgtcgccggtctgctcctcgacatacacctgctcaatgtcaggcgacggtctcgacagaatgcggaaaacgtacccattatagttcaggtcggacgggagatcgagcttttcctcgggttcggtctcctctggcgcggaagtgtctgtagttccgtcggacgacgttgtgtcattcgttccggagtcgcttccgcacgctgcggcggacgtcagaaaagcggcgagaagaagcagggaaattacttttttcatttggttctctcctttttttgtttgagataattataccattccgccggggcaaaatctaccgaaatactacgcataatgacataaattacagaaaatttacgcgtactcgttttccgcgtcacagttgtgtgatataatatctccgaaaaggaagtgagaccatgcgaagcccggaacaggcggtatttcagaagataaaagaagacttctatatcgacaacatgaggcttgaccacggcacgtcgatgccgtattttcactatcacgacgcgtatgagctgttctgcctgaaagagggaagaaaaatctacgtcatcgacgacgaagacctcgatatgtcgggcggcgacctcctgatcatccgcccgggagagaagcaccgctctgtctcgccggataacaaaccgcagtaccggctgataatgcacttcagggagagctcgttttcgcgcttcggcgacgtcatcgggaaggttctcgcgccggaaaagctcccgcgccttctccggataccgacgtttgacgccggagatataagcgacccggtgcggcacgcggaaattgagtgtcttatgttcgacctcgtctgccgtatccgtgacattgccgcgagggacagcagaaaaaagaccgccggaagccgcgcggtagagagcgcaaaaagaatcattgacagcaatcacagcacggacatctcgctcggaagcgtcgccgagacggtctatgtctcaccgaaccatctctcggcgctctttcacagatacaccggcatgaccttcagccaatacctgagcgacgcgcggatacgccacgcggtgcgcctgctcaagagtactgagctgtcagtctcggagatatcagcgaaatgcggcttcacaaacccgaactacatgggcgacgttttcagaagcgcggtcggggtatcgccgacagtatacaggaagctctcacgatcaggagacgacatcaagttccgcaagccggataaattcccgccggattttcagggatacaacaaaaaatgagccgccgccccgaaaggagcgtacggctcatttctcatattcttatcttccgcgacagtatccccgctctgaccccttcgatatcggtctccggcacaacatcatacatccagctcgtctgcgccccgtcaatcgttatctcgtcgtcatcaatcgtgataaccgcgcagagcggcttgtcgaaaaaccacgtgttcttcgcctgagaaagcgagcagaggtcgcgcgggctcttcccggtcagcgtcccgttccggtcgtaatcctcataaacgaaggtctgcccggggacatagtgctgttcctccatcggcatccagaagccgttcttcacggtgttgcagtcgaaatagccgattccgtcttcggtgaagaggttgtcggtgtggtaatgcccgtttatcgcgagaatgacggtctttctcttctcgttgacccgccggaagatctcccgtaccttgtccgcgtccgggctcggagaattcttcccggaaaactccgcgtgactgacgacaacacagcgcagaccattttccgaagcgtcggtcagaaccctgtcaagccaggaaagctgcgccggaccgagcgaattctcatactccgcccccttcggcgctccccagctcgccgggcggttatgcacccattccccgtcgagaagcgaataattcgtgtcggtgaacacaaacctgtacccgtcaacatcgacgtgataatacccgatatcagccgaaaactccccgtccggagttccgtacacaaccgggcggttcgcaagccgcggcgtcacgatctccattgtatttcccgcgccctcaagctcatggttgccgtaagccccgaagaccggaatgtcataccggttccgcagaagcgcgtcaataagctccggcgaaccgagataatcattgcagagatcccccgcgtgaattatcatatccgcacccgacgaccgcgcccgctcaattatcggcgtcaggtcatgcccgacagtcggcgcgtacattccctttttatagtgaaaatccgcgaaaacaacaaacctcatcatcttttcctcatagccgcgagacggcaggcgcgtatatacacctcggtcacgtactgctcgatgtccattttgtcatacttatcgttctcatgccgtccgggcttgctcttcgtgttcagctcaaacgtcatcgtaccgtcaaagcccgcgcggtcgagtctctccgcgattcccttccagtcggcgatcccatcgaacggaagcagatgcagatcgtcaatccaggtgatctttccctcaaagtcccgtatcccgagattatcgttcagatgcgtagcgaacagcttcccgttctgtccgaacctgccgaccacgtcctgagaccagttatagcacatctcatgcccggtgtcccaacagaacccgacgcactcccggtcggaaaacgcctcaaacaacctcgaaagatactcaatcccctcagtattctcaagcgccaatttaaccccgagccgctccgcctcatcgacaacccgcccgaaattccgcacgccaatctcattcggcgaatgctcctcaaacccgataaacgcgtgcgccaccatcaccggcacatgatactccgcgcagtcccgcaggcactcacaaagctccgccaccgtatcctcagtgtccggagcctccttccacatcctgtccatacgtccgaaaggcgcgtgaatcgactgaaactccatcccgcaccgatccccggcagcccgcagcgcgccaatatcgcacccacgcgaccaaccagaaaagaacgcgtcaaacccgacgcgcgaaaacaactctatctgcgacacctcatcgatgccgaactgggaactcagtcccagacataatttctgattccacataatcgtcagctaagcggggagaactttttcggagaaaaagttccccccgcccccccttcaaaaagctttatacactattaactatttattacgtcagcgtatgcgttattgaccttctcgagatccgctgtcgccttcttctccgccttcgaatacatcgacgcgaagtccttcttattgaatctgaacatatccatcagcttctcgttatagccgccgatctgataggtcgcgcctatgtcatagagcctcgtcgaaagaatgatatcgagcatatccgaggactcctcgtcacgtatcatcttgccctcaagctgaacgtcataatacgccggagtcaccgtatacatcgactcacaagccatatcctgaaggataatgccggtcatctcaacatcttcaaccacggacggaacgcaaacgaacgagttaccgtaagcgtgaaccgtagtataatactcctcctgagccgaatcatagagcgggaacggcagaattccgaagtcagtattcatattcctgtacttcttgacgacattaagatacctgttatagaacagcacctgatcattcgcgaacatattctcgatatggtcgcccgaatgatataacgagaacgccaccgacctgtcagtgataagatccatgaacttcgaaagcatatcgatattccgctcattattcaacgtcagctcaatctgtcccgcgtcatcaatacggcagatagccccgccgcacgcgtttatcgacgccagcacgccgtcctgccagacacacattccgtaaaggtcattctcggtcatcttagtgtcaccgtcaaggtcaaccgaaacctttctcgccatagagacaaaattgtccatcgtccaggtcttgttcttgaccatctcatacggatcttccatattgtaatcgtcaatcagcttcttgttgaacagaatgcagtatgtacagtcattgtcaagcgttgagatatcgccggtcgtgaagtacatcttccccttcatcgaaaggtcctcgttagccttctggtcccaccactctttagtcagatcgagccccggaacctgagagttcaggtcgagcagataaccctgacacgcgaggttgctcacgtcatacgtgccgatcatcgccgcgtcatacgtagtgtcgcccgacatgacgcccttcgatatcgtctgcgcgccctgaccattgccgccgctcgcctctccgcggatgtttatctcgttgatcttgacgttgtacctgtcctcgatgattgtgttcctgcggtagacagcgtcgttcacgacgtcgccggtctcaccctccgagaagaaatcataggattccgtccactcgttgtcccagttgcctgagacgaaaatgtcgaacgactttccgccgtaatccttcccggcgaccgccgcggacgccctcgttgactcctcgaccgtcgtgtccgacgtgtcaccggcacccgatgtggtctcccctccggacggcgccgcgctgccgcaggaaacgctcccgatcgtcagcgccgcgagcagcagcgacagtactcttcttttctctgacatagttctttcctccgaaattttttgtttctgatacaagtaacttgttcttgtgtatcaattataaactatttctgtaaatttgtcaataccttttttgaaaaatgcgaataaaataccatgtgaaaccaatattttataacatttccacacgcgtgtggaaatcaaataccatcagcgcctcaattattggaactcggttccggaattctgcgcgacttct

SEQ ID NO: 653 - DNA, 16981 bp, Unknown
  16S sequences of unknown bacteria
taagcgtgcgtaaattaaggcacacatcagccgtaagggaaatattgcctgcagataatgaagccgtaaggtttatttcatagttttcgtctattatatccgcaagggagaggatgtttttaaagtcggcaagttcatcatcgggaattgcggaaatatcgtctatggaagccggcactgcgtcaatcgagtaatcaccgtaagaaagcgacaaggaggataaattgtatccgttttctcctgcggcaaggtttattcccacgcttgcgcctttcacggcggtggctattttaactcccgcgtcggtttttgtaatgttaagactgtcaacaagttcctttataagggagtttacgtcaagcccgctcattgaggatgcgatatccgaaaggaaaccgaatttgtaagtgccgtcctcgttgacgaaaagaggttcgaattttttaatcagttcgggcaaatctttaacgtgggcttttgctttaaggtcgccgtattctaaatacaatacgtcgtcgctgaattttacgaggaggtcgccgtaagccgcgtcaagcgtcatggttttcaggttaaatgtcaaaaccgcgtccgagtcgcctaaacgggttttcagacagatattgtaattttcgtctatgatgtcaaaaagcggagcaatgcttatgaaatcttcgttgatttccggcaaggatacctcgtctacgggttttacaaacacctcaagtccgttcacgcaagcgtaaattccgttaaaggaaggcgtttctccgtcggaaaattctatttctatatctgcgtcaagacttcctaactcgatgggcaaagtaaccagtgcaatgccgttttcgcgtttaagcgttgcgtttgtaagtaaagaatccggattaaaagacagcaggtcggatatgctgacggagtcttctgatatgaccggcataatcttatcgataaaaccgataagctcttctacggttgttttaaatttaaactcgcccaaacccgcgtaaaccgaacccgcaccgtagcccacgaaaaggtcgttaagctttatatcgccgacagcaagttcgtcaagcaaaacgcgtgcgcggatgtttgcaaggtcgttggcgtctatatttacgcttgccgagcctacggcatttaccgcgcctttgatttcaagcgaaaggtttaaaggcgttcccgtcatgtattcgttaaaaccgtttgtaagataatacatggcgtcgggagtgaattcgccgtcgtcctcggtgatttccgcgtcgagataagggcggaaaatatccgcgtcgggaatttcttttccttcgcctattgcggaaaagacttccgtcaaggattctttacacgtaacgccgcccagcatatcgactttgtagacgcaggatgtttcggttttctgtacgcgccagttgccgtccatatagacggtaagggcaacctcttcaaaattgggtaaggttttggtgctcgccatggtgcgcatttcaagtcttatttttgtggtggccagcgcgttgtccaatatgtaacgaaatgcgtatattccgttttcttcacccaggaattcagaggaaagaatggtgttttcggtcagtacgtatgcggttattccgttgggaacaccgccgaacttggatataaaagtttcttctgtcacgcggtaagggtctgcgccccacgttacttcgtccacggatttaagggaagttgcgtcgcgcagtacgtaatttttcccgctgacaaacatttccacacccacggatttaaaagtggagtgggaaagcgagcgtttaaatacctcgtcaccgtttacgtatcttacggcttttacgttttgttccacacctaaagaaacggtctgtccgctggattcgctcacaaagctgcccgcttcgagaaggtcgtaaagcgcgtaagcaaagttatcggcggggctgtggtctgcgggggtggagccgtcgctcggtttttgtttgacggtgctttgctgttcgtttattccgttaagatttatgtcgtcggtaaaatcgtttttatggcagcccagaaaataaaaggtggctattatggcaagacacagtaatatcgaaaaaataatgatttttttcttgctcattattttggttttactcactttgattctcctttttataagcccttttacgggcaggcggcgaagtgcggtttttatgcccctttgtatttaccgatttgttatttttgtttagtcaaagcagacgcgttttaacagtttcggtaaaaggttttcccgcaaaaccgaattgttacggtcaaacggaggggcgcaacgttcgccttcttcaatatttcttcctttatgaatttttaattttcgttatgctgaccgcttttcgcggaatcggacattttttttctgtaatccagcggagtcatgttttcgacttttttgaaaaccctgcaaaagtaggcaaggttcagatacccgcaggctttggcgatgtcgtttattgatttatcggtgctgacaagcagtttcttggcaagcgaaatgcgtttgttaataagatatttaagcggtggaatgcccagggtgtctttgaataaatgcgtaaggtaaaatttattgatgtaaagacttctgcaaacgttgtcgatggtgtcgatggtggtgaagttattgtccagaaactcttttacgtccacataggtttttttgttttcgaatattgtttccgcgcagtcggaagtaagtcttaatatataagtgactattataatcagcaagctttcgctgattattccgaagtagggggatttaagctctttttcaagcaaaagctgttcaaagtattggcaaatctggtcgtaaaagactcccgtacccgtaattttgacggaggagtctttcaaaagacaatcctcggggaaaccgttgacctttatgcgcgaaacgcccagaaatatcgtttgacgcggctctttgtcgtcgatgaattcggagtggtttacccccgggttacaaactataaggtcgcctttagatacgggatattccttgtcgtccgctttaaagcgtccgcttccttctttcaaaaacataatttcgcaaaaatcgtgcgagtgaagcgcactcatccaaccgggacgaggcttataagagcctatgtacaagagtttgggcttttttaagaataagtttttattgtcagatgacgcaaatcccatagaaaaatacgactttatataaaaagccgtggttactgagctttgtatttaagaattttaaggtcggttatttttttgaaattgtcgttgttgcgcgttaaaaattcctccgccaaagctttatatgcaagcgaacccacgcacttaggctcaaacaacatgacgggcagcccgtaggagggcgcttcgccaagtcttatgttcctggggattttggcgtcgaaaacctttttgccgaagaatttataaatttcttccgttacgttctgcacaagtctggagcggctgtcgtacatggtaagcacaacgccctcgacttccagctggggattgaggattttctttgcaagacgaatggtgttcatcagctggcttaatccttccagcgcgtaatactctccctgaatgggtatgagtatggaatttgcagccgtcagcgcgtttaccgtaagcaacgcaagcgacggaggacagtcgataagtatgtagtcgtaactgttccttagcggcgaaagtacttttttaagcaccttttcgcggtcttcgacacccacaagctctacctcggcgcccgcaaggtcgatgttggagggcataatgtccaggtttttgaccagtgtggggataatggcggacctggcgtccgtttcgcccgaaagaacgctgtatgtagaatattttactttggttttatccaccccgaagccgctgctgcagttgccctgggggtcgatatccaccgcaagaacttttttacccataagtgccagataactggcgagattgacgcaagtcgtggttttgcccacgccgcctttctgattggctatcgcaatgattttatgcataatacctcaccgctgtaaagattaccggaatgaaagcgttttcgttttacgatttaaactttttaccattttaacacaattttacttattaagcaattgtttttaacttaggtatattatattatttttaaaatattattaaaaaaccgtttgtatgcgcgctaattgacttgcgaaaatttgtccgcgccgctataatattaagcatgagtattgtagaattccgcgacgtatattatacttacaaccgcggtgacgcttccgagcagcgcgcggtaaacggcatcagcttttccgtggaggaaggcgaatttgtcgcggttgtcgggcacaacggctcgggtaaatccacgattgcaaagcttatgaacggacttctggagcccgattcggggacagttaccgtatcggggctggataccaaaagcaataaagaccttttcgatatcagaaagacggtgggagtcgtttttcagaatccggacaatcagatggtagcaacgataatcgaggacgacgtcgctttcggtccggaaaacataggacttccttccgaagaaatccgcagccgtgtggattgggcgcttaaaagcgtgggaatgtacgaataccgcgagggtacgcctttcagactgagcggcggacagaagcagcgcgtcgccattgcgggcatacttgcgataaagccccgcgtcatagtgctggacgaatccacatccatgctggaccccgaaggcagagccgaggtgcttaaaaccatcgaaaaactaaaccgcgaggaaaaaatggcggttgtgatgataactcattttatggaggaggccttgcttgccgaccgtatcgtcgtcatgaacgagggtaagatttacatgcagggcggtaaggaaattttccgacgcgaggaggagcttaagtccatagggcttacggttccgcttgccgtgcgcgtcgctcacgcgcttcagaaggcgggtgttccgctttccgacaatataattaccgacaacgatttgattgaagaattgtgccgttgactggagaaacatgccgataagaatcgaacatctcaattatgtttacaacgaaaaaacttcctttgcaaccgccgcgttaaaggacataagccttgaaatacgcgaaggcgattttttgggcgtaatcggacatacgggcagcgggaaatccacgcttatcagccatctcaacgctttgacgcgtattcagtcgggcgttattttcgttgacgacattgacttaagacccaaaaaacttgattttaaaaaactcagaagcaaagtgggcatggtctttcagtaccccgagtatcagctttttgccgaaacggtttataaagacgtcgcattcggccccgagaacattaaacttcccgaggaggaaatcgccgtgcgcgtaaaggaggctatcggtcttgtggggcttgatttcgacgccgttaaagaccgctcgcctttcgaactcagcggcggacaaatgcgcagagtggcgcttgcgggcgtaatagccatgaatcccgaataccttgtgctggacgagcctaccgcagggctggacccgaggggcaaaaccgagattatgcagcttgtgaaaagtattgcaaggacctgcaaaagcgtaattatgatttcgcacaacatggacgaggtggcggcttactgcaaccgcatcgccgtactgtcgcagggtaaactttacggagtttacgagccgcgtgaacttttccgttcccgcgaaatgctgaaatcgcttaaaatagacgtgcccgcagtcacctcgcttgccgcgggactttacgagcgcggtttcaacgtcgaccctagcattatcgacgaaaaagagcttacagacgcggtttgcgcggagtatttcgggagaaaacagaaatgagagaaattactttaggacaatactatcccgtaaaatccgtgctgcacagaatggaccccaggatgaaactcatcattatgattatgtatatcgtgatgatatttttcatcaaaactttcgtcggcttcggtatcgtattagtctttcttgcgcttacgatagcgctgtcgcacgttccgcttttaaaggtactgaaaagccttaaggtcataataatactagtcatttttaccgtcataatgtccgtgcttttttacaacggcaaagcggaagacttgctttggagcgcgggcatactcaagatttacaaggaaggactgttaaacgcgggacgcatggcgctgaggctggtgtttctggtgcttggacccactatgcttactttcaccaccacgcccgtggaacttaccgacggactggaaagtcttttaaaacccttaagctatattaaatttcccgtgcacgagcttgcaataatcatgagcatcgcccttcgtcttattcccacgcttgtggaggaaacggataaaattcagtccgcgcaaaaagcgcgttgcgccgactttgaaagcggcaacgtctttaagcgcgcaaaggcgatgatacccgtgcttattccgcttttcgtgtcttccttccgccgcgccgacgaccttgccgacgcaatggattcaagatgttaccgcggggcaaagggaaggaccagaatgaaaaaactgaaagtccatttccgcgatttcgccgcgcttttcgtgatgtgcgtattcttctttgccgtgctttggttaagatacaatttctttcccgcgcttatcgatttatccgccgttccctggataatttaaggaggcggaactatgcgcaggataaggttaacgcttgattatatcggtacggcgtacagcggctggcagcgtcagcccgaccgagataccgttcagaaaagagtggaagacgcgcttttttcgctgacgggggagcggacttcggtagttgcaagcggacgcacggacgcgggcgtccatgctttgggacaggttgcgcatttcgacaccgattccgatatacccgtaaaaaattttatgacggggcttaatcactttcttccgccagatataaggattctgaaagcggaaaacgtaaaaaacgactttcacgcgcgtttttccgcgcacgaaaagacatattgttactgtatttacgaatgtccgtttgaccgcgcggcttatttaaaccgtgccgcaagggtaagcgaaaaactggacgtaaaagccatgcggatggcgtctatggcgtttttgggagaacacgacttcacttcgttcatgagtacgggcgcggataccgtaagcgcagtaagaaacgtcaaagacgtgcgcgtggtaagaagcggcggtcttgtcagaattttcgttaccgcaaacggttttctgtacaacatggtaagacttattgcgggggtgcttgtgcgcgcgggacagggcaaaatcgataaagcgggcgtggaaaaacttatcgcgcttaaaaacaaacacgccgtaagagaagtaatgccggcggaaggactttatctggtctcggtaaaatattgaaattaacggttatagcgggtgacgctttgtttaaggggcgatgcctgtgcaaataaaaattcgggaggtatgaaaaatgaaacttcattattggggtacgggagcggcggaaggtattcccagcacattctgtaattgcaaggtgtgtcaggaggcgcgcgagaaaggcggcaggtacgttcgcggccgttctcaggtgatgattgacgacgagcttttggtggacttcggcgccgatacttaccaaagttcgcttaaggcagggtacaatttgtcacagcttggcgacgtgcttatcacgcatacccacgaggaccattattatccgcaagaacttcacaaccgtcagaaaggtttttgttacgaccttaaatatccggctcttactttgcacggttcgtcttcgattgtcgaaaaatattacgattacatggcgggaaacggacaataccttatcgatcagggcagggttgctttgtcggtcatgaagccttacgaaaaatataaaatcgggaacttcgaggttattcctctgccggcgacgcacggtacggtaagcccgtttgtctacgtgatatccaaaaacggcaagacgattttttatctcaacgacagcggcgtattaaagcagcccgttgtagattggctggcgaaaagcggtataaagtttgaccttgtcagttacgattgcaccatgggaatgctggatacatataacgattggggtgaaaacgcttcccacatgggacttcccagcgtgattatgatgagggaaaaatttaaagccgcgggcgtgtataaggacgacaccgtggatatagtaacccatttttcgcacaacggtcctaaagtaggttacggcgactttaaaccgcttgccgaagatgcgggctttatccttgcttacgacgggtttaaaattgaagtttaagaagtgattaaacgctcttgcagcagttgccgcaagagcgttttttttgtataggttttatttgtaaaaaacaaactgcctgcaagcgtatctattttaaattctcgagagcatagcttataattatacaaacttttaatgtcgcgcgttgacaaaattcgattttatggtatactattaacagaccttatttaagatatttaaaattttatttgtaggtatgggagtatgaaaagaaaaataatcggaataatgacggcattaatgtgccttactcttttcgcgtgctttgcgtgcagtccgcccaaagaaaacgaacaaaccgaaacggacacctgctatgtcaccattgaggaaaccgatggaggcaatattgacgtgggcggtaaatatatcctcacaaagggagattctcttaccgtcaagcttgtacccgaaagcgggtataaagcggaaaaggcggtttataaagattccgcaggcaatcatgaaatcaatgcttctcagttaacggacaacactttcacgatacataatatagtttcggacattgccttgtccgcagtgttcgtcaaagatgagccgcccgtcgaaacggaaattttcagtatcgatactgtggtgcttcccgacagggcgggaaacatcaacggcagcgtttcagtcgataaaaacagtgttgaaagcggacaaacggttgtccttactttaaatccggacatcgattaccgcgtcggctccgttaaagtcagcaagcccgacggcagtgacttttacaatctggacgtaagcgaagtcacgttaggaggcgaccttacggttacggtaaacggggatatcctcatatccgtgacttttaccgcggtttctttttacgacgtttcgttaagcgtttcgggcgagggcacggttacgccttccgcttcacaggtgcttccgggaggcagcctcgatattgccgtcgccgcggccgaacattacgaacttacttcttttctcgtcaacggcgaggaaaaaatcgatgaattcacatccggcacgcttgctttaagggacattcattacgacgtaaaaatagaatgtgttttttctttggaaaaacacaaggttaccgttctgccggctgaaaacggcaccgcttacgccgagtccgagtatgtggattacggtggtgaagtcaaaatttactttacgcccgataaaggctatgttccgtacagtctgacttacggggataaaaccgtatcgatagaccttacgggattcgtgagtataaccgtaacccaagataccaccgtttcgctggttttcagacccgaaaaatcagaaattacgcttttcggcagcgttacgacttacggcgaaaatatgcccgtttcgaagcttaaccttaaaatatccgacataagtacgggcgaaaccgccgccgtggtgactacggatgcacagggagaatactctgtacagcttccccaaggcatttacgacgttactgcccaaacgcaaggttattacgattgcaacgtgcgcgtcgttcttaactatgacgacgtggaaaaaaatatagttgttcaacgtccgtccttcggatttgacggcggggctttaaacggactcttcgacgacggcgaaaagattgtcgtgtcgggagctgcggacggatacgttgtaaaaaacaatttcgtaagtccttatgcggtcgcggaaggtaagcttagcgtttcgtccgattcggcagacggcgcaggtttttatgcgtcaaacgggaaagtaaacgccgccgtgatttacggctatgacggggtttgcgtttacagaaacggagtgctgattgaaaaaatcgacgtaacaggactcgattccgacggcgggttcaagattatcaaatacgacgattgtatttgcgtttattatccgtcaggtcagagcggcgctttatcgcgttacgacgtgcgcgtcgagggacttgagggcgattgcgagtacgggctggcggtaaaatcttcgtcagcggatttcgccgcggaattttccgccgtcaacatatacgcggattacgcgtatatagaaagtatgctgtttaccaaagtttcggttacgcgaaacgcattcggcacggtgcagttggaaggcttcggatcggaaaaagtaagcactcttaaggatttgactatactggcgcatccgcttgacgggtacgtgttggattacgtcacgcttaacggcaatccgcttgagcctgatggggaagcgggcggagaatatattttcgtatttaaaccggacgacggattttccgtaaacgaaatcgaaattcacttcgttgccgacactcagcaaaacgaaaacaacttgggtaccgttaccgacgggctgggtgcaggcacaagttacgacacttcgcttttttaccgcaacgaccttgaaatcgacggcgcagaccccggggtcatttacgtgtctacggaagaggatgcagtttacggcggctggttttacatggcggttacgggagggggtggctcttccgcgtatcctctttaccgctcgcgcgatttgtccgcgtgggagcgttgcggcggggccggtgacggaaatgcgcttgaaatcacttcttcagcctggtcggacggctactattgggcgccggaactcatacgcgaccccgaaagcggcaagtatttcatttatttttcggcgtgttccaaaataggaaattcaggtacggattatattgcttcaaccgccaactcgtatgacaggctgtatctcggtattggcatatccgacacccccgttggtccgtacagaatggttacggcggaaagatattacggcgcgggagttacttccaatctcaacggagaaacgcttaacgagtctactccgcccataaatttcggaaagcattttgccgatcagcttgccgggcagggaagcaaattcgtggattccgttacgggtatgggtatatggccggcaatcgacataagtcctttctttaccgaaagcggcgacttttacatttatttttctcagcacgtaagctccgccaacagcggtaaccatatatgggcattgaagatgaaagacatggttactcccgactggaacacgttgactaaaatagcttcgcccaattatcaccgttataccggtaaaacgggcagtattcttgaaaaagactggacgggcgtcaggatagacaacgacgcgggcggctctttcgacggcgacattaacgaaggcactttcgtgattgagcacgacggaatgttctatcttacttactcgccgttcggatacggcagcaggcgctattccataatgcaggcggtaggcgatactcctatgggtccgtttaccaaacttcccaggtccaacggcaatcccgttataggaataggttttgaaagcagtatgtacgactttatggccggggcgggacatcacagtttcgtaaaggcaggcgacgaaattttcgcggtttaccatgccttttacaatcctttggacaacaatgaaaacggctcgtttatgggcagagcaattgcgattgaccgcgtacagttcgtagacagtccgtattacgatttcgatattctgcaaggcaacggcccgacttattcgctgcaaccgcttcccgaggtcgcttcgggttacggaaatatcgcttccgaggcaagcgtaagcgcaacctccgttacgtcgggaacgcttaagtatctcaccgattaccgctttgtttatcagccttacgacaagaacatggagttcgaggcgactggcgacagcgtaatcaccatggaattcgctcagcccagacagatacgcgtagtcatggtttactcaagctatacgtatgactatgcgcttgaaagggtggataaaatcactcttaccatggcggacgggtcgcagcaggttttaagcgggcttacggcggacgaaaacagcgttaaccgctctaaatgcgtaatgcggccgggcggctccgtaatcgcggactttttacccgtaaacgtcaaaaagatagaaatttcggtaaaacaggacgataaatacaatccttccgtcgataaaatcaggataggcgacattgtggtgctgggaaaaacgggcgaaacaagctccgattctcccgcatataaaaacgcaaacggcagtcagccggacggctaccttctcattgacggcgttacttccgagccggaagttataggcaaaaacaaatacagctatcttgccgacgacgttaaaattgaggcttccaccgtgtttacggaaaacggagtgtatttctttgcgcgcgcctatgacgacaaaataagctggacggctaaaaacaagtttaccaaaaatactcacttcagattatatttcgaggataaaaacggcggatacaagcagatttacatcgacgcttacaatcataagctttttaacaacaaaattacttcgggcgcaagcgtcacgggcaaaataaactctaaaaaaaccgtaagctttaccgcggaggcttttgtttcctggcaggagctcggttattcgtcagcgattacgagagtaagaattctgcctgcatattaccgcgtcgaaaacgcgggcgaaggcgtttcgggcaaattgattcttcctccgtccgtcgcttccgtaagcgcggtttcgtcttatcccgcatttaccgcaaacggatatcagtctatgggcgcgggcgaaattttcggcgacagcttgtgcggcgatttcatgacggaaggcgtcacggtcaagggaacgggagtggaaacggatgcaaacggaaggcgcgaagttttttatacgcccggttattcggataatttcgtgtttgaaatttcggctgcggcttctcagggcgcgacaggcggatttgttttatcgtttgccgacggtacgcgcatggacgtcccgtttacttctttcagcggttcaaaagttttctctctttataaagcaggaagtcttatcatgcttgtttcggacggcgatattcagtacgccgtttccgaacaggacaaatttaatcaggattattcgggcgcgtgcgcaatcggactgtattcggatggctccgcaatacgttttgccgacgcagaatacaaagtttataaaaacgctcaggacgtaacgaaagaaagtcccgcgggaacttcgggtaattatttgcctgccgtttccgttacgggcaaaggttacgtttgtattccttcgcccattcctcaggacggtaatacggcgacgatttatctttatccgaaagtcggctacgttttcgattcgcttaaggttaacggcgttaccgtgcaagtaaccgacccgtcgtcgggctatcccgtcgcggtaagaaacacggcgtcgcttatacaggcgtctttcagaaaaatcgaaaactctttcgtgctttcgggtaatgtgctttcttcgcccgacggcgctccttgcggcggcgcgatgcttactttccgcgaaaaaggaacttacaacgtttacaggcttaagaccgacgacgaaggcttctattcgatagttttgtcccaaaccgccgaatatgaggtttccgtcgaaaaagaaggttatcccgttgccgaatacgattacgctaaaggagaaaaggagcctgaattttcgcttaagcactatgcgataggcgaaagcgtcgatttaaacggccaggtaatatattccgatttaagcgtgtgggatacaagccgccgcgacgaaaacatatataccgcaagccagaacaggacggcatattttaccgaaggcgtgggaaataacgcagtaataaagttcaaagtgacaaacaagacggatgtgggcgattacaccacggatggcgaacttaccgccgcgggcatcgagtacgaccctgccatcggcattatcgtcaacaacggcacaaactcttcgtttatagggttctggtcaagcggttaccgcgtgcttatcgacaattccgcttgggcgcccaaaaacgaaaataaccttacggacgaatacgacaaccgtacttttgccgcgctcaacaggacgtattcttatatgctcatacgtcaggacaacaattacagattgtattattattccgagaaaagcggcgattacgtcaagatttatgacagtaaggaaaagggacacgatttttctttgaccgagggcgaggcggctttcggattcggatttacatcaagtaagactttcagcatcgaattttcagacatggaaatcctgcttgacgaggcggctattcccgttatgcagcagtatacctgaaaattttgctgctttaatgcccaaaaagagtttgtaatttaaaatattttgcatttgttatatttgtttttaccgtattaatgcggacgataacgggtattaatcaaaaaaaaatcgttcaacggttgtttttctcggggcgatatgatatactatgtattaatcggtaaaatcaattcgtgaggaaagattacaatgaaagcatggacgatcacgggcgaacaccaaatagaactggctgaccttggcgcgcaacaggtttcgccgtcatgcgttaaaatcaaaatgctgacttcttccatcgatacgcccgaatgtgctttgttcaataacggcgggcaaaatctgccgctcattgcgggcagaaacggcgtaggcatcgtcaccgaaacgggagaagaagtggtgggggtaaaacgcggggacagggtttacgtccgtcccgtttcttcctgcggagaatgtgcgctttgccgcagcggacacaaaagcgaatgcgagcacagttacacttacggcaaaaccgaaaacggagtgctgcgggattttatggtcgtgccgcaatccgatttgattcttctgccgcccaaggtttctcccgacgagggagtgtttatcgagtccgtcgcgctttgcattgcagccgttgataaacttaagcttgaaaaaggcgagcatatagttatagtgggcgcaagtaacgtgggacttattctcgcgcaggtcgctctttattatcaggctgttcccattctcgtggatatgcgtaaagacaggcttgaacttgccgagcgtttcggaatttattacaccataaatgcagtcgataccgatcccgtcaaaaagattttttctttgacgtgtggcaaaatggcggaaactatggcgtattgtctgtttaccaatatgcccgttcagcgcgcgttcgaatgtcttgcgcgcggaggaagggcggctttcgtgggctttgacgacgcaaaaatcaatcttacgctggactttatgccgctttttcacaaggcgctgtcggtaagttccgttacgggggcggaagacaattacctttccgcagtcaatatgctggccagcaaagcagtggacgtattgccccttatttccaaacgcataaagtttgaagaggcgggcgaatatgtaaaagaagtcgcgtcctgcgttaccaaatacattacgcttctggtggaaatagataaaatctgaataattcgggtttctaaaaatattttagtcaaaaacaggcaaaatcaacgttttgtctgttttttttgttaaaaaacagttgccaaattaagctgtatgatgttataatactttttgcccgaataaaaagggttgtcctttccccgaggaaaacggggactttagaccataaggaggtattaaatcatgaacaagtacgaggttctctacattctcgacgcgaaaatcgacgacgctgccaaagaagctctttgcgacaagttcaaaagcgctgtggaaaacggcggcggcaccgtggaaaacgtcgataagtggggcgtgaaaaagctggcttacgaaatcgacttcaagtcggaaggctactatgtgcttatgaatttcactgctcccagcgaattcccgcaggaactcgagcgtcagatgcgcatcacggacgaagtcatcagatttatcgtagtgaaaaaataacggacggtaaattatgaacaaatgtatttttatcggaaatcttacaagagaccccgaatatcagaccacaggcagcggcgtttcgctttgcagattcagcattgccgttaaccgctcttattccaacgccaacggcgaaagagaaacagactttataaatatcgtcacctggagggggcttgcggataactgcagcaaataccttttcaagggcagtaaggtctgcgttgtaggtcagcttcaaaaccgtacttacgaggataaggacggcaacaagcgttacatgaccgatatcgtcgccgaagacgtggaattcatttcacccaaaagcaccgacggtgcgcctgccgcaggacccgtaaacaggtcttccggtcagaacaaaaaggtcagcgaactggagcccgtcgatacggacgacttgcctttctgaaaaatttttatgaggtaatttaaaatggataagaaaaatatcaacaaaaacgtcgatacggacgataagt

SEQ ID NO: 654 - DNA, 8319 bp, Unknown
  16S sequences of unknown bacteria
gcgcatgatgcaaaagccgacgcggcgatcacgcagcacagcgcgagggagatgattttcttcatttgttattacacctttcgaaatattgcgcgtttttttattttacatgacagattataacacattaccgccatttaatcaagttatttcaaaagaaaaggaagtttatgtgtgaaaaacagagaaaaatgtccgaaaggtcatctctgtttccgattttgtattcattccgcgtttacatatttatcgatttaccgaaagcagttaaacatcattccgtgcgggagatcaccgcagaaagccgatatcaccgcgcggagatacgcgccgtccgcgaaacagaacgaaatccgtctatttacaaaaatcccgcagacttcggtctgcgggatttgcgtattttttgccgcttgaaaatccggcggcaccgcgtgccgtttgcggaccttcgcacattattctttatgtcaaatggtaatgcgcttttcttcccaaggcatatttgcacggaagttcggaacctcaaaggtgcgtcccttattcgttacggaaagctgcgaaagaagtgcaacggaggtccactctgctgccttgtatacgttcagttcgggctgtacgccggtctcgatcgcgtgaatgaagtcagcgacaatgtagtagtctccgccgccgtgtcccgcgccttcgcctgcgccggtcttatatctgtcgggaagcagatcgttgaagtcggaaagcggtctccacttggtgtagccctgcggatcgtcgtcggtaacgactgcaacctttgcaacatcgccgagtccgcggggagcctcgtagcatcccttggtaccctgaatctgataataggtcattgcatgcgggcggggcgaaatggtgtcaactctgatcttgacaagcttgccgctctcgagctggcagagagtctgggtaaggtcatcgttgcgaagtccgtaaggattgtggtttccggggctgaagctcgagatggaaacgatgcggtcatcgtcgaagcactgcattaccggtccgaggctgtgcgtcggatagaacgcgccgcgggtacccatctgccaatatgtacgccagccggttttgccgtgccaattacggagctcggtgcagtcgtgggtgtactcgccctcgccgtagtagatctcaccgaacatacccttcttgaccattgcgcggacaagctgaagttcgggcatatagcagtagttctctgcgtacatatatatcttgccggatttctcgacattctcgataagccaccaaagctcatccatggttactgctgcggtaacctcgcacataacgtgcttgcctgcctgaagcgcaagaattgcctgcggaacatggcactgcatgggcgttgatattacaacggcgtcgatgtcggctttctcaagcatatcctcgtagatgcggtagcactggctttcctcaagtccgatctcgtcctttgctcttttgaggcaatcctcgtcgagatcgcacattgcggtgatctttacctcgtcgggcattgctttcatagctccgacaacagagaagccacgcactcccactattccgactttaatcatattttattctcccttcgccatttacggcggtaagttttcacggtttgaccgtcattatataatgacatgaaaacgcttttttttcaatggatattctgcacaaaaaaatatttttttgttgtgaaaatcgccaaaaacacttttcggaggcaaaaatgcacccaaaatcaacggagatgcatcgctgctgcggttcagttcaccgtttttgagtaccctgacaacttcttttcgcactccgcgcgcagcaatgcgtgctccggcgccgagagagacggatcagcgccgacaagcgcggcggcgctctgcgatgcccgcgcgataagctccggatcggtgcagccgtccgcaagcccgagatccgcttccccgctctgcctgatctccccgtctctgccgagaaaatcgcccggtccgcgaagacggagatcctcctccgcaatatcgaagccgtttgagctcttctccatcaccgcaaggcgctcgcgcgacttttcgttcttcgtgtcggacatgaggatacaccacgattttgcgcttccgcgtccgacacgtccgcgaagctggtgaagctgcgaaagcccgaaccgctccgcgttttcgacgaccataagagtcgccgacggcacattcacaccgacctcgataaccgtcgtcgcaacgagcacgtcagtttctcccgccgagaacgacgccataaccgcgtccttttcggcggctttcattttgccgtgaatgcacgcgacccgaagcccgtcaagctttgcagaaagctccgcggcgcactcggtcgccgacttcaccggcagaccttcgtttatcctctccgtcaggtaaatgtccgccatttcctccgcgctctcggctttcttcgcctgttcctcgatcgcggggcacacgacatacgtctgatgtccttttgccgcctgcttttcgataaaagcgttgagtctgtcacggtatgaggaatccacgcaaaacgtgccgatcttctttcgtccgcgcggcatttcgtctatccgcgaaatgtcgagatcgccgtattttatcaggctgagcgtccgcgggatcggtgttgccgacatgacaagcgtgtggacgttctccgctttctcctcgagcgcggcgcgctgcataacaccgaagcggtgctgctcgtccgtaatgacaagcccgaggtcatcgaatttcacgctttcggtgagcagcgcgtgcgtgccgattatgaaatcgatgcgctcgccgtccgcgccttcgagcatgcgccgcgttttatccttctgcgcctttgtcatcgatccgcacaaaagcgaaacggtgaagccgagcttttcgaaaaggggctttgcctccgcgtaatgctgctttgcaaggatctccgtcggagccattagcgccgcctgcgcgccgcttttcaccgcgatatatgccgcggcaaaggcacacacggtctttccgcttcccacgtcgccgcaaagtatccgcttcatcggaacgcaccgtgcaagatcggacgcgatctctccgacggagcgcttctgcgcgtcggtcatctcatacggaagaagatccgtgaacggcgaaagatcggagctttcaagcgcccgagccccagatacggtgcgctgcgccttcttcatgcagagtgatgccgaaaggacaaagagctgctcgaacatcagccgacggcgcgcgcgttcaagcgcgtcggtattctcgggaaaatggatattccgcatggcaaacgaatatgtgcagagcccgttttcgagcagcaccgaggcaggcagtatatcgctttccgtgatgaccgccccgagcgccgttctcaccctctcggagataaacttctgcgaaagccccgcgctgagcgggtacaccggcacaataggggcaagctcctctcctgtggagtcaacgcacggctcgtacacgggcgaggtcatcgatacaccgtgcgaggtgtcaagttttccccagaatctgaaccggcgctccgggcggaatgtatccttcaaaaacggttgattgaaaaacgtgaccgaaaccgtacccgtgccgtcggacgcgcggaatctaagatagcttttgcccctgccgtatgcccggtgctcctcgggcacggataccacctgaagcacaagcgatacgggaccttcgacgctcctcgcctcggcgacgcttctcacatgccctcggtactgatatgcacgcggataatggcagagcagtccgcggatattctcgacgccgagctttttgaaggcttttgccctcgcttctcctacgccggggagagcggttatcggtgaatcggaagttatcatcttcagtctccggctttcggcatacgaaagcttcccttcatttaatatataacggtatccccggaaaatgcatcctcatttcagcccgtcatcgggagcggctgcgtttccgtgctcgggagaatcggaaatcggcagttcaaaccagaaagtcgagccgcatccaagcttgctcgtcactccgtaatgcgcgccgtagccgtcgagtattcccttgacgatcgacagcccgagaccgctgccgacctcgccgcggcggtggtattcgctcgccttgtagtatctttcccaaataagcggaagcttttcctcggggattccctctccggtgtcggtcacgcttatgcgcaccgcgtcgccgcgtatctcctgagtaacggtgacgcgcttgtcgtccccggtatagttcaccgcattattcacaagattataaagcacctgaagcacccgcgtgcggtcggcgaatacatacacctccgacgaatgtacaaagcgtatgtcgtatccgtccttttcgttcaggtgggcatatcgctccatcgcgctgccgcaaagctcggtaaggctgaagcgttcgtttctcagcgcaagagttcccgaggttatgcgcgaaagatcgagcacatcgttcacaagggatgtgagccgtctcgtctcgtctatgacgatctgcatattctccggggtcatctctccgggaatgtcgcgcatggcttcgctgtatcccgcgatcatcgtgagcggtgtgcgcagatcgtgcgaaatatttgcgataagttccttctgcatgcggtcgaccttcgaaagctcggacgcggcatagttcagcgtatccgaaagctcagcaacctcgcggtatcccgatgcatcaaagttgacgttatagcttcccgtggcgagtattttcgcctcatcgtttattttggaaacggggcgcgcaagaaatttcgatatcagcacgcacagaagcgccgccgccgcgagcagtatgcccgttatccacagaagctgtatccgcagcgtgctcgtcgtcgccgcgacgggcacgatctcggaattcacaaggatcatccgctcgccgtccggaatctccccgacacgcgcaaggacgatcgcgtcgttgtctccgcctatgtcgccgccgcccgtcggggaatatcttttggtcacgctcccgtcgccgtcctttgctctgccgtaaagctcgttcaggatcgaattgctcctcatattgtggataaggcaggtgtttttcacatgggcatccaccttgagtgtgcccacgccgtcctttatctcgtaaaccgaaatgcagaatccggttttttccgcaatcccgtacaccttttcttcaaatccgtcgtcgtccgtatccgccgaaagtatcgccgccgtggctgcaagctttctcgccattatcgactgatagaagcggtcgagcagcacgatctggaagatccagagtatcgctatcgtaaacgcgcagaaaagcgcgaaatagccgaatatcttccatttcatcttcggcggctttttcgcagtcctattcgtttgtgtcaaagcggtatcccactcccctcagagtaacgatatatttcgccgcgtctccgagacttcttctgagcagcttgatatgggtatcaagagtcctgtcgtcgccgtagtaatcgtacccccacacctcggtgatcagcttttcgcggctgagcgcgatgttccggttccttatcatgtagaaaagaagatcgtattccttcggcgacatgtcgatgcgctttccgtccacatagacgatgcgtcccgtaatatcgcagcgcagcggtccgatctcgaacacatcgtgcggtgtgtttcctcccgtcgccgaagagttcgcacagcacgtgcgcttgaggactgcctctatcctgagcataagctccttcggcgaaaagggcttgacgacataatcgtcggctccgcactcaaagccgttgatcttgtcgtactcctcgccgcgcgccgacagcattatgaccggcacatccgattttttccgtatctctcgcacggcagaaaaaccgtcaagctccggcatcatgatgtccattatcacaatatcgaagttttcctcggcgcatttgcgcaccgcttccatgccgtcgcgcgcctcttcggtctcgtatccctcgaatttcgcgtatttcgcaataagcgcgcgtataagctcttcatcgtcggcaatcaaaattttgtacatacggtcccgtccttttctgattttatgaaaagcgccggggcgaaggcgcattttcttccttaatcaattatacttcatccgccgcattttggcaagagaatttccccgaattgccgaaggggacgatatttcgtccccttcttagtatttatgacaagctgcgtcagtattactgaacctcgctgaagtcaacgtccgttttctcgggcttgtattcatagcatttaacgtcaacctcgatcagcttaccgtcgcggtagagtgagaatttcatcgtgcttccgatctcgcatttcttgacgattgccttcacatcgtcggcagaggacacctccgtgccgtcaaccgcgattatgcggtctccgaacttgagaacatcgtcgttgtagccttcgactacctgtgcgatataaagtccgggagaggaattgcggaaattgcggtatgcggtgtacgaatcggatgcgtagtagagagatactccgatatacgccttgccggtgacatatccgtttgtcataagctcttccgcaaccttggatgcgtcgtttgacgggatcgcaaagccgagtccctcgacgttttcgccggaggattttgcattgacgattcccacaagctcaccgctcatgttgaagagtccgccgccggagtttccggggttgaccgccgcgtttgtttgaagcagattcatcatcgtgccgccgacgtcgatctcgcggtcaagcgcgctgatgattcccgtggtaaccgttccgccgagcgatccgagcgggttgccgattgcaataacgtcctgaccgacgacaagcttggagctgtctgcgaacaccgccgccgtaagcccggtcgcgtcgatcttcagtaccgcgatatccgtgtcggcatcgtgaccgacgacgctcgccgtgtactcatcgccgctcttgaggcgtacggtgatgttgtcggctacggtgttgttgtccgtgataacgtggttgttcgtgatgatgtatccgttttcggagatcacgacaccggagcccgcgccgctcgatacatactggaagtatcccgtagatttgaattcggtggttatctcaactacgctgtcggctacggtgttgacaacgtcggtgacgctggtcgctgccgccgaggcgtcggtgcttaccgatttatatataaccgccggatcgttctgaaccgttccgccgaacgacgggccgtttctcatagcgacatacgctccgccgaagcccgccgcgcccgagagcacgacgcacagtgcgcatatcagcgcgatcacgccgccggacatacgcttcttctccctgcggttcttgcgataagcgtcggcaccgggatttacggggttgtatccgtactgcggattgaactgtgagtacggagctgcaccgggtgccgtatatgcgccgtatgggttctgtacggtctgtccgttctgcgcattcgatgcgcggaaggtgtcgcctcccggattcgttccgccggagctatgcgccgtctgtgtctgcggacggaaataagtcgttcccccttcgggacgaaccatgctgtactccgtcgatgccatgtcgggcgcgctctgcgtgttctctgcgggattattcgccttcggagccgcagcttccgaacggtcttccttctttatatacgggtttgacgatatctcgttcgccgcatttttgttttcatcaaaaatattgtcagccatttttgtttccgcctttctttttctttttcctttgctgtctgtattatagttttccaatgtgacggttttatgaaagcacaaggttttttcactgaaaaaaagaaaaacttgcgctgaaaggatcaaaagcagttccgcttttttccgaagtatcaattttttattgactttcggcgcttttcatgttaaaattgtttacggtaagattcccaagaagagactttttgaacaaaaaggttctccttttttctgttcgaaagagccgcgctgaagtgatgcaccgtcagtttttcgaaaaatgcgccgcaccgaacggaaagcatcattataatgtgtatgaaatacgaaatgttttgaaaggtgtaacagaatgaaaagactcatctccctcgcgctgtgctgcgtgatcgccgcgtcggcttttgcatcatgcgc

SEQ ID NO: 655 - DNA, 31860 bp, Unknown
  16S sequences of unknown bacteria
gctcctgacagagttgggtaagctgctgatccgaaagagaacgcagctggctaacggattcaatcgtatccagaattttcatagcgtcctccttctcattttcgaatgaatactgccaaaatctttccaatcatctccacgatttgcttgctctggttaatggctacgccctttcccagagcctttaaggacaccgtcatcgcagagataactgcgcttgtcgccaccgaccaaaaagctgccggcaaaaacccgaactgggccgttgccaacgccgccagcgcggccccagcagtgccggatacaacgccgcaaatgtcccccactacatcattgcaaaagtttgaaaatttctctgcatgttttaagaccaacaggctgtttttggccccttttacctttttgcttgccatggctacaaagggggcctgtgaagcgcttgtaactgcaacgcccagcatatcgaacaacacgcccagcaaaatcaaaaccaccaatacagaaagcgctacccaaaacgtagcgccttcgatcatcgtactggaaacgtacgtcatggccgccgataagctcagcgtcaaacaaaatgtaatcaaggcccagcgtatcggcaggtttgttctcttctttttcgccggggccttttcgcttttggatctcaatgtattccttcccatacaataagtgcggtggtggtataccgaataaaccttgcgccatgaggtctggtaggatttccccgtttcgtaccttccgtcgccgaaaaggcggtttccctttagacaaaacgatgtggcgtttccgttcacatgaccagattgcctatgagagcacactgtaatccccggtataccttaccaacagtctaggagctttcctcggcggtcgcccatggccctatcctcttttgcagctacggtttcagaaggcaatcttctcatccatctggccagacagataaggcgttcctatcatccaccgcggccacgcaaggcaggctacactgtacacagctgtttggccgcatgacaggttcataccccgtcaagtaaggcgtcttatatgcgccccacccgaacgggcctccacgactgccgggtcggctctcgcatgccgttgcaagtcgcccgacaatcttaacccccagcatcagccccaatctgggcgaaagaagccaacaccagagacttcatcgatgtgccattgacggatttttagccccgccttcaggctcacaggtaaccgactagaatactgcaccaccggaattgtattatatcaagcaagcagccatacacgcaaatgcttttttcgtgtatgattctgtctctgtgattctagggttacggttgagttttttgctttgcataaccctttattttcttcgttttactgccttttgcgccgtaatactcaaaaattccgtcttcttgccaaagcgtgccagcgcctgttgcgcctgctcggcagcctgttccgctagctgctgcgccctttccaagccatataggctcacataggtggttttgtgttctttctcgtcttttcccggcgttttccccaattcttctgctgtagaggtaacgtcgagaatatcatctgcaatctgaaaggcaagcccaagcgccttggcatagctcgttatactttctatctcctgcgcctttgctcccgccatatatgcccctgccaagcaggcagctaaaatcagcgcgcctgttttttccgcatggatacgccgtaatgtgtccgctgatacttcctgcccggttgcctgcatgtcccgtacttgtccggataccattcccatgctgcccgccccctgggccacggcgcccgcagccttccaggcattttctttatacccttggctcagcatcgtctcataggccaggctttgcagcccatctcccgacagtaccgccatcgcttctccaaacaccttatggttggtaggtttgccccgccttaaatcgtcatcatccatacagggcaggtcgtcatgaattagcgaataagcgtgaatcatttccaccgctgcggcaaacggcactgcctcttccacactgcctcctaaaagatcacagcaggccaatgttaatacaggccgtagacgcttcccccccgccagcaggctgtacgccatgctttgttgcaaaggcgccagcctcccctcgagcgctttggataaagcgggttctatcagggatacatacgcttcatactgtttttgatatgcctcaggcttcaatctctatttcctttccttcctgtatctttgcaattctggctctatatccattgagcttttcctggcaaaatgccgccaattcgttgctcttttcgtaatattccatcatcttgtctatggataggcccggggtttccatttcctgggccatggcctccagttccgtcattgcttgttccagtgtcagttgctgttttgcgggcattggccttcctcctttgtgtctttccagacagcctgtgcagtgccgtctgcaaatattacagtaaacggttcattttttttcgtctgctgtttacttgtcagcaatgtacctgcctgatctcgcagtattgcatatcctcttttcaatgcatgttgagggctgagcgcttctgtacgcgccaccaaggacttccacgcctgttcttgtctatccaaggcctgtattgcatgctgctcagtttgccttttcagttgcttcacctgctgcgtccattgatctatccgcatttccagcttgaccatcggtccgctccgccgcaacaggcccagctggctctctcttatatgtagcgcctgctccacctgttttgccatggattccatgagaaaatcaatggtttgccgccatccatccacatggggaaccgccagttccgctgcagcagagggtgtaggcgctcggagatctgctacatagtctaccattgttgtgtctgtttcatgccctacacagctcaccacaggtattttgcatgcatataccgccctggccaggatttcttcgttgaatgcccaaagatcctccaggcttccgccgcccctgccaatgagaatcacatcaatcccatctgtgctctgcaaggtttccagggcttgtaccatttcctccgcagctccatccccctgcacccggcaaggcaccaatagaatatccacacctggatttctccgtgtagaaacattgatgatatctcggatcaccgctcctgtgggcgaggtaataacgcctaccctgcgcggaaatctgggcagaggctttttatgagaagcatcaaacaagccttctgcagccagctttgccttcagcgcctcatatttttcataaagcatgcccaagcctgcattcgccatggtctgtgcatacagctgaaaggccccatctctcaaatatagattggcaccgcctccgatgatcaccttcatgccatccgctggccgaaaattcacgctgcggttatattgccgaaacataacacagcgcacagacgactgagcatccttcagcgtaaaataccagtgcccggaagagtgtgccttaaaattggaaagctctccctccacaagcagaccctgcagcatctcatcgcctgcaatcagtcgccccgcatactcgttgagctgtgttacgctgattgtcatcatattcaacaattcttttagcatctcgtctcctttgccaaaagcgcaatgccaactgcattgtcgcctgcgtacaacggatcagcaaaagcgaccttcaattgttttgccatcttggcacagcgctctgtcaccactgtttttaccaattggttggccgatacaccgcccgctactagcacatatgctaatcctgtcgcttggtgcgctcgtataattgccttggacaatgcacggccaagcgatacaaacacacccctggcaatctcttcttttgcaacgcctttttctatggcttgttttgtctgcgtttcggcgccggaaaagaatagatccataccctttaccgtgacggtaaaggaggctgctgtttccgtttggcaggccaatgtctccaatgcgcggccagctggaaaatccaagccaagctttaccccggtacggtctacccactgaccggccgcaatgtcttgcgtagcccctaaaatctcggccgtataaccttgttggcagattttcaaaagctcggtggttccgccggataaatgaacgcccaaatatgtctccggtatttgcaggccgatctctgctgcgcggatatgcccctgctgatgcgaaaaataatctatgggcacgcccgcggcgctggccacgctgtccgccaccgccttgcccgccaaaaagaccggcatatatgaaccctccgcctttcggggctgtgtgctaacgccaacgcctgccagcgtcactttccccgcatcttcaaacgcgcatcgcatcaacgccggaatttgccgtatatgacaaaacacagcgtcgctttgccgaaggcctagcgcaccgtgttctactggcaatggttgtcgaccatgatacagcacctgtccgttttccccgacaagcgctgcgctcgtcacataattactggtatctattcccagccaagctctcattggcctttttcttcctcttcttttttcttagatctcgagatgctgcccaaaatgccgttgataaactgcttgctttttggttcgctgtattttttggccaattccaccgcctcattgatggctacggattccggcacatcctcacggcacagcatctcatagatggccagccttaggatggaaaggtccactttcccaatcctggataaacgccaacccactgcattttgctcgatcaacgtatccaaggaagctctctgttccactgtgccttcggtaacctgctttagatacttcatatcctctgcatccagcgccgcaggctcaatggtctcttgaatcatatcttggttcagttctccggtcagctcatacgcatacagcatacgcatagcggcatcacgggcaatcttacgcgacatagtatccctctactttaacatttatttgttatgggaaaacaattcctgcaccaatctggaaaatctctctctgttttcctttttggagccaaagtacacaccaacccccacgcaggccaggatgaaaatggtccgtaagatcccaaattccagcacgaccagcgccaggataaggccgataaatccccctatccatttgtctgcatttcctccaaaaaacgaggagaaacggttgttatccatccttgctccctttcctcaattatgcctttttttcaaaaagcacctctaccgtagcatccgtaatgccacaggaggcttccagcatctgcttaattctgccctgcacagtagcagccagatccacaagattgctttcaacaccggccagcagtgtcatcaaaatggtaatgccaacttccttttgcatcagtttgcattgggcgctctgcacgccttctacctgttttgccgtctgcacgcaaaaatccgcaatcgcttcctgggcaatacgcacatcccccgtcggcgataccgacagcgtagccatctgctgtggctttccgccattgtctcccaagccaatccacatacagcgaatggccaacaggcaaacacagagcgccaccaatacaacagcgatctgtacccatagtgtacgcagcgcagccatcacctctaccatgggcaccgctccgcatgcaaccagcgccacgccaacgcttaggcagatcaaaatcagcattgcgagaatcaaaagtagtctttcgcttgctttcataccttttattccctcctaagggcttgtcctcatttgtgataaacaacagctcccttgccgaagaacgtaagggagccgctgatgcttcttaccgcacgcggggcgcttgctcagctgtggcctccgtggctgcttcctctttcttttccagctcaacaccctgcacatggatattgatttccaccacgcgcagccccgtcatcgtttcgattccctttttcacttccttatggatgttttcacaaacttcaggaatttttacaccgtattttacaatgatgttcaggtccacggcacattcctctgtgccaacctctacctttacaccttttgtcatatttttacggcccagcagctccgccaccccagaggtaaagccgccgctcatccctgcaacgccttccacctccaccgtggacaggcctgcaatggtagcaattacatcattattaaacgtaatccttccgttcttttcgtttctgatctgaacttcctgcatattttcttctgccatggaagccacctcccaactaagattgctttattataccaggtttaattgaatagtacaactttgctcccgttgggttactttctcggcatgattttgatgttctcgctctttacccctgtctgctcgcgcacaatatccatgatctgggccgcttgggcgcttgttagcgcttcggtgttttccactaccacattggctgtttcgtcttgtatggtcacaatgcattcgctgaacccttttgccttgatgagcccttcggtattggcttccgtttccatcgtattgatcagcgccagtttcttttcattcgcctctttgatagagtcttcatccgatttttcatcgtttatgatggaatccagccaggcaatctgctgctcacggttggtttttctttcatttctaaagtccgtataataggtcagcgcattggcattggcctgggcagcgtctcctgtttgggaagcggtaggctgtgcctgctccccggcctgggcgtcatcgccgctttgcggggaagcagacggctcctgcatagcaacctgcgggctgtctcctatgttttcgttgaacttatagttcaagaatcccgtaaagcacaacagtgcgaccaggccgagtaaaatccagttcttcttctctactttcattgcattgtccccctttaaggcttttgtttcatttcaaatacttccactttggatgcttccacgcccagcgcagtctgcgcagctctggaaagctccatctgtacggtcaaatcgttggccccctccgctacgatcaccacccctagcacctgggggcgcttttcagtgatgactactagatcctccgagccagagaccggctttgtggaggtagattggttggtcgtgcttctgttctgcgcatctacggtggaagaggttgtagagttgttgtcgtaggccggcaccttttcggcttccccttcgtaggtaatcatcacctccaccgcccctgcccccttgatggaggacaaaatgctggccaatcgctgcttttctgtctccgcgttaaacgtggaagaagaggtctcttccgtttgtgtctgttccgttttgccaaaagcgaacagctgcggccagcaaagcagcagcaatgcaatcatcagcaccccgcacagcacatactgaaggcttttggcattgagttttggcagctttacatccctccagtgcatgtgtatcatcaccccttgttattgatatgtatatgttgtccttgttctgttatgaccattgtaaaatccattgcaccagcggctgggccatggcaagcgtcataaccagccccagacctactcggccaaagcgtttaagcccgccgctgggcagcaagatctcgaacagggcagtcagcaccccggcacacgcaatagtcatggcccagctatacagcgtaacttgcatttgcatcatcctcccagatttaatgtgccagcccggatcaaaagcgtcaggctgataaacatcatgatgccaacgctcaatactgcgatatacaacagcgtggttacctgtgaaaggtcttgtaaacagcctgccaggcgtttttcttcaaagggttgcatcagcgctgctgtcaactttaacgtcagcgttaccgccacaatctgcatgacgggcgacgccatcttgcacgcaatgaggatcaaccccattacgcctacgccatttttcacaacaagcgaacagccgattagggtatccatggtaccggagaacatcccgcctactaccggcacgaatttatccattgcaaacttggccgttcgcaacgtaacgccgtcataggtagagcccgtcaatccttggatggccatggttcccaaaaaaatgacgaatacaagcccggtcagccatgtagcgcatttcatcaccagctgcgtcatgcgcgaaatgcggatcttatccgaaagattttgtacgacggtaagaacgccgcttaccaaaatggccggcagcgaaaacttatgcaccatcgtcacgatgaagcccgtcagcatgctcatagccggctgaaaaatacccgcgctggccagcccgcccaccgctgtcagcagcgtaatgagcactggaaacattgcctgcatcagctgggtcatttccacaatggcagttgagcccactacaaacgcctgcaccaaagcccgtaccacaatggataccgccagcgcatatgatagaaaaccgcatacctccgctacttctccggataatacccgtgggccgatggcgcccagaagcgacatcacacagcacagcaaaatcagctgtaccatcaactgcatattatcgcgcagcgccgccacaaatcccttgccgaaaattgaaaggatattcataacgtccagcttattttcgcctttacccaatgcgatgatatagtcgttaaagctgcctccgtccagcatctgctgcgccatctcatcctcttcccagccctgctgtaaatcggataagtctagtccattgattgtattttgcagctctgtttcaaattcctcttcgctctgctcctgcgtttgttgcggctgctcctcctgctcctccgcctgcgccgtcattggccaaagacagagcagtgccaggcaaaccagcacccaccgcttcatggcagtatggagctgagtagctccagtaaattgatgacaaccggtacgcacagccccagcatgatcacctttccccccagctcaactttggaagcaatcgcattttctccggcgtctttacaagcttgtactccaaactccgcaatgtaggccacgcccgtgatcttcagcatcgtggtgaaaatctcagcatccatttgaaactttgcaccgatttccgccagctttgaaagcagcagcgccgcctggtctattaccgaaaaaaccaccagcgcaccggtagccaacgcacatagcatggccaactccggcctaataggccggagtaccagcgtcagcaatgcgccgatgataccaatggatacgatctttatcatgctttgcctcctaatagaggttgaatacgtttttgacgctttcaaacaggtcgctgatcacaccgatcaccatcaccaatacgatgaccaaaccagcaatagcaaccatggtcgccatatcatcccgccctgatttgcttaatagctggctcaataccgcaaccactatgccaatggccgcaatgcgaaatatcaaatccacactcaatccaatccccgccttttataaaaatagaatcagccatatcgcgccgcccagcacacccatcatgcggtacaagcgtcctttttgctgccattcctgccttgcgtttgccagctgctgtgtcagccgttgctcacacagcgcaaacgccgcttcctgatcctctctgtggcttccaatgcgctcaaacatctcttctaaaatcagcttttcttctttgcctaggctttctcggaaacctactgcccgtgttcggtctgccatggtacgctccaaagactccgctgggctgtatcctgccccgagctgctgtgccagcatggagagaaaatcgtggggtgctccctctatgctttgtgctgtactccgtactgcctgggataacggctcttggtaataacgcagccgtacccctagcgtgtccagtattccctgcaaggtctcaatcgccttgcagcgttgtcttaacccatctgcagctacatagcctagcgcagacgagcaggcaaacagaacaatgcacagtgccagtttcatcgtacgcctaccatcgggcacagcctttgatccagtcttttaacgattctccccggcgcctggcccaataccaaatatcgttcaaagacgcgctcttgaatcagtaggcgcataccatgcctctgcattaagtcgttttcatcctgtccatgtaccgtggctaacacctttacccccgcgaacgccgcctccatcaccgctttggcgtcttcttctccgcccaattcatccgtaactaaaacttgaggagataggcttcttagtgccatcatcatgcccgccgccttggggcagccgtctaacacatccgttctcagccctacatccaactgagggatccccgctacacaacctgccagttctgccctttcgtctaccaggcatactcgtttgccttccgccccgaagattccgttggaaatttgccttgtcagatcacgcaacagggtggtttttcccatcatcggcggggatatgatcaaggtggaatacacattgttttgggggcgcaccaccctcatcgcttcatctgcgcagcctttgagctcccgcataatgcgtatacacgcacctccacagtgagataacgccgcaaccttgccgtcccttactgtaatgcgccctgccagccccaagcgataaccgcctttaagcgttaaaaacccctggcgtatttcttcttcgtaagcatataccgaatgctgacaagccgcttgaaacagatgctttatctcctccggtgcaatcacaaggctgccgtccggtgttttggaggtttgcccattgctttttacaaacacatcgcctgtcccacaggaaatcatcagcggacgcccacaccgcatacgcacctcatctatctctgccatcgtttccagcggcagtgccgagagcgccttggccaccgtcgggggccatagcccttgcagatccatcatccattccggtttcttttgcatgaaaggtttcctccttttgtgaaatgtatatgtgtatatccgttgtcatagtccaggtttgtccatacggaaaagcatgaattctgtcaataaaaaaagagcaggcgttgcctgctcttttcataaaaagccacatatgcaatgcggctttttacatgttattcagtgggctcttccttttcctcaaaaagtacctgatggcattccgggcataccaattcttccctgcccagcatatcctcatcaaagtataccgtttcatggcaatgaggacattcgatctctaaaaaatcgtcatcctctggctcttcaccgtcaaacagttcttcttccagatcgctcaagtcctcgtcgatggcttccacatattcattgagttcatccatatcgccctgtacatcgtcaacagcatccgatatatcctgcaacacgtcaatgatcttcaaaatcagcttgtcctgtgccgattcttctttgatgccaagcccatcggacaggcctcttaaatacgcaacacgttctgataaataagcgctcatcttttctcctttttgctattacacacggctcatgtattccccggaacgggtatctacacgaatgacgtctccttcattgacaaacaaaggaacgttgaccacagcgccggtttccagcgtcgccggtttcgtaccgccggttgcggtatcgcctttaatgccgggatcggtctgggtaatggccagttctacaaaattcggagcttctacggagaaagcctgtcctttaaagaattttacatctacagaggtgttctcctttacgtattgcatggcatcctccaccaactcacggtttagcggcaactgctcataggtttcattatccataaagtaatacagatccccatcgttgtagagatattccatgctcttggtttctacatgggctctgggataccgctctgtcgggctaaaggtgcgctccaacacattgccgttgaccacatttttgatcttcgtgcgcacaaatgccgcacctttgccaggttttacatgctgaaagtccacaatcacccagacggctccatcgatctctacggtttggcccttacgaaattcgccagcagataacatttgttaagtcctcctcaaaattacaatataatcagttctttcggcgaggcggtgaagttttcaaatccgtcctctgtgatgcagatggtatcctcaatgcgaacgccgaatttcccgggcagatatatgcccggctcaacggacaagcacatgcccggccgcaagacatcctcgcaagacggagaaaacctcggatcttcatgaatcatcaacccaaagctatggcccagcccatgttcaaagcaatcgccgtatcccatctcatcaatgtagccccgcgcaatatagtccacattattgcatatcatgccagggtggattttgtcaagagtgcgcttttgtgcctctagcacgatttcatagattttcttcatgtcatcgctcacggtgcccagtgcaatcgtgcgtgtcatatccgaacagtatccattgtatttgcatccaaaatccatggtaataaagtcccccgcctgcacctttctatgcgaaggctgggcatgcggcatagaggaattcggaccagaggcaacgatggtgccaaaagaattttcacagccttgtttggccatgaaatattccagttctgctttgatctccaattcctccatccccgggcggataaaagaaagtatatacgcaaaagcgtcatcggttacacgctgagcctgccgaatgttttcgatttcctccgcgtccttgattttcctctggcggtttagggtctgccccagatccaagaactcggcctgcggcagctgtgcacagatctcatgataccagctaaccgtttggcgatccgcctcgaagccgatcttaaggcagcggccctcctcatttctttttttaagttccgtggccaggctcacgccgtgcccagttttgatgacagtaaaatcggggcactgcttttccgcctgctcagaatagcgggaatctgtcaataaccactgctcctcagcatccagcaccagcaacgtttccgtattggtaaagccgctcaaataccgtacattctcatagctggataccagcgctgcatcaatgccaagcgcatcaaactgctgcataaatgtcttacatctttgattcatgttgccatgcctcccgtgcttttaaatacatatcccggtatgtggctgcatcttctgccatctttccgctggattcacagatcaccaccgctgtatattccctctgcgcaaacagcgccgccaagggatcaaagtttgggccgtattgaatatcttgataattccagtgccgcttttccccgcccttggtaaactctattcgagaaaaatggacatggatctgctttgctctttctttgcccaggcttgattcaatgccatccaaaatggcggcaaagctcttcttatctccaaattgtcccaagcgccttgcatagatatgcccaaaatccacgcagggaatcagtctttcatccaatgcacagatgcgcaatatctcctcaatatctccgatctggcccagctttcccatcgtttccgggcaaagcgtaatcccctctagtagcccctgtgcttctagcttttccaggatctgtgggaacagcgtcaaaatattttttacagcctgttctctttccatcttcccctgtgcccctggatgaaagatcactcgcctggcacccatccactgtgccgctcggcatgcctgctcgaagtattttaagcagcttacttttttctgctcttcctctgtagccagattgataaaataaggcgcatgtacgcttttttggatgccatatgcatcaaacgcttccccgatctgccttgcgctcttttccgtaatgcgcacgcccctgccaaagctatattcaaacgcatccaacgcaaaattttcatgcagccacttaggctgctctatcgtcgttttatgtccctctgcaaaaaagctctctgagtttcccgagggtccaaatctcatttgcatgttcgtattctccttgtacttttcattgtagtacaagacccaatagtatgcaattgcttctcgattattcctctaaggcgtctctgagcaaacgcaatgcttttttctcgattctggatacatatgacctggaaatgcccaataggtccgcaatctctctttgcgtcttacagcggccggctaccagcccgaaacgcaattcgatgatcaccctttctcgctctcccaataccctctcgatggctgccttcaggcgctgaacatccatactggtctcagcttgctgctcggtacagtcagaggaaatccccatcacgtcgatcagccgtacctggttgccatctttatccgtaccgatgacctcgtcaatgccgatttcgccctttgtttttttctcctggcgcaggctcatgaggatctcgttttcaatgcaccgcgctgcatagcttccgatgggcctgccccgttccgggtcaaaggtattcaccgccttgatcagccctatgctgccaatggaaatcaaatcgtccaaatctctgccattgacggcatattttttgcagatatgcgcgaccaagcgcaggttgtgggtaattaggctgtgttttgcctcctgatccccttccatcatgcgcgcaatggtttctttttcttcctccttggaaagcggtgatggaaaggtaggcccataagagacgctgccaaccaaaagaacaagctgacttaaacacaacaatgccatgctaaacatcaaacgatccctccttgctttgaaaggatacgccaaacagcttgtaagaaagaacaaagccgccaaattggcagcttgtcttacgggttccgagctatattcagatcattccagcactttttttcttgtgatgaagttccagaccatcacaagggccgcagcgcctatttttacaagcatatagtgccagtgcaggaactcaacccccacccacatgaccaacgcattgagtcccaggccaatgatgctgaggatgacaaacaacacaaaattccttgttttgctgtattcctgattgactgcaaacacccatcgtacgcttgcaatatagttaaaaatggtagaaatgctaaaggatagcattgagcttagcaaataataaaggccggcccactctgtcagggcaaacagcagcccataatctaacagggtagccaaaatgcccactacgccaaactttgcaatttgctgtatcaatcgttccatttaatccgttctccgcattttccacacgaggttgtttatgctttagattgtagcataccgatgctgttgccacaaattctatctttatagtggaaaaagagccggaaaaccggctcttttagaaagcttactgccctgtcgtgttattcttctcatcagcctcgatccacagcggacgatatttttctacattggcattatactcttgcaatgttttggaaaataccgtttctcccgtctcaggatctcccaaacagaagtacaggtaattgtcctccaaaaagttttcatccgggtacagggccgcctcaatggcttccttgccagggttacagattgggccttccggcaatcccttgttcttatatgtgttgtacggagaatcgatggccagatcctcactggtaagattcagccgctttacgccgatgatatactgcacggaagcacagctttgcagcggcatacccgccttcaagcggttgtggaatacagccgataccttcttaaagtccgcgctttttgcttctttttgaatcagcgacgccaaggtaatcacctcatccgtcgtcatatccagttcttctgcgcgctgctgatatgtgtcagagtaaatctgtgtaaaccgataccatagcttattggctacttcctccggctttgcatcagaataaacctcataggtgtccgggaacagatatccttccgccggatttttacgcttgtccttctccttaacaggttcctccaggaatggatatgcctgtgtatacggagacagatccttcagcgcattggtaaattcctctggcttgtctatcacgcctttctgcaccagcagattggcaatatcatctaccgtatacccctctttaatcagcagctttgccacattatccgtgctttctccactgcaaagggtattgatgatttccatcagctccatagagggagacagctcataggtaccgctgcgcagtttgctgcccctatcgtacagatccacatagagcttaaagatggttttattgcggatgatcccgttttcctctaggatcctcccaatggtgttgattccgctgccacgcggaatttccacctctatcaccgtcttgtccgaggcattcacgggcgccagatatttggcatggataaagccccatagcgccaggccaatcagcagcaccaggcccaggctaaccaaaaatactttggtcggcctgttgatgcgctgcaatatcccatccatctggacacgtgcctgcgtttctctcagatcagatgtaggcgctgcatgtttggatttactagtttgctttcttctcatgcttcctccaggtttgcgttaggcgccgaatcccagatccatttgcacggcatcggccaggatcttaaaaatatcgctcatcagctgattgagccgatgctccgccagcataaagttggtcaattccgtattcagagacagcacgcccatcagctgttgatactgctgctgcatttcatccgtcacaggctggcccgccatctgggcacccatgacctggcgcgtcagctctgtatacttatcgtacaaatttttgtttagttcattggaaaacgcttcttcctttgcttttagatagctctggtatacttcgctttccttgatttctttggccaattcgtatgccttatcatagttttgcatggtttaacgcctcctgatctacatccaaaacaatgggcagtatcatcggatttctcttagtctgctgatagaggaaattacgcacgttgctgcggatactatttttcagcgtagtataatcgcccgcaacccgcttgttctccagctctttcaccgtattgatgacaatggccctggcctttatcagcagttcctcgctttctcgtacatatacaaatccacgagaaatcaattctggcccggaaatcagcgcgcctgtcacagcgtccacagccaacgttacgataaataggccgtcctcgctgagcatcttacggtctctcaataccacatttccgatatctccaataccgctgccgtctacaaagaccgcgccggaaggcacatcttcaccaaggcggatgccttttttcgtcagctctactaccttgccgatttgcggtatcaccatatgatccgttggaatgccttgttcctccgccgtgatggaatgttggcgcaggtgatggaattcgccatggatcggcatgaaaaattttggttttgtcagcgccatcatcagcttttgttcttcctggcatgcatgcccggatacatgcacctcactgatcctatcgttgatgaccttggctcccttttggatcagacggtcaatcatattcgttacagctttttcattgcccgggatcggcgaactggataaaatcaccatatcatccggccgaatggaaatggttctgtgctcatcgttggacatgcgtaccaggccacttagcggctctccctggctgccggtagtcaaaattacaacctgatccggatctacaaaatccagctggcggtcatccagcagcgtgcccttgcgaatcttcaggtaaccaatctccgtagcaatctccgtgatgcgctgtaagctccggcctgctacatatacctttctgccccggctctccgcaatcttgatgatctgctggatcctgctcacgttgctggcaaaggttgctacaaaaatacgtcctgttgcctgcgcaaacaaatcatcaaacgatttggccacgcgctgctcgctcatggtatagcccggacgttccgaatttgtgctttcgctcatcagcagttggacgcctttacgtcccagatttgcaaacgcagccagatccatcatctctccatccaggggagtatagtccaccttgaaatcacccgtatgcaaaatggtacccaccggcgtttctattgccagcgcatatgcatcggcgatggaatggcttaccttcaaaaaggtgatggtaaagcagcccagtttcactttagatccaggtttaatgacattgctcttgatgcccttgatgcggtgctcttccattttatgttcgatcagagccaaggtcaaccgtccgccgtagatcggcacatttttgaaatccttcaggataaagggcgtagcgccgatatgatcctcatgcccatgggtaaacaaaaacccacgaatcttgtccttattttttgccaggtaagatacatccggtatgacataatcaatccccagcatatcggattgcggaaaagtcatcccgcagtccacaacgatgatatcattttcatattcaatcaccgtcatatttttgccaacctcgccgatgcctcccagagggatgatacgtaccgtcggctgatttgcgttggccttgcgcttgctgcctgctgcctgctttgttgtctttcgtcttaccgtcgtcttggcagctgtttttgttgttttcacagcctttgtgcccgtcgtagccttggctgtttcggcgccctttgcttttgccgcaggccttcgtgtacggcgcctacttgtcgttttcttttcttccaagtgattcctctcttttcattttataagatatatttcttgagcgctgccaggtccatatgatgcttgagccgtgactccacatactctttgtcgatgacgacctctccctgcatggtgtctgcctcaaaggaaacttcctccaagagctgctctaagattccctgcagacgtctagcgcctaagttttcagaattttcattggattcataggcaaattccgcgattgcgtctatgccatcgtccgtaaatttcagctggaggccctccgtgcctagcaaagcggcatattgctttgtcagcgcattttcgggctctaccaaaatgcgtttgaaatcctctacggacaaagaatccagcgttacgcggatggggaagcggccttgcagttcgggaatgagatcctccacctttgccacatgaaacgcccctgccgcaatgaacagcatatgatcggtctttaccgggccatacttggtattcaccgtgctgccttccacaatgggaagaatatccctctgcacgccctcacgggaaacatccgggccaccgccgcccgccgtttgacgacccgcgattttatcaatctcatccaaaaatacgatgccctcggtttctgcgcgcttgagcgcttcgccgttaatatcctctctatctatgagcttatcgccctcttcctgttccaaaacgcggcgcgcttcggatacggagagtttgcggatctttgtctttttcggcatcataccgcccataatctctcccaggtttatatctacacctgcttgagacaaatccatgttcggtttgtcctctacttctaattctaccatttgatcttccaaaagtcccgcatctaactgcatttcaatggcgcttctggtggattcacgcacggaaatctcctccggcgtctccgttttggccggctcattggtagacgccgtcggcccaaacagcgccgcaaacggatactgcggtttgggtttttcctcgggtttatcctctttaggcatcagcagatctatcaatctttcctttgccgctgcctttgccttttcggaaacgccgttaatgcgttcctccctcaccatatggatggaggcttctacaagatcccgtatgatggattctacatcacggcccacatagccaacctcggtaaatttcgttgcctctaccttaacaaacggagcctttaccaatttggcaagcctacgggcaatctcggttttccctacgcccgtcggccccatcatcatgatatttttgggcatgatctcctctgccacctcttcgggcagtaagcttctgcgataccggtttcgcagcgcaatggcaacggcacgctttgcccctgcctggccaatgatatatttatccagttcctctacggtttgccgcggcgtcaattctgccatggtcacgcctcctctactgtgatatggtcgttggtaaagatacagatttcccctgcaatctcaatggcttttctggcgatctctttggcggataggtcggtattgcgtaccagcgccctggccgctgccagcgcaaagttgccgcccgagccaatggccgtaatgccatcgtccgcatcgataacctccccactgccggaaaccaccagcagctcttcaccatccgtacagatcagcatcgcttccaaattacgcatcgccttatcgctgcgccaatcgcgcgccaactccacagcagcgcgcatcaaactgccactgaactgttccagcttggcttcaaatttttctgtaagtgcaaacgcatccgccacgccgcctgcaaaaccaatgatcactcggtcatggtaaatacggcgcaccttttttgccgtcgctttcatcacaacctgctcacccagcgtcacctgcccgtcgccagcaatggcgcattttccatcctttttaacacccactatggtggttccgtgtagttccatgattctagcctcctatccttctatgtacgacatccaatgctcaaatgcttgtttagcctgttcgctgcgcagcttttgcttctgcgcttttggcatacgccccgtctccaagggcgccatcagcccaaaattcatattcatcggctggtagtccttgccgtcgtattcgctgatgtagtgaatcaacgcgcccatggctgtctgtgtatccggcgctgtcacctgtctgttttccatttgcagtgcacagcataatcctgcccacagccccatagctgcggactccatataaccctccacgcctgtgatctgcccggcaaaccgaatattcggccgcgcttttagctgtaacacatcgttgagtgtctgctttggcaaataggtatttctatgcatcacgccataccgaagatactctgcattccgcagcgccgggatcatgccaaatacgcgcttctgctctgcaaacttcaaatttgtctggaagcccacaaggttatacattgtccctgccttatcctctctgcgcagctgtacagccgcataaggccaacggccagtatgggggtccgttagcccttttgggctcattgggccaaacagcggcgtctgatagcctctggcagcgatcgcctcaatgggcatacagccttcaaaatgccttacgtcaaatgaatggagctctgcccgttctgcctgcatcagcgcctggtaaaacgcatcatactcttcctttgtcatcggacagttcaaataatctgcgggttgatcatatcggccctgaaaaaaggcacgagacatatctatgctttcaaatgatacaatcggcgctgccgcatcataaaacgaaagcggctcaccgcacagcgcattgatctcttctgccagcgcgccgtctgtcaacgggccggtggccacgatcacataaggatgatccggcagacagtccgcctgtttttctacccgttcaatgtttgggtgtgcctcgatcttatccgtcaccatcttggcaaacgccagacgatccactgccagagcgccgcccgccggcaccgccgttttatctgcacacaaaagcagcaacgaaccaagccggcgcatttctcttttcaatatcccagaagcgctgtcctccttagatgccttcaaagagttgctgcaaaccagctctgccaggtaagtgctgctgtgcgccggcgaaaaatgcgccggtttcatttcccacaacgccaccttttttccacggcaggccagctgccaagccgcttcacagcctgctaggcctcctccgatgacgatagcgtcaggttgtttcatctttcttcttttcctttttggtatattgccggtgcttacattccgggtttgtgcattgatgatacggcacacggttacgcccaaatttcaaaaccatatctccgccgcatacctcgcatttatccaagaccggctgatcccaagagacaaaatcacaatccggatatccctcacagccgaaaaacaccttgccttttttggattttttctttataacctttttcccacattttgggcaaggcacaccaatgtcctcgatcagcggctgtgtgtttttacattccggataatttgggcaggccaaaaatttgccgtaccgccctgttttcacaaccatcattgccccgcatttttcacagggaatatccgtaacctcttccggcatttttacgcgctctgtggtctccgccttttgcagcgtttcggaaaacgggccgtaaaaatcctccagcattttctgccagtctgcaccctcttccaccttatccagcttggactccatgtcggcggtaaacttggtatccacgatcttttgaaaattatttttcataaagtccgtgacaatgaatcccagctgtgtcgcatgcagcgttcttccttcgcgctccacatattccctgtctatgatggtggatatgatggtagcgtatgtgctcggcctgccaatgccctgttcttccaacgctttgaccagcgttgcctcgctaaaacgtgcaggcggctgtgtaaaatgctgcttgctttccgaatttatcagcttacagccaacgccttcttccaattcaggcagctgatggctgccctcttcttcctgttcatccttgccctctacatagagcacacggtatccgtcaaagcgcacaatgcttcccgtagttctaaacgtatacggccctccttcgatgtccgccgtcaacgtatccgaaacctctcctgtcatttggctggccacaaaacgattgtaaatcaattcatacaaccgatattgctgcgcatccaaactccctttcaggcttttgggtgtacggtatagcgaagttggccgaatggcctcgtgcgcatcctgcgaacggtttttattgcgataaaaattcggctttgctggcaggtatttggggccaaaggtgttttcaatatactctctggcctgcgccacggcctcgccggcaatgcgcacgctgtccgtacggatataggtaatcaaacccacagcgccttggccctcgaggtcaattccttcatatagctgctgggccagccgcatcgtattggaagggctaaagcccaatttcctggaggcttcctgctgaagtgtgctagtggtaaacggagccggcgccttgcgcgtacgctttccctttttcacgcttacaactcggtagctctgcagcttagcatcctcttgaatgctttttgcctgctcctcattgaccagctctgcctttttcttatcaatcttttccaagcgcgcttcaaacttctgcccttgcttttcctcggaaaacttcgcggataaggtccagtattcctgcggcacaaacgcttcaatctcacgatccctatcgcagatcatacgcactgctacgctctgcacccttccagcagaaaggcctgtacgcacctttttccatagaatcgggctgatcttatagcccaccaagcgatctaaaatacgccttgcctgctgcgcatatacacggtccacatcgatgggtcgtgcattttgaatggcattctttacagccttttccgtaatctcgttaaactcgatgcggcagtcgctatgttcatcgatgcccagcagctgtgcaatatgccagctgatggcctccccttcgcggtcagggtcagtggccagcaacacttttttggccgcctttgcctccgttttgatttccgataggatcgcgcttttcccggtcatctgtgtatatttgggcgtaaagccattttccacatctacaccgagctgctttttgggcaaatcgcgcacatggccttgggaggccgtcacataatactccgaacctaaaaatttaccaatcgtatgcgccttggccggcgactctacgatcaccagcgtagcatccttggcatgcgctttacggcgcttggctgtcgtcttttccccatcttttttcttggttgtctttttcgttgccgtctttctcgtcgttttttttgccgccgtcttttttggcgcggcagccgcctttatttcattcgtttccttgatactctcttccatagtcccctccgatttgggagtgtcctttcctttacttttctaaagtataaactctacctggtaattgctttattattcctcgaatttccatcaatgtcaagcaagcggataattgagacgctgccaaacccgttaattggcatagggcgtccagcgtcaaatcacccttactcaaagcatcatataccgtttgttccatttggtccatcgcttgaaacggagcggagtttttcggttgtttgtttctatccgcctgccatcccattgcaaacagcacatcctctgcacatgtcacaggcatggcaccttcgcaaatcagctgattggtccctttcgaagccggtgaatcaatattgccgggaacagcaaagacctctcttccctgctcctgtgccatgcgcaccgtaatcatagaaccgcccttttccctgctttccaccacgatcgtcgccaagctcagcccgcttatgatcctgtttcttgcaggaaagtttccgggcgaaggagctgtgcccggataatattcagagatcacacagccgctttgcaaaatctgttcataaattttgcggttttctgccggataaaccacgtccggtccgccgcccaaaacagctatggtaaaccctccggcctccagcgcaccggcatgcgccgcagtgtctatgcctcttgccatgccggaaactatggtacatccgttttgtgccaattcggcagccaagcgtttggcggcccgcacaccgtagcgggtgcaatgccttgtgccaatcatagcgatacactgctccatctcaggtgccctggctccccttgcatacaatactgggggaggatcgtatatctcctccagcaaaacaggatatccctcttctcctcgaaaatacagcgcgatatccatctgttccagcctttttatcaccgattccagtcgcactttgctctgtgccccagtaatcaatgccgctgtctttgggccccagccgctccaatgctgtatcgtttcggcctttgcttgataaaacacttcttttgccgatccataatatgacatcaagtcctgatattttttggggcctatctgatggatgctgctcaaccaaacgatgtaggattgttcctccgtcaatgctatgccccccaatattttcgatccaggctccgatactgtaccgcctccgctacatgctgcacttggatgctttcgctgccctccagatctgcaatcgtacgggccactttcaaaatccttccgtatgctctggccgataatcccatctgtgcgaatgcatgcttcatcaccgattccccttcggtatccagtacacaatagcgttttgtcaatctcgtatccagctgtgcgttgcaatagatgccctggccgccataccgcttaagctgcaaagtgcgagcctggtctacccgacgcttgatgtcttcgctgctttcctcctgcgtctgggaagcaatgtcctcatattgaaccgcccccatctccacttccagatccatacgatccaataacgggccgctgatgcggttgagataccggcgtatctgaagcggtgtgcaccggcattcctctgttccatattgcccacaggggcatggattcattgaggccaccaacataaaccgagccggatacgttgccgtagcattgaccctggccaccgtgacttgatgatcctccagcggctggcgcagcgcttccagcgcatccctgcgaaattccggtagctcatccaaaaacaatacgccgccatgggccaggctcacctcgcccggccttgcttttggccccccgcccgtcagcgctgctgtggaaatgctgtgatgcggcgctcgaaacggcctttgcgttaccatgccaggtccttcaaccctaagctgcccggctacggactgtatctttgtaatctccagcgcttcttcaaacgtcatattcggcaaaatgccgttcaacgccttggccagcatggtctttcctgtgcctggaggccctatcagcaagatgttatgtccaccagccgctgcaatttccatggcccgtttggcgccctgctgtcctttgatctgtgcaaagtctccatagccatcggctgatctcggtagattttcccaggagataggtgcctgtcttttaatcgttgcttccccgcttaaaaactgtaccgcttcctttagcgaccggcatccatacacctctaatccctctacataagatgcctccgttgcattttcataaggaaccagcattttttcgtatccctgtttgtatgcttcaatcgccatggccagtacgccggataccgggcgcagcgtaccatccaaagacaattcgcccaggatgcagaagggctctgccttctcctttggaagcgtctccatggcagctagcatgccaacggccatcggaagatcatacagcggcccttcctttttcatatccgccggtgccaaatttaccgtaatacgctgggccggatactcatatccgctgtttttcagcgcgctgcgcacccgctccctagcctctttgacagccgcatccggcaggcctaccagctcaaacgcaggtaggccgccggaaatatcgatctccaccgataccggatatcccacaatgcccagcaatccaaagctattgatttttgacagcaaaacaagcttccccccttacttgcttttagaaaaaccaccaggacggcatccagcgtagccatttcaatgcccatgctctatcgatcatcgccccgctccaaactggataaaacaaagcaaacagcagaagcgccacaatcgccagcgcaatgaatgccgccttggcccttggccaccgttttacgattctttgtcccattaaacaggtacaaaggatgataaacggtaccgaagcaaagtagtgatagataaatgtagcccttgtaatgaatacccatggcagaaatgcaccagccaggcagatcagcacatagacaagcgcatcctttttgtccggctctttgcgccaagccttgtttgccagcataaacagacacgcaatcaccgatgcaaaacccgtccaccatacagccggatttccaaaagccgcgatggatcgcatcatgccctccggcaggtttgcacctgcataataatagataggccgaatcatcaaaggccactggtaccacgggctctggaacggatgcgtcgccgtcagctggctgtgataattaaacatataggtctgtacaccccatacatccgccagcgtatacggcttttctgcgcacagcagatatggtaaatagcttagcagatatatgatcgccgggatgatgaggaaaaaccctacgcaaaacagcagcgtttgtattgtatagcgtggaaaggtttgtacgatatgcgtacaaaattctttcttttcttcctccaacccctctgccgccaggtactgcttggcctctttatactccttataccgtttgtacaacgttgtaaaaaaggcaacggccaggcctgcgcccgcataaaatccaatccatttgctggcaatggcaaacccaaacaaaatgccgcaggcgcctagaggacggaaggtgcgtttcagcccatcggcatagaaattcatctgccaatacttgagcatacagagacacatcgccatgatgaaaaataccccgtagacatcaatggtggcgatgcgggtctgtacaaagtgcattccgtccacagcaaataggaaggtcgccagcccggcccatttgctgctctttgtcacccgctttgccaacgcatacatcagcggcagcatcgcaacgccaaacagtgtgcccacaatgcgccagccaaatggattcatgccaaagatcgatatccccagcatgatgaagatcttacccagcggcggatgggtgttttcatacggggccattccatgcagatgctcatacgcagttctggcatgataaatctcgtcaaaatacatctcgtccatataggtggggtgcaggttgatggtatcctgctcgtctatcaatccctgcacattgctggtttgcccactccgccccgcttctatggcctgtatctcgatgcggttccagtccttatcaaacaaccctgcttcgcagagcatcaggcccttgttttcgctggtcagccgtacataccttggcgtgccggaaacattcaacgtctgccatgtatacatctgtccatattctacttcaatgctgccaacttcttcatactggatgccatcgtctgagaatgccacctccagcgttcccatgccaacgccaggataaaaatacaaatactccacctgtgcatcgtctggtagggtcaaaatggcgctttcataggcagtctgcgtgcgccatacgctctctggcacatgggtcgatcccaggtttgtaagcgccaccaccgcatataccgtcgtgatcgttagagcaagcaaccaatcccgcttatgcatgcggtttggcccatcctccagcggcttaatccggaaaatactggcctcttcaaccttgccatctcttggcttgtccgcttgtttgcatttcgcttctctgggccatatagcactaaagcacgcccaaatgcatactgcaaagcccgcaatgttcaaaatcgataccacgaccacaaacatcggtgtgccaagcaatacattggaggcattcagaagcactaccagcgaattgcagaaagtaaccgccgtagccatgccaaaggcagccaatagccgtttttccccatataggcagtaggcaaccatcaacagcaacatacagggatataggtaccgctcatgcattgcgtgcgagcataggaaaatgccccattgcaatatggccgcggccgggaaaatcgccttcttttcattggctgccagatacactgcaatggatatggcacacataagcacaatcatcacaataccgaactgtttgatggtaataccaaagatcagttcggtattgtaattcagccagttgccgccaaacagagcatagagattgaaagcattgaccgtcgcataaggatatgatccagcagccgttgtgtatttatgcagcagccaaagtggttcctgcccaaaagagaacggaagcgcgatgatgagcagcgcagctacacctgccaacgcagaaattcccaattcccttgccccgcgtttggggtcttttacaatatcatacacaaaagctgccgccagcaaggggccaaagaccagcatttgaggctttaccagcacgcccgctacaaacagcgccgcgctccaaggctttttccctttcatgtaacaatacagagcgccgacggcgatcagcgtcaaaatagaatcaatctgcccccacatggcgctatccagcacagtcatcggattcaatgccatcagcgcacagagcatcagggcgcgcggctttccaaaccgcttttctgccagccgatacaccaaataggccgccgcaagatccgctagaatggccggcagctttaccagatacaaaaagcccatgctgccgctggccagacccagcacttttccaatcagccctatgatccacaacaccaggatatagcccggcggataatccgcccataccccggaggtataaaagttccacggccctacctcagccgcatggctggcccatccggtaaagcagttgatatccgtagcgtgccctcttatcgccagcgcaaagatgctcagcaccacaaaagcgccgcccagcaccatccatacagcatgcttaggcagtctcccagtctgcttttctttgcgctttgccaccaagtaaatcaccccgccatacagcgcggcaatcaaaagggcaggcaggcccccttggatctgcttagcctcctcttcaagcctctgttcctcttcataggcctctctgtcatacagccaaacataggcggcatcctccggcacatcatccgtttccaggcaggatatttctgcaatctcaacattttccggatttgtcaaggtaaattgtgccaatacgctgtattgatcatccgccgtgagcccatacagctggatatactgccattcccctgtcaattcctcttcaaggtaggcagtttctaggccgcgcacgctgatcattgcgtgtccttgtccgcgaatgcccagcgtaaagcaatagatcgtttccggcatcacgttgacggattgataaaaatccatctccgtctcctgcgtttctatcgaaaggacttctcccatttcctcatccactttggaagaaacagaaaaagccccgtcggtattccatacactgtatgctccttgatcatcctttgtaaattccgggtttgcaatcaagtttccttcttcgttggtaaacccggtacaaaccaccaggcatgccaacaaatagaaacagaggatcgatttgaatcgcttcatttcgtacatcccctttccatctattcccaaatattataccatactcttccatcctacatacatgcatcaaatgcgtttgtaatatggcaaatttgtccaccgggcagaaatacctccaccacatcaaaccggcacagagcgtccatacatccattttgctgtaagtatgccatagccgccattgtagcatttttctgctttttagccgttaccgcctctgccggcgttccatgcttggtgtttgtgcgggcctttacctccacaaacaccagcgtatcctgaatgcgcgccacaagatccgcctctccgtaacgcgtgcgatatctgctcgccaatatttcatacccatgggcctgcaaatattgcgccgccagcttttctcccaacaggcccttctcctgattattgtgtatcatgtaagatccctttcaaaaagctggggcggtgctgcggcgtaatgccctgctggtgaatcgcctctatatgctgtctggtgccgtatcctttattttgtgcccatccatatcccggataatccatttcgtaagccttcatcagtgcatctcgtgttaccttcgccaaaatcgaagcggcggcaatggcatagctttgcgcgtctccccttaccacgccttcgccttctgctggcaaaaaagccggatcaatggcatcgatcatcacatagctgtcctgcttcggcatttgctcatacgcccgttgcatggccagcttggttgcgtttaggatatttaaacgctcaatctctgccacgtccgctaggccaatcccatatgccaatgctttatctttgatttgctcagcaatccgctctcttttcttttccgcgatctttttactatccttcacgccttcaatccacgtttccggcatccatacgcaggccgccaccacagggcccgctaaagggccgcgccctacctcatccataccataaaccggacggccctgccctttttccatatcaaatcgccaaaggtcctccaacctttgcct

SEQ ID NO: 656 - DNA, 8055 bp, Unknown
  16S sequences of unknown bacteria
ttgtaaatcttccgtaaataaaagtgaaatattaacctttggactgcaaaaaaggctccattttgccgtattagtgaaaggccttttcagtcccccccatttgccaaaaaggaggtaggcggtttggcccctgttgcccgggtagcggtggaaaaaaccacctgccgttttgataaacttttcgattacgccatcccccaggggatgcccctccgccccggagtgcgggtgctggtgccctttgggcacggccgccgtatcgggctggtggtggagctggccgaacaagccgcgcacgccgccctcaagcccatcgccgccccgctggaggaagaacccgtcctcaccgaggaagggctgttcctgctgcgctggctgcgggaaaacaccttctgcacctggttcgatgccctgtccgtgctcattccggccggctacggcctgcgggggctcaccgggtggtccctggtgcgcggggcacccgtcccggaggacctctccctcaccgagcagcaggtgctctccgttctgcggccccgccgcaagcccctgcctgccgccgatttggccgaaacactggggcttaccctctccgcgctgccgctggagcggctggagaacctgggccttttgcggcgggaggaagtggtggagcgccgggtaggcgataaggccctgcaaatggtgcgcctgaccgaagccgagcccgaaaagctgacccccaagcagcagcaggtctatgagctgctggcgcaggtgggctgcggcagcatccgggaaatttgctactttgccggggtgacccgcggcgtggtggaaaaactggtgcagcagggcctggccgaaacctacgaacaggaagtgctgcgcaccccgctgaaggaagagaccatccccgtggagccgccccccaccctgaccgaggaacaggccgccgcagtggaaacgctgtggcagggctgccaggaaggcggccggaccgggcttttgtacggggtgaccggcagcggaaaaaccgccgtttacctcaccctggcccaccgggtgctggccgagggccggcggtgcattgtccttgtcccggaaatctcgctgaccccgcagaccatccgccggtttttggcggccttcggcagccgggtggcggtcattcacagcgccctttccctcagtgagcggctggatgaatacaaacgcatccgccggggagaggtggatgtggtggtggggacccgctcggcggttttcgcgccggtggaaaatctgggccttatcatcgtggatgaggagcaggagcacacctaccgcagcgaacgcgctccccgctacgatgcctgtgaaattgcccggctgcggaccaggcggcaccggggactgtgtgttctggcctccgccacccccagtatcgagaccgcctaccgggcccaaaagggcgaatatttgctggcccggctgacccgccgctacggcggcgcccccctgccggaggtcactatcctggacctgcgggaacggcccatggccgccgaggctctgagcgaggagctgtgcgaacagcttttgcagaatctgcagcggggcgaacagagcatcctttttgtgaaccggcggggctattccgccaccgccacctgcatgagctgccaccagccgctggaatgccctcactgctccatcagtcttaaattccacgcggccaacggccgactgatgtgccactactgcgggtacagcaccgaggtgcccaaggcctgcccccactgcggcagccgcctgatgcggtactccggtgtggggacgcagaaggtggaggaagccttaaaaatgcggttccccaccgcccgcatcctgcgcatggaccaggacaccaccatgcgaaaggacagccaccaaaagctcctttcggccttcggtcggggggattacgatatcctcatcgggacgcagatggtgaccaaggggctggacttcccccgggtcaccctcgtgggcgttttgacccccgaccagatgctttacgccgatgatttccgcagctacgagcggaccttcagcctgatcacccaggtggtggggcgcagcggtcgccgggagctgcccggccgggcctttttgcagacctatcagcccgaccacccggtactgaccgccgcggcaaggcaggattacccggccttttacaaaaccgaggtggagacccgccgcctgctgctgtatcccccgttctgccggctgtactgcctgggcttttggggagaaaatgaggccgaggtgaagcgggcgggacaggcggtgcttaccctgctggagcggttgctgcccgccgaatacccggagctgccggtgcggctgctggggctggccccggccggggtgctgcgggtagcggggcgctaccggtacaagctgctcatcaagggcaaaaacagcccccggatgcgggagctgctgtggcggctctttaccgagccggcgctggcccagcccatgaaaaatgtgacactgaccatcgagccgaactatgactcggacttatagcaaggcggcggggcttcgccccatttccgccttcggcggatgttcgtgaaaaaatctgttatcacctccggtggcgcaagttatttagaaggcttaattggtacgcctaccggcggggtggcacttttgactcgccaaaagtgcccaaaagcgatttagggctgcgccctaaaaacccgacgcaccggaacgcccgcccggaaggtctgcgacctcccggatcgtgggctaaacggtgcttataaggtatcgcagatgcatctgccccctcccggcctcccccgcttcgggggaggggaacgccctcccttttcctgcaaaccgatagccccgctaaccataaccatgggtcagcggccttgcaccttgcaagccgcaaattagaaaatatttcgttccttcccccatagtccccctcctttgaggaggggacaggggtggtggttcgccgttctgcgctccagcgcagcggcgataaaaatgcgccgcaggctctttttaagcccatctgcgtgcagtacggatttgtttttgggcggtagcctaaaaataaattcgtatccagcgcagcagggcgaccgggttttcagggcgcagccctgaatgacttttggttacttttcttcacagaaaagtaacgccccgccggcaggcgtacagatattaaaaggctatccccgccgataggcgagaagaaacgatgatgaaacccgctttgcgggggttggggtacgggactgtattttccccgggaaattcccccataacttcgtccaatctgatccaaccgatcttgagaataggagatactatgagcaacatcgaacaggtaaaacaaagccactatgacgaaacacagatccaggtgctggagggactggaagcggtccgcaagcgccccggtatgtatatcggttccacaggcccgcgcggcctgcaccacctggtatacgagatcgtggataacgccatagatgaggcgctggcaggctactgcacccatatcgaaaccgagattctggaaggcgatgtcatccgcgtcaccgataacggccgcggcatccccgtgggcattcaccccaaaatgggcattcccgcggttacggtggtctataccatcctgcacgccggcggcaagttcggcggcgagggctacaaggtctccggcggtctgcacggcgtgggcgcttcggtcgtcaatgccctttcggagtggctcattgtcgaggtaaagaacggcgagcacatctaccagcagaaattcgcccgcggcgtggcgcagggcgacctgaccatcatcggcgataccgatgagaccggcacccgtgttaccttcaagccggatggcgagatctttgaggagctggtgtatgactatgaaacgctgcacacccgtctgcgggagcaggcgttcctcaatgccggggtgcgcatgaccatcaccgaccgccgtacccccacgggccccagcgattccatgtgctacgagggaggcatccgctcctttgtggagttcatccaccagcgccgcggcctggaggccctgcacgaggatgtcatctacatgaagggcgacagcggcgataatgtggcggaagtggccatgcagtacaatgacagctacaatgagctgctgctttcctttgccaataacatcaataccggcgagggcggcacccacgaggacggctttaagcaggcccttacccgtgtgctgaacgcctatgcccggaaaaataacctgctgaaggacagcgacaagaacctttccggcgaggactgccgcgagggcctaaccgctatcatcagcgtcaagctgcgggagccgcagtttgagggccagaccaagggcaagctgggcaacaccgaaatgcggcaggtggtttccgccatcgttaccgataagctgaccacctactttgaagaaaacccgcaggtcgcccgcaccatcatcgaaaaggccattaccgccagccgcgcggccgaagccgcccgcaaggcgagagaagccacccggcgcaaatctccgctggagggcgtgggcctgcccagcaagctgaaagactgcagcgaacgcaataatgagcgcaccgagctgttcatcgtcgagggcgattccgccggcggctccgccagcgatggccgcgaccgccgtttccaggccatcctttcgctgtggggcaagatgctgaatgtagagaaggcccgcctggataaggtatacagcaacgaaaagctgctgcccatcatcgccgctgtgggctgcggcatcggcgaggactttgacgccaataagatccgctacaataagatcatcattatggccgatgccgatgtggacggcagccatatccgcacgctgctgctcaccttcttcttccgtcacatgcgcccgctcatcgaactgggccatgtctatatcgcgcagccgccgctttataaggtcagccgcggcaagcagttccactatgcctacaccgaagccgagcgggacgcctgcattgccgaactgaatcccgatggcaccggcaaggtggatatccagcggtacaagggcttgggcgagatggaccccgtacagctgtgggaaaccaccatggaccccgcccgccgtgtcatgctgcgggtgaacatggaggacgccatgcgtgccgatgaaacctttaccatcctgatgggcgataaggtgcagcccagaagggaatttatagagcagaacgcccagtatgtcaccaatcttgatgtttgatgacgcagaaaggagccgaaaaaatgagcaaggataaaactcccaacaatatgggcgattttgatgccattaatgaagtagtggatgaggtaaccgctgaaaacagcctgcacaatgagggccggatcatccaggtggagctggaccacgaaatgcgcaagagctttttggaatactccatgtcggtcattgtggaccgtgccctgcccgatgtacgggacggattgaagccagttcaccgccgcattctgtttgccgccgatgaggacggcctgacccccgataagccccaccgcaagagtgcgaccatcgttggtgatgtgctgggccggtatcatccgcacggcgatgccagtgtttacgatgccatggtgcgcctggcgcagaccttctcgctgcgctatccgctcatcgatggccacggcaactttggtaccatcgatggcgacccgcccgctgcctaccgttataccgaggcacggctgagcaagattgccctttacatgctctcggatatcgataaggacaccgtagactggacccccaactttgatgaccagcgcaaggaacctgtggtactgcccagccgcttccccaacctgctgtgcaatggctcggtgggtatcgcggtgggtatggccaccaatatcccgccccacaatctgcgggaggtcagcgacgcggtatgctacctcatcgaccaccccgaagccgagctgaatgaactgatgcagtacattcaggggccggattttcccaccggcggcatcatcatgggccgcagcggcatccgggcggcctatgccaccggccgcggcaagatcaccctgcgcagtaagaccgagatagaggaaatgaagaacggccgggagcgcatcatcgtgcgggagatcccctacatggtgaataagacccgtctgatcgaaagcatcgcccagctggtaaaggataagcgtgtcgacggcatcagctacatcaatgatgaaagcgaccgcgagggcatgcgcatcgtcattgacctgaagatgggcgccaacgcgcaggtggtgctgaaccagctgtacagctttactcagctgcaggattccatcggcgtcatcatgctggcgctggaaaacggcgtgcccaaggtaatgaccctgaaggagatgctggagcaatatctcaagttccagtttgaggtcatcacccgccgtaccgcctacgacctgaaaaaagccaaagagcgtgagcacattctggagggtttgaagctggtggtggataagaccgatgaggtcatctacatcatccgccacagtaaggaccagaacgattccaagctgaacctgatggaacgcttcggcgtgaccgatctgcaggctgccgccattgtggccatgcgtttgggacagctttccggcatggagcgcattaaaattgaggatgaattggctggaatcctggaaaaggtgaaaaacctggaggaaattctccgcacgccttccatggtctatgatatcatccgcaccgagctgaccgccatccgggataagttcggcgatgaccgccgcaccgctatcgaaacggtaagcggtgaagtggatattgaagacctcatccccgagcagcagtcggtcatcacccttacccacggcggctacatcaagcgccagcctgtggaggtataccgcacccagcgccgcggcggccggggcatttccggcgtggcccgcaaggatgaggactttatggaggatatgttcatcacctccacccacgattatgttctgttcttcaccaaccgcggcaagatgtaccgcatgaagggctatgagatccccgaaaccggccgggccgcacgcggcagccatgtggtcaatctgctgcccatcgaaaaggatgaaaagatcagcgccatgataagggtggacgaggtggaaaacgacagctaccttgtcatggtcacccgcaatggcaccatcaagcgcaccgcgctttccgcttaccgcaatgtccgcaagggcggcattatcgccattaacctggaggagggcgatgagctggcatgggtgcgcaataccaccggcgaggatgatcttatcatcgccacccggcagggtgtggccatccgctttgcggaaagcgatgttcgccccatgggccgtaccgccaccggtgtccgggccatccggctggatgagggcgatgaggtcatcgccatggccacctgcgaggagggcggctacctgctgaccgtgaccgaaaacggccagggccggcgtaccgcactgggcgagtaccgcacccagaaccgcggcggccgcggtgtccgcaactacgattgcgaaggcaagggcaccctggtggccggcgtgcgtgtagtgggcgaggaggacgatgtcatcctcattgccgatgacggcatcatcatccgcatcccctgcgagcagatcgcggtgcagagccgctacggcggcggtgtccatgctatgcgcctggaggaaggcagccgggtcgttgccctggcccgcgccccccgcgaggaggacaccgaagaagccgatggggaagagaccgccgagccccaggaagcaagtgatgaaaatgtaaccgaaaccccggcagaagaataaaaagagtctgccgcgccgtgaccgagccgcagcgagaggctgtcagccgcaaggctgactgaggggttgacggcaaatatcaaggcaatcatttcatctcgcctgtcggcgtcgcggagccttttgcaaggcttagttagcacgcctacccgg

SEQ ID NO: 657 - DNA, 5370 bp, Unknown
  16S sequences of unknown bacteria
gggagaaatcgtcaaacgtcgcggtcccaaaattgttggaatagtccgccgccacgcggatggaggagatcgtcttgctcagattcgcctgcttcggcgtgaccgtcccggtgacgaattgccactccgtcgtatccgtattggcggggatgtgctgggattccgccgtgttatccgtgtagaccaggacgatatagaggccgaagaagcgctcgtcccagtcgggattcgtggatttggagttgtagctgggggcggcgttcgccttggcccaggcggagacatggaacgtgctccccgccggggcgttgagcatcaccgtctgcgtcgcccgtttctcggccacggtgttgccgacgacggtgatctccttgccgccggtggagagggcggcgtccttcgtcgctgccggttggcttcccaatttccagtcgccggtgcgggcccagtctgtgaagccgtcgtcaaagcggctgttttgcagcagattcaggtttcctgccgcgccgacgtcctccgcccctgcgcccaggtcggcgttgcgctctaattggatatcatccgcgaaggcgtagcccgcgcagttgcgcatctggacgccgacggtgtagctgccggaggctttcgccgtgaacgtatacgtcagccgctgccagccgtgctgcagggccttgccggtctgggctgtcagggcgatgctctgcccggcatcctgcccgtcggcgctgcgcatcgtgaggaagacgccgccgttttcgtaaaattgcgtgacggcgctggtgttgacatacgctgagagggtatactttttccctgctttcagcgtgacggtctgctgcgcccccgtcgcgacggagacagcgctatgatctgcattgggggcggcggggctgtacatccgcaggtagcgagacccgagatggggcgcggggtggccggtgttcgccgcgccaatggcgctgttgggcaggccgctgtagcccgccggggcagacgacggcgtgaccaccttctgccatgcgtcaaaggtggtgccgcgctcaaagttgccgtcctgcaggaggttggccgcgtgcaggccgccggaaccggcgcgctcgacccggttgttcgtctgggatgtgccgctggtctcggtataggccgccgaggcgatgctcaggacctcctcccggcccgcgccggtggtgtagctcgtgatggtccggccgtagtagtctagcaggcaggtctccatcaggtcgtcgtcggttccggcgatgcggtcggcgccatagtggcggtaggtcgtcttctggcggctgttgctgtagccgtggaagcggtagccgtattggcgggtcacgtcagcgccgtctgtggggatattctggggctccgtcgcggcggaaaattcccagacccgcagctgccgcagggggatggagccgaagttgtggtagacgattccgtagccggattcggcgtcgtaggcctgatacagggcgcacgaggccgccccgccgccggtcagatagcggtagcgggcttgcttgccgtcggggaatgtgatggccgtcaggaacagcttcgcgtcgtactggctgtagtgcagctttgtgacccgcgtcgcactgccgacggtttggcgaatttcagaaaggcagcgattgctgtcataggcaaacgtcatcagctgctgggcgctgccgccgctggggacgcgggtgacaccagtcagccggtggttcgccgtcgtcggcttccagctgctgccgctggcggaataggcggcgttgttatacgtaaagtgcagggcgttgccgttggcatcgcgctgggtgatgaggtaaccgttgtggaaaatgcgctggttatccttcttgtccttcattgtgtagactgttgtgctgccggagacggacttcgtcagcgtcaggttcaggccgttttcgtccttaaagatgctgccgttcttgcggaaataataggctgcgccggtctcgtcgtgatagatgaggtattcctccgtcgcgtccgggttagtgtccgacgacgcttggagccgggatgagatcaccgtctgctgggctgagagcttccagcccgcgccgatgtgcatctgattgtacggcagcgtgtgatagccttgctcggcggcgtcaaaatacgtcccccggtaggcgctgttgtagaccagggacagggtatagggcagaacggcgctggcgctggtggcaatggggttgacgagggtcgtctgcaggtcgtagtccgagacgtagccctggactgctcgtggtaggacagtgccgtctgcaccccggcgttgtgccggtattgcaccagcagcatcggggagccgtaggggttgtctctgctgtagtgcccgttcaggctggcaaagtacgcagcattggccccgtccttggccgccagggtgatggcggcgaacagctcatccggattatttttatcatactgcgtcatcactgcgcgggtgatatcccaggagatatgttgcctgcaggtgctggtcgaaagcgtccggtaatctaacgggtcctgggcgcggccgtagccgccggaaccgtagacatcgttccaggtcatttgcgctgcgtcgccgaccagcccgttcagagcgtaggcgtaaagctgcagcttgctgccggtgggcgcgttggcgtaggtcttcgtaaacaggccgacgtggtcgacgctcagcagcgcgctgaccagcgttgcatttttcggcagcgccgggaggaccatctggacgcatagctcctgctgccccgccgtcgtcaggtagccggcaaacagcgtcgaccggtccccggcctttgctgtgggctgggcggagcggatgtaggtcccgcggacgtagttatccgaccgcaactccaccgtcgggtcgatctgaatgggccaggcgcgggaatcgtcattcatccacgtttcgtccgccgtgaccgtcagcagatagctgccgtccgcctggggcgaaagcgcatagtccgccgcatccgatgtcgccccggcggcgtcttccagatacggcgcagggatgacatagatgaccgcccccgccgcattggacagcagcaccgcgccgtccgaaagcttgggtgtcaagccgtccagcgtcaggcggaaggcatagcagtacgccgcctggggcgctttgacgatgatggcttccttgacgtcaaagccgcaggcggtatacgaaaggtcgatctccggcgcagcgtcctcgtacaaaagaccccgggccagccccgcaggctggacctgctgctccaaagaggccgacgcgttctgcgccgccggaatatccagcagcgtcgcgacggcgtccgagatgcggcccggcttggcgggctcaggatcagacagcgcaccggaggtggttccattgtctgttttatttgatgtgttgtctgcgtcagcagctgcaacgccgccctgggccgggtctgctgcggcgtcattcccttgtaccggggcggcgggggtctccgccggttcgccggaggcggcggactctgccgggtccggggtcacagggcgctcggcatccggcgcggcggcccagtcgcgccccgccagggccatggagatcgtgtaatcccggtagctggcggtgaaaagctcgccagtggataaattctgcgcaaaggacgccgtcgtcaggccgttgtccgcctggtatgcaccctggcacagggtcaattcgttgtcaaggtctgcccactggccgtctgccgtctgcagatgcaccgggcgggcgtattggacggcgagatacgtcccatcgctgagccggaagtgcttctccgcttccccccgcagcgacgtctcctccgccaaaacgtagggggcgtcttcgcccgcggacgatacatctgaagcatccgcatccgcagcgtttgacgcatccgtagatttcgccccggcagcatccgccgcagccctatgtttcgtctgcaccgccgcgctgcccaccttggacaaagcatcttcgcgccgcgccaacgtcacggcctggtcaccagcctgtccgctcgtctgcgctgtattcttacgaccgtcctgtgcggtggacttgcttccgtctgctgcagattggccgccatcgtacactgtagcgtggctactctccgccgcctggccatccgccgcatcccgggcgtagaccgggaccagctccgccagcatgaccgccgccagcagcccggcaagccatcttctccagattcctccgcgcttcatcctcattccgtgttccatccggatcccggttttcatcctcattctgtgtttcatcgtgtgctctccttctcttgtaggtcgcatttttcagcctgcttgcgcagtctcaaccacgcccgccgccacaggattttaggggatttgtcttatcataccacattttcctccccttgccaattacagtttggttacagtttccaaataaaacgcatttcatgccgaatagcgcgctgatacgggcatagatcgctgatttgtgggaaggctaagcacagaatagaacgaaatgagggagtttcatgtgcactgctgtggcgtatcaaaacggcgcgctttattttggccgcaacctcgactatgaggtgacctacggcgaacaggtgacgatcctcccccggcactttccgctgcacctacgctgcgggccggtgctgcagcagcactatgccatgattggtatggcccacgttcgcgatagctacccgctgtattatgacggctgcaatgagatgggcctgtgcattgcggggctgaattttccaaagagcgcggtctatgcagcgcccggggcggggcaaaatattgcagcctttgagctgatcccgtggctgctggccacggcgaaagacctcgcccaggctaaggcgcagcttgcagcctgccgcctggtgggcacgccgttttcgcctgacctgccgacggcccaactacactggatgatcgccgacgagaccggctgcattgctctggagtccgggccggccgggctgcagatctacgaaaacccaacaggcgtcctgaccaatgagccgccgtttccgatgcagctgcgcgccctttccgcctaccggggcctctcgccgcggcagccggaaagcacctttgccccggacctgccgctgcccccggacagccgcggcatggggaccgtcgggctgccgggagacctctcctcccagggccggtttattcgggcggccttcgtccgcgccaattctctcgcgccgcaggaggagaccgccagcatcgggcagctgtttcacattctggatgcggtaacccagccgcggggctgctgccaggtcgcccccggcgcgtgggaatacacccaat

SEQ ID NO: 658 - DNA, 14661 bp, Unknown
  16S sequences of unknown bacteria
gcgcccaccggcgacatcggccatgccaaggcgaagtccatcgccctgaaccacgcgggcgtgagcgagaacaaggcgtatgacatggagatcgaactggacgacgaggacggtacgctcgtctatgaggtcgagttcaaattcggcggcatggagtacagctacgagatcaacgcggccaccggcgcgatcctcaagcacgaggcggagttggatgactgaaagaaaaggcgcgagccgctgcaatacagcggctcgcgcctttttacggtttacgggttatacagaatcatgtgcagaatagtggtttggtcagagatgttgcggtatggcgtcttttttatttggtattctttcatcctttatagcgttttcaacacatcggctacccgtcggcagtggttagggaacagttcccgcagctcctgtacggcgttatccataatgtaagggtgtcctaccagtgagagaatgggaatatcattataattatccccgaaggacatcacttcctccggttttactcccatcgcatcacagatgatcctcagtccggagcctttatccgccagggtaaagtcgatccactggtccccggctaccgccacctggaaaatctctccccaacgctcccggaagtgctcgatcaccgcaccggtgccgcggcggctgaaggccgaaaccttaataatggtttccggaatgtcgtcagggtcatccactacctcggtgatatttcccacatcctcccgcatgtggcgcagatattcctcatcgcgggtacatacatagcaggtgttttcaccgcttgcgttaatctcgcactccggcatcgccataatatcccggcacagctgtaccgccagattgcgttccagcggcaccttgccccataccgggcctggattgcccggcccaaacaccaccgagccattctcacagatataggcgatctcatcctgcaccggggcaaacagccgccgcaggctgtggtactgtcggccgctggccgggcagaaaaggatccccttttcccgcagacgccggatctcctccagcgtttcggcgtcaattgatgtttcctcgccatgcagcagcgtaccgtctatatcgcaggtcaccagccggatcatcttctcgttcctcccttttgccgttttaccggccatattatagcacagcctgcccatttcggctacttccgacttttacttttgcgcatattggcgaatatattgtgctttttgtccaattttcagtaagtgttatagttataaatgtcataattgacaaacattagactaagtactataattaagtaaagtttaagcaaagtttatgtaaggtcattatcaaatcatttttcggtaatcgccgccctggggcggtcattataaaacgacaacttatggaggagaaaaaaatgaaaaaagcactgtctatgttgctggccatcatcatggtcctcaccctgatggtcggctgcggcgagaagcccgctcccactcccaatgaggagctttctgccgttcagcagatcatcaaagaagccgaaggcatgaccctcgaggagctggccaagaaggccatcgaggagtccaacggcaagaccttctacggcgtcggcaactccagccgcggcaagagcgccctgcctctgttcatcgagtacctgcagtccatcgactccagctacaccctgaactttgagtggcagcagcccaagaacaacaagatctttgagcagctcaccgctgactccctgaaggagaccggcacctttgccatgaccctcattcaggatggcaaccagatcgagagcaagatggtcaagaccggcgttctggataccttcatccccaaggattgggctgacgccaacaacaccaccgccgatgcctatgaaggctatctgcccctgcagaccctcaataaggtctttatgtataactgcgtcggtgaaaaatcctatgataatgtttgggatttcgtagccgagggcgagcatggcctgttcatggatattgattccgagatcgtgggcaagaacttcctgtatatgcttacccgtgatgattattccaccatgctcaagaccgcttttgaggctctgcccgctgaggagcaggcctacttccagcccaccatcgatgccatggctgccgatgccgcgaacctcggcctgaccgagaacgccaagtacggcctggcctggatcaagctgtgggtcggcagctacaatgcccagaccgatgacggtcccatctgcaataccctggtttccgattccgccaaggatcagttcggccttctggtttactccaagctccgctccgttgaggaatccgctaccgtttccaagaacaacatcaaggttgcagcctatcaggatggctacaccggtctcggcggctatggctactgccattacctgtttgttaccgataacagccccctgccctggactgcctgcgcctttatcgcctacatgacctgcaccgttgacggcttctctgcctggggcaaggatatgggcggctattcctccaatccgaccgttgctgccggcaccgaggagaagtatcatcatcaggagggcggctatgttgacggcgtcaacaccttcgactgcaagaacgaccgcggttatgaatggtgggccgataagctggtccttgaggatcccgaatactgcgcttctgttgccttcaccgtaggcagctggatcgaggttctggataagtacagcgcgggctgataaaatcaccacgcacttatctttgcgatctgttaagaagtaaagagcgcgcccccggatcgcgtccaaccgccgcgccgggggcgtttcccttttgcagcccccactccccacaagagaggtgattccctaccatgaaacaagccgcagttttgcaggccaatcccgccgccgtgcggcgcaataaggtcaagaccttcttttccaagcctcacaatgtcatcctgctgctcatgggcattgtgctcaccattaccacggtagcgcctatcattgccatcgtgcaggataccttcaagatccaccccggcaccattgatgcttacctggccggcacctcccagggctacaccctggtcaattacaccgacctgttcaccagcccgctggccaaggccaacctgtggacccccctgctgaataccgttctgctttcggtcggctcctgcatcgtggccattctgttcggcggtgtgttcgcgttcctcattacgcgcaccaatctttcctgccgcaaatacttaagctccatctttatcttcccctacatcatgccccagtggaccctggcggtggtgtggcagaacctttttaattccaatgccgttaccggcaccagcaatggtctgctcacctctctattcaatgtccagatgcccctgtggtggtgcaaggggctcttccccagcttgatcgttctgggcatgcactatgcgccctttgcctatatcctcatcggcggcatcttccgcaatatggatgcgaacctggaggaagccgccaccatcctggatacccccaagtggaaaaccatgttccgcatcaccctgcccatggtaaagcccgccatcctctccaccattctgctggtattcggcagctccatgggctcctaccccgtcccgcactatctgggacttgccaccctttccaccaagtatgtatccatgaactccaagtataccggcgaagccagtatccttgccatcatcatgatgatcttcggcgtggccatcatgctgctcaatcagcgcagcctgaagagccgcaaaaactacaccaccgtcaccggcaaatccggccagatctccaagatcaacctgggacgcaccggtcgcgtggtcatcgccgtcatccttatcatcatcaccttcttcaccagcatcttccccatcatttccttcgcgttcgagaccttcctgcccaaccccggcgattacagcttcctgtacaccggcgatgccaataacctgaccaccaagtggtgggtcaccagcgagaatgtgaccgaaaacggcatgtacgggcaaaagggcatcctctacaacaacaccatttggacggccttcaagggcaccatgctcgtcagcgtcagctgcgcgctcatcgccggcaccatcggcactcttatcggctacgccgtcagcaagaaccgccgcagccgctgggctaactatgttaacagcgtggcgttcctgccctaccttatgccgtccatcgcggtgggtgtcgccttcttcatcctattctccaatcaatactttaacctgttcaatacctacgctctgcttatcatcgcgggcaccatcaagtacattccctttgccagccgcagctcgctcaattccatgctgcagctctccggcgagattgaagaagccgccgtcattcaggatgtcccctggatcaagcgcatgacccgcatcatcattcccatccagaagtcctccatcatcagcggctatctgctgccgtttatgacctgcctgcgcgagctgagcctcttcatgctgctgtgcgtccagggcttcatcctctccaccacgctggattactttgatgaaatgggtctgtacgccttctccagcggcatcaatctcatcctcatcgtcaccattctcatctgcaatgccctcgtcaataaggtcaccggggccagccttgataagggaataggaggttaaaccatgccagagatcaaacttgaacacatcaccaagcgttggggaaaattctacgcggtggaggacctgaacctcaccatcgccgataactccttcgtcacactgctgggcccttccggctgcggtaaaaccaccaccctgcgcatgatcgcgggcctggaaacccccaccagcggccgcatcaccatcggggatcaggtcgtattcgatagcgccatgggcatcaatgttcccgccaataaacgccgtgtcggcttcctgttccaaaactacgccctatggcccaatatgaccgtttacgagaacatctcctttggccttaccaatgtcaaggaggacctgcccaaaattgatttcgacacccgcgtcaacgcccgcctggcggagatcctctctgcccccggcgaggtgaccaaggtactggcggaatgccgagacaaaaagggcaagctggatgacaaaaaagccctgctcaagctcatcgatacctttaccatcagccagtttactgccaaaaagctattgggctaccacttggaagatggcaaagatgtcagtgccgaagccgccgccctgcgagaaaaggcggaagccgcccgtaaagcactggaggccaccggcggcagctacgatgccgattatgccatctataaggacggccagcccgtcaccgaggtgcgcaagctcaccaaagaggaaattgacctgaccgtgcgccgtgtggcccgcatcgtcaagattggcatgtttatggaccgctaccccgccgagctttccggcggccagcagcagcgcgtcgccatcgcccgcaccctggcgccggagccctccgtcctattcatggatgagccgctctccaacctggatgccaagctgcgcctggaaatgcgctacgagctgcagcgtctgcatgtcgaaaccggctctactttcgtctatgttacccacgaccagatggaagccatgaccctcgccacccagatctgtctcatcaataacggtgtactgcagcagtaccagccgcctctcaccgtctacaaccacccgcagaacctctttgtagcggatttcgtcggcaatccctccatcaactttgtggaggccaagggcgcccagcagccggatggcagcatcactctcgatattttgggcggtgtcaaggccgtattccgtccccgcgagggtctggatctcgccgcctggtttgccgagcgtgaccgcaaggccgccgcgcacgccgccgagcgtctggccaaatcgcaggaaaaggactatgtggaaaagggcaacaaggacgaacccttccgctaccacatcgccaaggtcgaggaggaggacgactccctgcaggaggaacccgtcctcaccaatgaggatctcgttctcggcatccgtcccgagttcctcaacatcaccagtgaagcccccctcaagggtgaaatttacggcgccatgcccaccggtatggaatccaccatcaaggtttatgtcaatgggttcctgctcaccggcgtggtattcggcagcagcctgttcaccatcggggagcagcacagcatcagctttaccggccaccacatcatgctgttcgaccgtcaaagcggcgactgcatcgctctcggctctctggaaaccctctgatttctcctccctatataaaaagcgcccccgtcccggattgggatgggggtacgctttttttaaatttccgcttgccgcgcaatccagcgtgcgctccttccgcttaccgtcgcaccgcccccgcttcgctgggggggcggcgctccccgcttcaggagcgcacacccgctttctgctgcttattcgttcagatcttctctacacccagcgtggccttttcgccgttcaggtcccactccttggtatagcccacaggggtacccaccgtcaggctctctgccagcgtcgcgccggtgatctccgcctttctcgcttccgccacagcggtcaccttctcgctgccctccatggtgatgcggatatgatctgtcacctcgaagcccgcttccttacgcatggtctgcaccttgctgatgatctcccgcatgaagccttcctcgatgagtgccggggtcagcacggtgtcaatggcaacggtgatgtcacggtcggatacggtatagaagccctcccgctgcgttgtctcgatcagcagatcatcggcggtcagctccaccggcccctcaccaaagtcaaagctcagcttgccttcgctgtccagaatcgccttggcagcacggccgtccaggttcgccagcgcctcgcggatcttgcccagctgcttgccgtacttggggccaacagtcttcagctgcggcttaaagttgtagctcacaaaaccctccacctctttggtgaagatgacctccttgatattcagctcctcccggatgatatccatatagaagccgtccaggtccttatcggccttcacatacatctcggccagcggctggcggttcttgcggttggcgccgttgcgggcggcgcgtcccagctccacgatgcggatgatctcatccatcttgctttccagctctttgtcgatccacttttcctccacggtggggaagtcgcacaggtggatactctcgggcgcggtcttatcgatgctccgcaccaggttctggtaaatctcctcggcaaggaacggtaccatcggggcggcggtcttggcgatggtcaccagcgccgtatacagcgtcatgtaggcggccaccttatcggcctccatcccgggcgcccagtagcgctcacggccgcggcgcacataccagttgctcatctcgtccacaaagccctgtagggcctttgccgcctcggggatgcgatagttcgccaggttgtcatccaccgcctgtacggtgctgtataggcgggaaagcagccagcggtccatcaccgtcaggtcgtcggggttcagggtgtattttgtcgcgtcaaagttatcaatgttcgcgtacagcacaaagaaggcataggtgttccacagcgtaccgatgaacttccgctgaccctcgatgaccgccttgccatggaagcggttgggcagccacggggcggaattgatatagaaataccagcggatcgcgtcggcaccgtaggtctccagcgcctcaaagggatcgaccgcgttgcccttggatttactcatcttctgcccgttttcgtcctgcacatgccccagcacaatgacattcttaaaacaggcccggttgaacatcagggtggaaatggcgtgcagcgaatagaaccagccgcgggtctgatccaccgcctcgctgatgaagtcggcagggaactgcgcctcaaacagttccttattctcaaagggatagtgatgctgcgcgaagggcatggagccggaatcgaaccagcagtcaatgacctccggcacacggtgcatcttcttgccgcacttggggcagcggatggtcacggcatcaatgaaaggacggtgcagctcgatgttctcggggcagtcgtcgctcatctccttcagttccttaatggaaccaacggcatggcgctcgccgcattcgcactcccagatgttgaggggggtgccccaataacggttgcggctcaggccccagtcctgaatattctccagccagtccccgaagcggcccttgccgatgctttcggggatccagttgatggtattgttattgcggatgaggtcatccttcactgccgtcatcttgatgaaccagctctcgcgggcatagtacagcaggggggtatcgcagcgccagcagaagggataatcatgctcaaacttgggggcatcgtacagcagaccccggctctccaggtcctccagtaccttggggtcggcgtccttcacaaacagccccgcaaagggcgtttcctcggtcatatggcccttgccatccacaaactgcacaaatggcaggtcatagcggcggcccacctgggcgtcgtcctcaccaaaggccggcgcgatgtgaacgatgccggtaccgtcgcccatggtaacatagtcggcgcaggtcacataaaagccctttttcttctgcttttcggcgcactcggcagcgcaggtgaaaagcggctcatattccttatattccagtacggtgccgggcatctcttccagcacctcgtaggctggggcgtcctcggtcttcagccgtcccagtacggtatccagcagcggctgcgccatgtagtaggtgtagccatcggccgcctttaccttacagtaggtgtccttgggattcacacacagcgccacattactgggtagggtccagggggtggtggtccacgccaggaagtacgcatcctcgtcctttaccttaaaacgcacaatggcactgcgctcctttaccgccttatagccctgcgccacctcgtggctggaaagcggggtcccgcagcgggggcagtagggcacgatcttaaagcccttatatagcagcccgcgatcgtaaatactcttcagtgcccaccattcgctttcgatgtagttgttatcataggtgacataggggttatccatatccgcccaaaagccgacggtgcgggaaaaatcttcccacatgcccttgtatttccacacgctttccttgcagtgcgcaataaagggctccaggccgtatttctcgatctgatccttgccgtccagccccagcttcttctctacctccagctctaccggcaggccgtgggtatcccagccggccttgcggggcaccatatagcccttcatggtgcggtagcgggggatcatatccttgataacgcgggtaagcacatgcccgatgtggggcttgccgttggccgtgggggggccgtcataaaagacatacggggtgcccttcttgcgggaatcaatgctcttttcaaagatatgctcctcttcccagaaggcctctatcttcttttcctgctccacaaaattcacattgggagaaacgctctggtacatttcgtatttactcctttcgtcttgccattccttttgtttcggtctgcggcagggcggtctttcggcttaccttcccggcggcacggcaaaaacggtgttgggctgcgttgccttgcccatcatccgtttttcccttgctccgccttttcggtctaccaataaaaaccgccccatcccataacaggacggagcgccacgcacttcgcttatcaaccacctattacgccgcacagggtatgcgggaacccgctaacgggggatatccggagagccctactcaccaattcggcgttcaggcctcagctcaggagtgatcttcccgcaccggacttcggcgccgcgctttcaccatccgcggctcgctatggcctttgtcatcgggggtactgtctccgtcacagccttttattactactattaacgggctcattttagcatagttttaccgggattgcaacccctcctccgctatgctataataaaattagactatattagtacgaaatggaggaaccaaatatgaaactggccgaagccttgcaggagcgtgccgatctcaaccgccgcatcgagcagctccgctaccgtcttagtaataatgtcctggtgcaggagggcgaaaagcccctggaggaccccgccgccttgctggaagaactggaaagctccttcacccgcctggaatggctcattgcccgcatcaatctcaccaactgcgccgtcaaggtcgaaggccgctccctcaccgagctcatcgcccgccgcgatgtgctctccctgcgggcggaagcctaccgccgcctggtggaggaagccagccaaaatacccaccgcgccacccgcaccgagatcaagatcctttccgccgtcgatgtccccgccctgcagcggcaggccgatgatgcctcccgcgagctgcgccttctggataacaccctgcaggccactaactggaccgccgacctgatggaataagcagaacggcacagtggtagctttcgggtgtgggcgtgatctccgcgactgagaatgagttcgcaagcattggttgtgcgagggcagcacagggttcgattccctttttcatcgttatgccccaatcgtgtatccatgcattgttaatgcttcatcgttactccctatcgccgaccgaaagtgagggcgggtacggggctttgccgtttataaagaaagtccggcttcggccgggctttttcctttccctcctgctcggagggagggaacctttcataagatacaagtaagggggaaccctctcttgcggggttccccctctttgcaaaacaatccgccggatcattttacaaattcaacccctttcggagcgccctccggtataggggatttcgcgctctgcggagcgcgcccaaatgcgctgcctttggaaaccgcaagccttttataaaaggcttgaccgaaaatttcacatctctatatcaaaaggctccccgcctctcggcagggagcctcgccttttacttacgcctcgttcttcttttcgccgttcagccggttgatctcttcctcctccagcacacggtaggccaccttgcccaccagtgtcttgggcagctgctcacggaattcgatctcatacggcatcgcgtatttcgcgatattcttgcggcagtacgccatcagaatatcccggtactcgtcgcagggcttcaggcccggcttcagcatcacaaaggcctttaccttctgcatcttcaggctgtccggcacaccgataacacagctcatctgcaccaggtcatgcgcgtccagaatgttctccagctggctgggatatacattgtacccgctggtgatgatcatgcgcttgatgcgctgcttgaagtagataaacccatcgtcatccatataacctaggtcaccggtgtgcacccacacccgcccatcgggatgggtctgcagggtctgtgcagtctcctcgggatggcccacatattccatcatcacggtcggaccgctgatgcaaatctcaccctcctcgccgtagggcaggctctcctgggtaccgggcttcacaatgtcataataggtatcggggaacggcaggccgatggagccctccttcgccatatgggtgggagtcaggcagctggcggtcacacactcggtggtgccgtagccctcccgcacctgaatgaccgcgtggtggtcaaacaggaacttgtcaaaccgctttttcagctcgatggaaaggctgtcgccgccggagaacacacccttcaggaagcttaggtcggcgccgtccatggtggggacacgcagcagcgcctcatacagggtaggcacgccggctataaagttgcacttatgcttcaggatcagcttggcgtagctctggggggtaaagcggggcaccagcacgcaccggccgccctgggagagcatcgagtgaatggaaacgcccaggccaaagccgtggaacatcggcatcacggccagcatcttatcgccggggcggaacatcgggttggtggcaatgatctgctgccccagcgcgttaaagttgaggttggaaagcaggattcccttggtaataccggtggtgccgccgctatacagaataacggccgcgtccttgccttccttcttcaccttgtacttccagcggtagcggttgcccatctggaaaaactctttccagcggataatgggcgcgtcggccgggatcttctggatctttctgccctcggtcagcatatagcccaccttgatgggcttggaaagctcatccttgatgctggcgatgataacattattcaggctctccacattctgccggatggcctcaaacttgtgatagaattgatccagcgtcagcgcgcagatgctcccggattccttcaggtagaattcgatttccttctcgctggaaagggggtgcaccatattggcaatgccgcccaccaggtttaccgcgtagaacataataacggtctgcgggcagttgggcatacagatggtgatcttatccccttcacggatgccgatggccttcagggcacgggcgcacaggtttatctgctccacaaactttttgtaggtggtgctgcggcccataaagtcataggcaatatagtcaggatatttctcggcgatcttctccaccgcctcatacatacttccctggaagtaatccagcgtcgcgggcacatcgcccaggttggcgatccatggggttctggtctcagtgatggtcatagtctacctcctcattggcggggcgctccagcagttcagggtgctccagcagatatttcagcagcttgatgctcttggaataataatagccgtccgccaggcgctcatctatggtcagccccaggtccagcgtctcacgcatttcatagctgccgtcagcggtaaagtagggcgccgtcttcttttcgcccacaatgcagaacagcgagcaggtgccccagttggtcagatggtggtagccgcacttcagcccaatggagccgagattggaaagcaccaccgaggaataataggggtcgctttccaccatgcttttgggcacccagccgtggcggtccagccagcagatggtcttgatcgccgttttggaaagccagcggggcatcttgttcaggatatccatagcgccctcggtagagtcccccgtttcctcgctgcggcagttcattatcttcttaaagagctgctcatgcagggtgtccaccgtttcctcatcctttgcgtggataaaggccagcgattcgccgccgttatcgctgaatttcttcttgacgataaaggaggcggtcacctcattgcgttggtaaaagttgcagttggcaataaagcggttcagcttcggccgcagcgtaatggtcttgataagcgccgcggtgatgatgtgaaacatggtataggggaatacttcctccccctcgttcttctttttcaggtactcattgatgggggtcaggtccacccgcagcccaatgtaggcctcattatcgcagcggttcgggtagataatgcccgtaatgtagtgcagggaatccagctcccgcagcaggcgcccgtcccggcggtctcctctgcggcgtttatactgctctgccattcgtagttactccttttcttctgtctttttccctaaaagcccgcctaccgcgccggtcaacagcttctgcgccttctcggccatctgccgcagcgttacccgctgggccgtcagccaatcgtagtacatcgaaagaacgccggaaaccgcgaaatccgccgcagcctccacatcctcctctcccacctcggcaccggcattttccgttatctcatccttcaccatcttggcaatggaatttttcagccggtacatcaggaagtagcgggagcgccggttttccaggtagcaggagtaggtctcgtgctcctgcagggccttgtccacccggctcaggatggtataaaggtcgtgccggttatcccagatgtcgctttgcgccagctgggccatcacccatccctctatctcgttttccagctcctgcagcgcctcatccacactggcatagtgcaggtaaaatgtctttcggctgatctgcgctttctcggtcagctccgaaacattgatctgggaagcgtccttttggttcagcagtgagagcagtgcgcagcggatagcctcccgggtacgcagcatgcgtttatccatgggctggctggccgttgtcatcgctctcactcctttctgggaaaaatctaactttccatgcttttcgcgggcgcggttcacccccacggaagcatcgtaaggccgattataatacacacagtgtgtatttgtcaatttatccccccgcacttttcacccaaccttcacccaatggggtgctttccgccccccgccgccccctgcaaaccgcaaaatccgggccgcaggccgcccgccgcccagcggcgggcaaacgggc

SEQ ID NO: 659 - DNA, 2008 bp, Unknown
  16S sequences of unknown bacteria
gggatgtatttgcccggcacgccggcaccagtggttacaacgcccacgccttcttccactacaatctttgcctgctcctccacctcagggttcatcagcatcagattgacaccgaagggacgatccgttaattctttgcagcgacggatatggtcccgcagctgcgcggcgttcataccgccggcacctacaagtcccagagcaccggcattgctgactgccgcagcaaactcaccggtggcaatgctggccataccgccctggatcaggggaaattctgtaccgaaaagttcatttaatttcattctgtttcctcctcaccaacgcagcaatgctccggcccaggtcagtcccccaccaaatcccaccagcagaacacgcatgcctttgcgcagtccgcccgcgcgctgcagctcgtccaacgccagcgggatgctggcggcagaggtgttgccgcagtgatcaatattctgataaaaaagtgatgcgtccgccctcaggcgcttggccaaaaactcggtaatccgggcgttggcctggtggcagacgatccagtcgagatcaccaatgccaatcccctcctgttccagcagctggcggacggatttttccgccacctcgacagcaaaacgaaacaccgcctgcccttccatatgtacagcagccttttccggccccggtccctgcacgcggatactcatatcatcgccccggctgccaaaaactgtatgccagcatgcatcctcgcggcggcgcaccagcacagcgcccgcaccgtcgccgaagagcacacaagtgctccggtcgtccatatccaacacacggctgatcacctcgcaccccaacaccagggcatagggccgggatgccccagaaagcaggctgtgggctgtgtgcagcgcgtatacaaagcctgcacaggctgcattcagatcaaaacatatggtatcttccagcagtcccagctcccgctggagcaggcaggccgtggagggactggcaaaatcgggcgtgaacgtagccaccaggcacacacccacctcttccggtttcacaccggcacgttccaatgcctggcgagctgcctgcgccgccatagcgacgccgttttctcccccgctgcagtgacggcgagaatggatacccgtacggctgaatacccattcatcgctggtatccacccgctgggcaagcatttcattggtgaccacttgtgtgggaacacaactccccgtggacaggatctccggtgcgctcatagttgctcctttcttgcctgtcccaacttctggaaccggcgataacggctctccgccaatttttgcccgctcagtttcagcagcggccccagctcccgccacagcgccgcatccacggtacggaaggtcgcttcccaatcggtctgtgctccgccgggcggttcgggaaggacttcttccaccacaccgccctggtacagatcgtgcgcagtcaggtgcatcagtttcgccgcatcggcactgcgggcagaatctttccacaggatcgaggcaaaaccttccggactgagtacagaatacaccgcatgctccagcatcagcacccggtccgccacagccagcgccaaagcgccgccgctgccgccctctcctgtaaccacagtgagcaccggtacagtgaccccactcatgctggcaatacagcgggcaatcgcctcgccctgaccatgctgctcggcttcttttcccggataagcgccgggcgtatccacaaaggtaatcaccgggcgatgaaaacgctccgcctgttccatcagacgctgcgctttccgataaccttccggggaaggcatgccgaaacggcaggtgagattttcatccagattttttcccttgcgatggcccagcacggtaaccggaatcccgtgaaaccgggcaatgccgcccaggatcgcgctatcctcgccgccgcagcggtcaccccctgtctcttatacacatctccgagcccacgagactaaggcgaatct

SEQ ID NO: 660 - DNA, 4344 bp, Unknown
  16S sequences of unknown bacteria
tataaggtgtgtttgcgaggcacatgtcctcgcaaacaccgattggtaacccgcccccgcttttttcgttttccgaatggcggattccccttttttgacagactgcaagccccggcggatttttccgccggggcttttttggacaggctggttcttgacaacggcgcttttgttccttataattagcatatcaactattagggtgctaatcattcgcctgcaaatgattagcaccctaatgattaaatcgcgtatactgataaagaaggcggcccccgccggacaggagacgacatatgaaaacgccctttcacctgctgctgattcgcacctatcacgcacagaaaaaccggctgcgccccgagatggcggggatcggcctctcgcccggccagccgaaaatcctcaaccgcttgatggagaaggactgctgtatgcagaaggagctggccgaatcctgcgacattcagcccgccaccgtgtcccgcatgctggacaccatggagcaggcggggctggtctgtcggcaggaggaggctccccgccgccgggcggccagcgtggccatcaccgaggcgggccgggaggcccatcggcagtggcaggccatctgcggccgggtgggcgaggtttccctggccggctttaccgaggaggaacggcagcagttcgcggaatatctccgccggatgtaccgcaacctcaccggccgggagatcgacgcaggcgtgtagaacaggaggcggcttcgggtatgttcaagcgattttgggcctatttcgggccttataaaaaatatctggtcatcagcagcgtctgcgtcgttttggaagggacgttcgagctggtgattcctctgatcatggcggatatcatcgacgtgggcgtggcggcccgggacacggggtacatattgggcaaggggctgcagatggtgttttgcgccctggtttccctggcgctgggtgcagtctatgcccgtctggccgccctggccggccagggcttcggtgccgagctgcgccgggcggaataccagaaggtgcaaagcttttccttttccaacatcgatcggttcagcacctcgtcgctggtcacccggctgaccagcgacgtcgccgtcctgcagaatgcggtgtgcaacggcatccggccgctggtgcgggggccggtgatgatggtcaccgccctgaccatgtcgattctgctcaacgcgcagctggcgttgattttcgcggtggccattccgctgctcgcggcggcgctgttcctcatcctgcgcaagctgcggcccgcctatggccggatgcagcgggcgctggacaaggtcaactccgtggtgcaggagaacctgacggccatccgggtggtgaaatcctttgtccggggcgattatgagtgtaaaaagttccaggatgtcaatgaggactttcaaaagaccagcgagcatgcgttccggttcgcggcgctgaacatgccctgcttccagctggtgatgtacgccaccattgtggcgattctatggttcggcggcggcatggtgaacgcgggcagcatgcaggtgggacggctgaccggctttctcagctatgtgctgcaaatcctcaattccctgatgatgatttccggcgtgttcatgatgctcacccgttccatgacctccgcctcccgcatcgcggaggtgctcgacgaggtgccgggaattccggccgccgggcgggaaggcgcgcgggtggagcggggcggcgtcgattttgatcacgtgtatttcaagtatgccgatacagcggcggaatatgtgctctccgacatctgcctgcacattgccccggggcagacggtggggatcttggggggcaccggatcggccaaaacctccctggtgcagctcatcccccggctgtacgacgtgtcggggggcacgctgcgcatcgacggtatcgatgtcaaggactatccggtggaccatctccgggacgccgtgggcatggtgcttcagaagaataccctgttcaccggcaccatccgggaaaacctcctgtggggcaacgagcaggccggcgacaaggagctggcctgggcctgccgggcggcctgtgccgatgagtttatccgccgtctgcctgaagggtacgagacgcatctcgggcaggggggcgtcaatgtttcgggcgggcagaagcagcggctgtgcattgcccgggctctgctaaaaaggcctaaggtgctgattttcgacgattccaccagcgcggtggacaccgccaccgaagcccgcatccgggaggggttggccgtcagcctgccggacaccaccaaaatcatcatcgcccagcggataagctccatcgagcacgcggatcagattgtggtgctggacgatggacggatacaggataccggtacccacgaggaactgctggcccgctgtgcgatatatcaggacgtctgggcgtcccagaagaagggggcgacggcgtaatggcgcggaccatgcggcacgaaaagcccaaaaatttcggtttgactctccggcggctgctggcttatctgaagcggcataccccgatgcttctcctgatttccctgctggtcctgatcagcgcgggggccaacgtgttcggcacctatctgctcaagccggtggtcaaccggtatatcctgcccggggacatcggcggccttatccggatgctggcgtttatgggggcgatttatctggcaggggcggcggccaccttcggttactcgcagctgatggtgaagaccgcccagcggattatccgggagctgcggcaggatttgtttggcactgtccagaagctgccgttgagctatttcgattccaaaacccacggggagctgatgagccggttcaccaacgacatcgataccatcgcggaatccctgaacaacagctttaccgccctggtgcagaacacggtcatgattgcgggcaccctgacggtactcctggtgctcaactggaagctgggcctgattgtcatcgccacctttggcggcatggccctgtttctgcggtacagcagcaagaaaagccacgcccacttttccgagcagcaggcctatctcggcagcttgaacggcttcatcgaggaatcggtggagggccagaaggtggtcaaggttttcaaccatgaggaaaagaacctggaggaattcaccgcccgcaatgagaagctccggggcgcggccacccaggcgttgacctattcgggcctgatcatcccggtggtggtcagcctgtcctatttcaactatgctctgtgcgcgtgtatcggcgcgttctttgccatcgcaggggccatcgatctgggcagcctggcgtcctacttggtctacgtccggcaggccgccatgcccatcaaccagttttcccagcaggtgaatatcatcatggccgccctggcgggggcggaacggattttcgacgccatgtcccaaacgcccgaggtggacgagggcgacgtcacgctggtgaaaacagcggacgggcaatgggcctggcgctccccggagggcctggagcccctgcggggggacgtgcgcttccacggcgtcagcttcggctaccggccggatcaccccgttctcaaaaatatcgagctgtacgccaagcccgggcagaaaatcgcctttgtcggctccaccggcgcgggcaagaccaccatcaccaacctcatcaaccgcttttacgaggtgacgcagggcgtcatcacctacgacggcatcgacgtgcgccgcatccgcaaggacgatttgcgccattccctgggcgtcgtgctgcaggattcccatctgtttaccggtaccatcgcggataacatccgctatggccggctggacgcctccatggaggaggtgatcgccgccgcccggctggccaatgccgacggcttcatccgccgcctaccccaggggtacgataccctgctgaccggggacggggccaatctgagccagggccagcggcagctgctgaccattgcccgggcggccatatccgacccgccggtgctcatcctggacgaggccaccagttccatcgacacccgaaccgaaaaactcatcgaggcgggcatggatcggctgatggaaaaccggacggtgtttgtcatcgcccaccggctgtccaccgtgcgcaacgccaaggccatcatcgtgctggaaaacggcgaaatcatcgagcggggcagccacgacgagctggtggcgcacaagggccggtactaccggctgtataccggccagttcgagctggaataagcggtgaattgtcaaactaagagcaacaggaagtgagttcaagaacccataattcct

SEQ ID NO: 661 - DNA, 5493 bp, Unknown
  16S sequences of unknown bacteria
gaggagcagagggcgtttgggtaggggcggcggaaggcgtttgggtaggggcggcggaaggcgtttgggtaggggaaacggtggccagcgccaccggctcgctgggcgcggcgggcccgcccaaactccttactacgccaaaaacagccagcgcggcggccagcgtacttataatggcgatgcggcggcgtttttttcgtattttatctcgattggtcctgcgcttatacggcgtaccgcgtctttgcatagggatcccttctttcctgaatgatggcaagggcggccgtacccggcctgcccgatgttgtacttattagacggacaagacggcaaaaagtttcaaaaatcgacaagaaaatttttgataaaaaaagagcgcggcaggtgccgcgcccgagcaaggggatcagcccttgcgcaaaagatcttcgggaatggatttttttaggactttggtggcaaaggggaaagagagcacatacagcacaaaaccggtaaagatgatgagcccggaggtggtataaaagctgagcacgccgaaggtatccaccataaagccgcccaatagagagctgcaaatcataccgatggccgtggccatgcccaaaaaggtttgggcagaggaggccaagccggacggcgccaggcggaaggcgtattcgatggttgtgctgaaatacaagccggaagccaggccgccgatcaaaacgacgaggatgacggtgatgggtgtgctgacaaaattatagcaaatctgctctatggccagcaggacgcctacgccggccatgagctttggcagctcgatgcggcgcagcaggataccgccaagcagcaaaaacggaacctccgttaagctgcgcagccccatgaccgtaccagtaaagttggcatctatttcgaggtgttccagcagatagggcataaaggtggtggtgcagttgaacatcatctggctaagcagcacatagcccagcagcacgacaaaatagtaatttttaaacaggcggaaggggttaagctttttagcgctctccaccgctttttccataacgtctgtcgtatcctgagagggaaacctgcggttgagccgcatggccatcgcgcagacgatgacgctgaaaatgccggccaggtagaaggcgatggaaacatccgtcatactggccaaaacggacatgcctacgcagctgaccgtccaccccagggagccaaacaagcgcaccgagccaaacggaaccccggtgcgggtggtgttttgcatggtccaagcgtccaagaggttttgcgagcagttgcgcacaaaattggacagcggcatggccaaagcaagcagcacaaagccacccagcttgaggccgccgaacaaaggcaggctggcaatgacaacggcttggatgccaaagacgaggataaaggtcttggaggcagagcggatgcggtcggcgatatagccccaaatcggcggcgcgatgatgccgatggcggcaaacgcagccatgatggagcctacctcggcgctggaaaacccgctgccctgcaagagcaaggtgttgtagctcagcggcgccatggcggcccaatacatgaagatgagcgaggcaaacccgataaacactcctctgcgctgcgtttgtctttgttcaagactgttggactgttgcaagatgagaccctcccatgaaaaaaattataaaaacggacacaaccgtttcgggtcaaaaaaataaaatacatccatccttggccacgcacaggcacttaaaaaaaatctcggataaaaagaacgaatttagcgaaaattgatagtactagcgtaagcccgaaatgggcggaaagtcaagaaaaaattgagtgtttaccaaactttttttaacgaaggaacacgcttgtacgcttgtgaaaaaataaacgggaaaacaggccgtgcaatcggggcaaagagggatgagaaaggaggaaacagaccacgaacagaaaaaaggtgctggctgcggcggggatattgctggcgataggcgccgccgtatttttatcgctgacagtggggcggcagctgctgcgcctggcccggcagccggaggcgtttcgcgcgtggatcgacggctgcggcccatgggcaccgctgtgcctgatcgggctgatgtgcttccaggttgtggtggcagtgctgcccggagagcccatcgaaatcggggcgggggttgcctttggcgcatggcaggggctgggcctgtgtctaatcggcgcggcgctgggcagcaccatcatctttctattcaccaaaaagctgggcataaagctggtggaggtgtttgtgccgctggaaaagatccgccagctcaaatttttacagaacaacaggcggctgcatgtgctggtgttcctattgttttggattcccggcgtacccaaggatgtgcttacgtattttgtggggctgacggaaatgaagctgccggcatttttggcgatttcaaccgttgcgcgcatccccagcgcgctgatgagcacctccggcggcgcggcgctgggcagcgggcggtataaaatggcggtgtggatctttgtgggctcggtggcgctggggctggtaggcgctgtatattaccggcagctggtgaaaaaggaacagcgcaaaaaacgctgggaggacgaggcaaaggcaaagcagcaggcccttaaggcgcagcagcgggcttgcgcgcggcgcacaaagggtgtataacagacgcaaagcaaaacggaggaaagaaaacatgaaagcgttttcggcggccttggcgctttgcatcccgctgatggtgatgctgctgggcatgatgatgcgccgcatgcagaccggccccagccaatggattggatatcggacaaggcgctcgatgcaaagcgagcaggcctgggcgtttgcacagagaacagcggggcggctatggatcatcgcaggcgcagcgatgctgggcgtgtcagcggtattgtgcgtgctgctgtaccaatggatggaaaccgctgtgctctattttgtattggcccaggcggcgttgacgctggggacggtgccgctgacggagcgggcgctgaagagaaaatttggctctgtatgaaaaaagcagccctgaggctgctttttttgcggcatgccttagaagagcacatcgcggtattgcggatggcgctggaaccagtgagtggcgtaggagcaggaaacgcgggcctttcggccttcaaggcgcagctgctcggccgcagcgcgcaccagcctatctgctaccccctgcccttgcaggctggggtgtacaaaggtatggttgaggtcggcgacgccatcgccggcagtaggaaacgtgatttcagccaggagcacgccgtttgcatcttccgcatagaggcggcccggggcgtggcaaaattccatggtgcttgctccttatcaagaggggatctttacgccgcaggcatggatgggggcgtcgtccgcctgctcgccgttgagcagggcatacaggcggtagccgccggaaaggttgaggcagtgaaaccggtgctggctcaggatgcggcaggccacatagctccggagcccgctttggcaatggacgtaaagggggcgggtacggtccagctcatccaggcggctgcgcagcgcatccagcggaatgtgcagggcgccggggatatgcccttcctcatattcctcctgggtacgcacatccaaaagctgcgcgttttccggcagggggaaggctgtttgccagtgcgcctgctttaccttgccgtccaaaagattctcgatggcaaagccggctaggttcaccgggtccttggcagaggaatagggcggggcatagcagagctccagctctgccaggtcgtaggcggtcaagccatggcggatggcggcagccaacatgtcgcagcgcttatccaccccttcaaagccgacgagctgcgcgcccagaatgcgccccgtttcggtatggaacagcaccttgagcgaaaggccggtgctgccggggtaatagctggcatggctgggcgtgtagaggtgtacggcatcaaatggcaggccggcggcccgggcggcgcgttcgttgaggccggtggtggcaatggtaagatcaaacagcttgagcacggcggagccctgcgtgccgcggtaacgcttgtgcgccccgcagaggttgtctgcggccaagcggccctgcttattggcaggcccggccagcggcacatagccgggcaggtctgtgacggcatcgcggatggcgatggcgtcgcccacggcgtagatatcctccgcgctggtgcgcagctcgtcattgacaaggatggcgcctttttcgttggtctccagccctgcctttttcgccagggcggtatccgggcgtacgccggtggacaaaagcaccagatcgcagggcaataagctgccgtctgtgagatgtgcaaatagggcgctgcccttttcctcaaaggaggccacgccgcagtttaatttgagctgcacgcccttttcacgggcatactggtgcacctggcaggccatatcgtaatccagagggccgatggcgtggggcagcatttccacaaccgtgacatggagcccggcggtatgcagcgcctccgccatttccatgccaatgtagccggcgcctacgatgagtgcttgggtgggatgctgggtttcaaggaaggtgcggatggccacggcgtccggaatggtgcggagggtaaagatgcgcgcattgtccacgccgggcagcggcgggcgcaccggctcggccccggggctgagcagcagcttatcgtaccgctcctggtagcggcggcccgtggcatggtccacgatggtgacggtcttgctgttgcggtcgacatccaccgcttcggaaaggatgcgcacatccacagcaaagcgggcggcaaagctttccggcgtctgtacggaaagctgggcgcggtcgcggatctcaccgcttatataataaggtaagccgcagttggcaaaggaaatataggggccgcgttccaaaaggacgatttcggcctgttcatccaggcggcggagacgggctgcggcgctggcgccgccggccaccccgccaacgatgatcactttcatgatagagtacctccttttcctggcaggcaatgccatgccgtgtgcttagtataccccaacgaaaagaaagaaaaaacagaccaaacggcgaaaaatggccgatacggcggaaaaaaccgaaacaaaggcggcgttttacgccgagagtgcagacagaaagcatttttttgcgaaacctatgaaattttgcaaaatgatactttacacaaccgcttttttttgctacactagctaaaaacagaaaagcgatgaagggaaactgtcatctggtctcaacgctttagagagttgccggtgggtgaaaggcaatgcgcattccagcttggtctcatcccagagctgcccgctgaaaggaagctcctagtagg

SEQ ID NO: 662 - DNA, 6236 bp, Unknown
  16S sequences of unknown bacteria
gtacacgatggcaacagaaagcgcacgaactgcctttttgggcagtttggttttggagaggagcttttcaaaaaacatcatgggccgattcaacaaataggccatgacaaatgctaagataaagggaaataaaacattgagcaccttgccgataaaggcaagaacgccggagaaattatctaaaaaaaaacaaataggatcaaaagaacgcctacatataacgcacagtttgcgattttgcgtacatcacgcgcattcatggctagatcctcctttatagtaagtctcttctgaacataccttattttgtctaatgaaacaagtcctatacttaaaaatcaagaaaaaacgagccaaacgaccatgctccccaataaaaaaagcagctatggctgctttttttattccaatacaatgcgtacttttttgaacacgtcgccagaccctacggcaacgacaagatcgccagactgccaatgcgcatgcagatagtcccgaatctcttcaaaggtaggtaggtattctaccttcgtaccgttttttgcgatttctgcaacgagatccctggcatgtacaatgccggtatcgatatcccgccccggatagatatccggtactagaacctcatcggcgtcctcaaagcattttccatatttttccatcaaagtttttgcccgcgtataggaattgcattggaaaatgcaccaaagctttttgtgtggcgtctgcttggctgcctgtaaacaggctcggatctcgctaggatgatgggcgtaatcgtgaaacagctttacgccgtccttttctccaaagaactcgaacctacgcgctaccagccggtatttggccaaggcatcggcaatgcaatcgtatggtacgcccagctggcgcgcgaccgcgatggcggccagcgcattttgtacgttatgccggccgggtacacccaattggatcttctgtacaggtttcccatgatccaacaccgtaaaggagggatggccataaccgtcatactcgatatgctgtgcttgataatccgccttttcgtctaaggcataggtcacggtgcgaactgggcaggtctttaccaactcagctacgcgccagtcttcaatattggcaacaaacacgccggtttttggcataagatgaataaactcatcaaacacggaagcaatctcttctatatccttataacagtctaaatgatcgtcatcaatattgttgatgacctcgatggtcggatgcaatgtaagaaagctacgaacatattcgcatgcttcggtaacaaacaatccgctatgccccacgcgcgtaccgcctgttaaaaactctacctctccacctacatggacggtaggatccttttgtgcttttaataaaatcaagcccagcatggaggtgatggtggttttgccatggcagccggcaatgccgataacctctttaaagtggccggagatcataccgagcaaaacagaacgctctatggtaggaatgccctttgccaaggcagcggccatttccgggttggttggcttgatagcagcgctgtatacaatggcgtccgctccttcaatttggctggcttcatggccgatatataccttgatgccaagactttccagatgatcggtaaacgcggacgcaacgcgatccgaaccggttatggtatatccctgatgatgcataatcatcgccagaccattcatgctgcagccgccaatgccgatgaaatgcaggtgttgtccttttttcagtgtaaatgagctagacaatgcttttccgctccttcatatgatttgttccattatactcgcaaaattatcggtttatcaaccttttccgaatagaaggaagaacaggcataagatcgggaaaaaagggacgcataaaatattgctttggttcataaggtgcaagggagaggggaaaaaacatgccgtttacggatagggaattatttgcacgcttgatccagtgcgaagccggaggagaaggtgacaacgggatgagggcggtggccagcgttgtgatgaaccgtgtcaatgcaactacgggagagtatgcacgcgtaggccagggcagcctccgcaacatcatccttcagccggggcagtttgtatgcgcctctgaaacagaacgtgggcggtataacccgcaaaacatatacaacatgcgcccagagcaaattcattatgatattgcggactgggccattgcgggcaaccggctgctgaatctggggcaagccctttggtttttcaacccatacagccctacctgcaagaaaaacttccccagcaaggtggggtattttgtgacaagaatcggagaccactgcttctataaccccacagaagcatacaatgagacatagaagagagaaaggagagggatgccatggaggtagatccgcagattttggatgatttaatgaagaatccaggttatgagggacagcaggccaacacgacctctgagttttatgccgaatcattctcagaggtattggccaaaagcatcggctattttgtgacggctgaatttctcatcggcagcaataacctggtagagcgttctggcattttgtacgcagtaggcaataattttatgaccctgcaggaagggccggatggcccgtttatgatctgtgacgtatactctgtcaagtttgttacggtgtataactcacggacccggccagagaattttggccaaagaaattttcagaccaatgcataccgcaatgcttcctacccaggacagcggcgctgaatacgacataaaaaaagccttgcaggcaccatcgtctgcaaggccttttttatttgggatcagcgtgctgcagcgtagctctcacaagcctcaatgacccaatgaatatgttcgctgggcaaagaataatgaatgctgcaatctgagctgaggatgagattttgctggccggcgctttcaaggaaagctttggtctggcgctgaatctcctctttgctgccggtatagagaagggtgccggggcgatgatcaaaacctcccatcagcgtggtgcctggcttgaagaaggcgcgggctttttcaaatgtatctattttttccacgtgcatatcccagtttacagtctgatacgggagatcgttccatagcgtaaggtcgttttccccgagatccccacagatgtgcatgatattatgggcaaaattttcgttggcatgctgcaaaagctggagatccagaggcagcatttccctacggaactcttcctcgtcaaactgaaacgtcttatggttgcggcggaaagaaagcatgacgccatccagggccgtttcctctttgtaggcatccaacagcatatcgttgcagtcacgagcaaatgcaatggcatcctccacgatctgccgatgattgcgccacgctgacagcatatccatgccgttgaaatccaaccgcatggatttacgcacgttgttaaacgcagtatatagaagaccgaaaacagcgacctcatcggaaagcgcctctgagacccgcttggcacggtcaacctgctgggcaatgaagggatgcgtgcgcttgatggggtgaagatgcttgaaatcttcgatggtgcccgagacattttcgatggggcagccgtcattgccatcacattgcaaaagcagcatgtccaccttgctttcgcgggcccactttatataggcgcctacggagttatccgcatcctgttcgggaaaatgacgataaagcatcacggggacccggtctaccgccagcccctccatggcgttcaaagccctggtttttgcattcatattcaattctcctttttatgttgatctcttctattctagcatactttatgtgccttcccaacatctttgtcaaagggatcaggctgtaggaacttccgggcccaacaatgtgaaatggtttttccaaaatagtaggagcccttcttggcgcattttgctaagctcggaggaaagtgcgcttcgatccacacacagatagtccgcgagctgttgccggttcatcggaatggtaaacgcgttgttatgcgccagctgcgcttgctcggagagataggaaagcagctttgcgcgcaggctgcgtttggagatgtgctcgattttctgcgtcagcagctgatttttttctgcaaggatgcccagcagatttgttaccaacgaaatggaacaggcagagaccacggatggttggaaaaaaagctcggcccgaaaaaacagcgcttctacctgggtgccggccaaaacggagacgggcagagacggtattgcacttagggaaaaggattccccaaacaacgcaccagggcctagctgtgccaataggctgcgatgtccccaaaaatcctccttgatgatgtgtacttctccggcaatcacaaggccaaattgcggtggttggccacaagagagcagataagtacccttatcatagcaacgagtataggcatggaaactttccaatgcctgttggatctgaggctcagagagccccttaaataagggcatgtcgcacagcgcagcggttatttttttcattttttccttctttcgttgtaaaaacaacagaaaatcttttggctgtattgtacgatatccgtgatgaaaaagcaaaataaggaggaaataatgatgagacgaaggatcattaaaattgatacagaaaaatgcaatggttgcgggctatgcgcaaaggcatgccatgaaggcgcaatcgctatgatagacggaaaggccgccttgatgcgagatgattattgtgacggcttgggggattgtctgccggcttgccccacaggggcgatctcctttgaagtcagggaggcggtggcttatgaccaggcggctgtggagctgagaatgggcaagcaaagccgctgtgccggcgcacagagccaaacgttcacaaacccggcgtcaggcagcgctttgatgcagtggccggtacagattcagttggcccccatccaggcgccgtattatcagggggcacacttgctcattgctgcagattgcacagcctatgcctatcatgaatttcacacggcctttatgcaaggacgaatcacgctgatcggatgcccaaagctggatgatgcaccgtacgaagaaaagctgtgcgcaatttttcagcaaaacgacattaaggatattacgctggttcgaatggaggtgccgtgctgcggtgggatggatcgtatcattcaacaggcgcttgcagcctccggtaaacagatcccttatcaagtggaaaccattgccctggatgggacatggcaatgatggccaatgggttgtaccttcccgctaaaaaacaaaaatttgcaaaacagcgccaatcgcgctgtttttattttcatgcaactgcacaaaatgcttacgcaatttaagagcagcgtttgcttgtaccgcggcgcataaaaagcgctatgggatcacataaagatggaagcggtaacagcgcatatggcgcaaataaacctagacgctttttaatgagtacgcaaaaatagaggatgtttgctactgggattttcgataatctacaaggctttgcatcagacatattgatttcttgggtttctatgctatactatacagaaaaaggaacataattgttcctaagtctgtagaggcaaaaggagggtgtaaattgaaaccatttgccaagcacctgactcgaacaaagcctatgtggctatatattgaaaatgggaaagtaaaagggccggtaagccaagaaaaaatgtctcgcctgattgaggagggccgggtctccaggagcagtaagattgcaaaacagcaaaccgatgattggtacgccattggggaaaccggttttgaaaaagagatcagtttatcggagagccaaccggtaccgcgtcaagcgcggccgctgttaatcggcggtgtggcggttggctgtattggccttccactggccgtttggagtgcgttatggggctttgttcttttgggtgcaggcctgagctttggcagcttggggctgagccttagacgaggcgcagagacgcatacgatttttagataaggatcaaaaaccgctggattgttccagcggttttttcaataccggccaataatgaataggggtagagaatggccggtattaaacttggtttaagtattcctccaggcagatgccctgttccataatctgcttggcagcgtctttgccaacataacgat

SEQ ID NO: 663 - DNA, 2606 bp, Unknown
  16S sequences of unknown bacteria
agccactgcaccgcagcgccggccacgaacacgctgccttccagcacatagttcacctgtccgccgatccgccagcctacgcttgagaccagccctgtcgatgagcgcacgatctgctccccggtattcatcaacaagaagcagccggtgccatatgtatttttcacgcttcctttttcgaagcatgcctgtccgaacaaagctgcctgctggtcccctgccagcgcagcgatcggaatcggcgcgcccagcagatcgctcatggccagcacgccgctgctgtcacagatcttcggcatcatgcatctcggaatgttccacagcgccagcagctcctcatcataatccagcgtctgcaggttcatgagcatcgtccgcgaagcgttggatacgtcgctgacatgcgcccggccatggctgagcttccacaccagccaggaatcgatggtgccaaagcacagctcgccattttccgcgcgtgactgtgcctgcgcatgatccagcaggaaccggatcttgctggcggaaaaatacgggtccagctgcaggccggtcttggcgcggatccactcttcttttccagctttacgcagcgtgctgcaataagattcgctctgcctggactgccagacgatcgccggtgcgatcggcttgccgctctccttttcccagatcaccgtcgtctcacgctgattggtgatgccgatggcagccacctgatgcgcggcgatgccagagcgggcaagcacctccatcatgacgccggccacgcttgcccagatctcgccagcatcctgctccacccatcccggatggggataattgttcgtcaattccttctgcgccatgccggcgatgcgcccatgacggtcaaacagaatggcccgggaactcgtcgtcccctgatccacggccatgatatatcgttccatgcacaccccgcctttctgcaaatccaacttcattttatcacttttccccatcagtttgcgcaaaaaatgcacaggcgggcaaggcgcaggccattcaggatacggcttttcgcctcacttttcaccaaaaaagccgcaggatacgttcatcccacggcccatctgctcactgttcagctgacgctcatccgccgtcatgaccccatatcggcaagcagctgttctgtttcgatcagccgcttgctcacccgcgcctgcacatcgacataatatgcttcttctgccgcattcagctcatcgtcctcccaggcttcaaagtcctggaccatctgcgcatatcggtcgatataattcgcatagtcattcaacatgccggcgtctgttccatcagatcctgcatacttgttcataaaatcgcaatactcattcataaaggcttcatagctgtccatcgcctccttgaattccggcctcatcccatcgaccagtgcagcgttctcgcttgcttcatcacgctgtgctggatcagatgccgcctcatccgacgaagctgacccgctgtcgtctgcggcttgtgcctcgtcatttttatgcagttcgatcctgacgatctgatttccctcataggacagcgaaaggtgattgccattttgatcatcagcgcgataatacttgtcccctctttcataatccgcggcaaatcctgcatctgcacagcgatccgcataggcattgaactgttcgatcggcatctctccgacatagatgatgcagtaatctgtcgtgtctgcgtccactttgcccacggtggactccggcaatggaagcaggctggcgagattgctcttcggccaattcagcgtgcccagttccatcggcgcttgcagggagatcgacatcgcttccccaaggaagcccacggatacgtgatagccttcttcgtcaaaagcgtcaaacaggcttccatctttttcttggtcgaccgtatagcccatcgcctggcattcttctacatatgcctcataatcacgctgcgataaatgatcgacattcaggctcagatattcgctgtcatttgcgatgatctctcccacgttggatccaggctctggcagacgctcgctcagaatgacctcattccagtcaaacctttcctctcggttcccggtcatcccgctgatcacaacgatcacggcgatgaccgccagcaggatgacccaccacttgcgataaaacggctttctgttctttgccccgcaggacggacacacttttgcatttgcaggcatttccgccttgcaattgctgcacagcgtcatttttgttttcttttccatgatcttcccctctcttttcatgcttctttcacttttctgatgccgcgcgaatgatcaaatttttttcatcagcacagctccctgtatctgaattcccggatgatccgccagcgatgacacgtcctcctttccatgcacgcaggccgatccttcctgggacatccatagataaagcgtagcacgaaagaccgccgatctggttttgggcatgcaaaaagacggctcagccgcctttgtacacatcaatctgttcgttatgatcgttcctgccactcgatcgatacttccttgcccgcatgcgccaggccgatcaagatcgttcttccctgcaattccg

SEQ ID NO: 664 - DNA, 4330 bp, Unknown
  16S sequences of unknown bacteria
cggcggtgctttatgaaaaagggcggcatttccgctcaaaaaaataccgtatgcacattgtcgacagggtcggcgggggagacagcttcgccgccgggcttattttcggaaacgtcaagggcttttcggctcaggatacggtggaattcgccgccgcggccggctgccttaaacattcggttgagggcgacgccgggattttcaccgagcgagaggttctctcccttgcgggagggctgtccgacggccgtgttcaaagataaatgataaaagagtgatttggttttggaagcgctgctttattcggaaataaatattctttgcgtcgttttgatgctggtcatcgccgtgaaaatgattgcctcgggcttttgcaagtcccaaaacgagcgggcctttgtaggctcggtgcttttcgcggcggcggcaaacgtttttgacttcctttggaacatggggctgagcggctattggcgcctgcccccttcggttatgaaggcggtggatttttgctattttatcgtgtttggcctgtcggcatattgctggtatgtctacaccgagacccactttgacaaaaatgcgtggaacgacaaaagaaaaaaggcgatttgcgccctgccccttgcaattctcgccgtgctgctgacggtttcgctttttaacggctgtcttttcggctttgacgaggcgggcgtttattaccgcggcccgctgttttatgctcagcagatattgtccttcgccctgtttatcctgtcgtcggtcaagtgctttgtccgcgcctttcagaaaaaacacctttcccgccgagaggaatttctggtcatggccgcattcgtcgtgcctcccgttatctgctcggtctttcaaatcgtgtttcagacgatacccattctttcggtgggaatcgtcatctcattccagcttgcctgcataaatttccttgagcgcaagatttctcaggactcgctgacgggaatttccaaccgccgcgaaattctgcggctgaccggcgagaaaatgcggcttaaaaaggaaaacgaaaatctttggttcctttttatcgacgtggacaatttcaagtacataaacgacaccttcggacacggcaagggcgaccgaattctgaccgagctgtcggaaggtcttgtggaatacgcaaagagattttcgggcttttgcgggcggtacggcggcgatgaattcgccatggttttctgcgccgaaaagaatgtggaaaagagcaaaattcaagaggggctcgagcggcacatagccgagcaaaacatttttataaacggcgaaaaacgcgccgaaatcagcgtcggctgtgcaaagctcgacggctcggacggcagcgtttccgaccttgtttcccgcgccgacagcgatatgtattcggtaaagcacacaaagaaaaagcgcgaaaagaaaacgcaataaagcctcgtcggctccctttacacaagggaggctttgaatgtacaacgcctttgctcttttgtttctgatgtagaaaaatataaaatcggcttttgtttggttttggcgcctctaagccgatttttttgtattgattttacgtaacatcggttttaaatcccaaaatcccaagggtactttcctcggaacatttccccggaaatgtatctcttttttgttccgaacccgagtgatataatgcgaataaggggaaattttgtaatttcccgaataaatttggaggctgaaattatgaaaaagaaaaatgaagcaaagtttcctaatctggaatctctcaacaccgttaagtcggtaatcgacgatgccgacgccgcactgaaagacaaatcaagaaaaataaaagattctcctcttagtgaaactttggcgggagccgtgggagtcggcgtcggagcaggtataagctttgccgctctctatctcggcggttcggtcgttggactgagtgccgcaggaattacaagcggacttgccgccgccggggcgttaatcggcggaggaatggttgccggattggctgttttggctgcaccggccgctatattaggcggccttgcagtcggaacaacttcccattttaaaaacaaaaagttgcgccaatcgaaagaactgctatataaaaccgctcttgccaaacagactgcaattcttaaggcgcttaaggaggagtcggacgcagacaaagaaagaatcgaatatttaaagagtttgagtgttcttctgcaggcggcaatacaggatttgcgctgtgatttgggatataattcttaagggtgctctatgagtaaatttaagtacaccgaacaggaaaatgaaataaacaaggttcttaaaatgaatcaagatgtttcgacatcccttgtcaataatgcggaactcaaaaagacaagaaagtcggcggacgaaaatatagccgcgtctctcgaactgctccgctcgctcggaaaaggcgatgaggccgacgaggctatgaaatccgcaaggaaaaaatcaattgccgtatcatcttctttcaagcctgaaattgagccttttgaggaaatcgccgcacaggcaaatgaatattgtccgaatcccgtttccttggaagatattatgaccgagcaggagacagagtcggcttttaacgaacttgacgaaatcaacagacgtttttcggcaaagacgaatatcgttaataaaaccgatttggcctttctttcgattgcgacggctcttcaggtgacaaagtctcttgtttttccgcttgttgccgaaaaattcgactacggaaaaaattccgatcaattaaaaaaagaaagacttaatcacaacgatgagtcgattgagaaagagcacagaaaagcaaatgacggttttaaggagaaatatatcgaaaagcacgggaaagggcattggatcaatattctttatcaaaccgttccctacgatactactaagggatcgccggccatcggaaaaaacatgggaggaaggtatcaccgtatgtataccctcggtcatgacccgattctcggatggcttttcggaacggcaaatattttgaccgactgtatcacatttaataattttcaaacaaacagagtgattcgcgtcgacccgataacaggcggcaaaaagatgagtattacaggcgaaaaagtttcgttttctcagatgatagacgaatgccgacaggatataaaggccgactttttgaatcttcccgcagcaatcttcgcacaggcacagcaccttaaatccgacaaatatacaaaaacaggtctgcctgttccgctgctttcaagctttaatgaggaatttgcggggaggctttatcgtgaacattacgacgcgctgtgcttttcgcgagatataaaaatcgtcggtgcatcgttcatcgtttcaaagcttgtcgatattatcatttccctgactcacggtctttttaaaaagcctgaggagaacagaaatctatatgaagtgagaacgagaaaaattctgcttatttcaaattccattgcgtcggcaagtacggttataaacgcggcaattacaagcaatccgaaaaatttggatataggcagccttttttccaccgtaacgcatttgttctccgacatacgttttatagcaaaaataaagcaggagtttgttgaaaacgaaatctcgttaaggctgaaaaacgaacttgatgaaatcgacgccttgtacgacagtatgtagacggaatttactcaaaacaaaaatcaccctcgggatatgtaatcatatcccgagggtgattgcatttaaaacctattcttcctcataaagggcgagggtggatttaaggtcctgtttgcagacttcggcgagggcggcgggctcggtgattttaacctgtcccgcatactgtctcgcccacagccgcatgtcgttttcgttgaccttgacctgcgccgcgacctttccgtcgccgatgtcctcaaaatcgacattcgccctgaaataatccagcacgtcgcttatcaaaaatttcggcatttcgaattttgcccttatggatttgccgccgaacatataaatatgctcccgcatatactgcgcaacgtcaagcccacaagccccttgacccggtttctcggctttctcggcgtgtcgagaatttgaatgttgcttattcggtcgatgcggtagtgggcaatgtcgtcaaatttgtcatagttgcaaatgagataatatttgccgctgttggccgccattatgtagggatttatgacatattcccgtgcctcgcccgcctcgttgagacggtggcgcagctttttgtcggcgccgtattcgttatagaaaaatttgacct

SEQ ID NO: 665 - DNA, 5316 bp, Unknown
  16S sequences of unknown bacteria
ttcatcaggaacgtcatattccgggcgagagtccgcatgacctgaagcccctccagatcctgggcggcctccgatgcattgttgccgtggatgctgttccagtaatggctggatgcaaccggcataccggcaatcgtaaaatacttgttcagctcgtcaaaggacgcagagagtccgccacgtcgggcggatacgactgctgctccgaccttcattgtcttatcaaaatgcgtgctgtagaagagacggtcaagaaatgcaatcaatgtcgcatttgcggatgcataatagaccggacttccaacgacaaggccgtctgcctcctcaaatttcggcgccgcctcatttacaagatcagaaaatgcgcatttgccgagctttgaacaggcattgcaggctacacagccccgaatatcctgttttccaatctgcagaagctctgtctcaatgccattagcctgaaaaatctgctccatttcatgcaatgccgtgtaggtgcttcccgccgtgtgcgggctgccgtttactaataataccttcataagtaaaactccttccttttaaatatacaatatcctgtttattttaccatacaacaaaacaaatgaaaatgccagagaaaatgaattctttcttgttaactttttgtactttttgatatttttatagatgctttgactgattttgtttgactatctgtgcttcctgcgttaaaattttcagtatatgcttccgcaaacggctttaaatccggcagcttttacaaatatgtgtcagagaagatgagaatatccgttaccttcggaagcaatataatattacacgtgtgtgagaggagaattatgtaaatgaaacgagaaagctttcaatcaaggcttggtttcctgcttgtgacagcaggctgtgccatcggcattggaaacgtctggcgttttccgttcgtggcaggacagaacggtggcggcatttttgtcatcctgtatctgatattcctgctgtgtatgggagttccggtgctgacgatggagctggccgtcggaagagcaagccgcaagagcgcggtgctggggtataaagcactggagaaaccgggtagcaagtggcatattcacggctggttctgtatttttggctgctatatgctcatgatgtattacacgacggtttccggatggatgctgagttattttttccgctttgtcaccgggacctttcatttgggtatggatgccacggcggttggcggtgtgttcagtgatctgcttgcttctccgaaggaaatggggatctggatggcagtcaccgttgtgcttggatttctggtatgcagtatgggattacagaagggtgttgagaagatcagtaaatatatgatgtcggcactgcttcttctgatcatcgtgcttgtcattcacagcctgactttatccggcggcgcagagggcatccggttctatctgataccggatctgcagcgcgcatcagatgttggtatcggaagcgtcgtgtctgcggcaatgaatcagtcattttttacactgagcctcggtattgcagcgatggagattttcgggagctatatgagcaagaatcacacgctggccggcgaagctatccggatctgtgcgctggatacctttgtcgcgatcatgtccggtctgatcatttttccggcttgcttttctttcggaattcagccagatgcaggtccgtccctcatttttgtgacgctgccgaacgtctttatcaacatggcaggcggacgtatctggggtgcattgttctttctgtttatgacatttgcgagcttcagcaccgtcatagcagtatttgaaaatatcatttcattcagcattgacatgtttggcacggaagcgaagccgcttagccgaaaaaaggcagcgatcatcaatggcattatcgttctgatcgcgagccttccgtgtgtacttggctataatatctggagcgatctgcatctgatcggtggcagagatgtacttgacagtgaggatttcattgtcagcaacctgctgcttccggccggatctctgatttacctgctattctgtgtgacgaaattcggatgggggtttgaccattattacgaggaatgcaataccggttccggcattcgtctttccagaaagctgaagccgtatttccagtttatccttccgatcctgattttgatcattttgattcagggcttgatgtaaaacccgaacttgtaattgactgtgaaataaataggacgtaaaataaatgaagaaggaatcaaacaaacaggcagcagaaataaaatagaacaaaaaagggggatttacacactatgaaaccacaggaaaaatatctcattgatacggatgcgaaccgcgcttttttaaaggaagtacgcgaaagcctgctttcttttggacatcagttcccgtcgccgggcggaagctcctactatcttggagatgacggaacgccgtggaaggaccgcagccgtgagacctgggtcacaagccgcatggtacatgtctacagccttggcacattccttggacatcctaacagcagggagctggcagaggccgggttaaaggggctcagaggagaactgcacgaccgggagcatggcggctggtatgcaggacggaaagccgatggcggtatccttccgaataagcagtgctatgcacatgcatttgtcatccttgccgcatcgagcgcgacacttgcaggccttcctggggcaaaggagcttttggatgaggcgctggctttgtatgaccttcgtttctggaacgaagaagaaggcttatcctgcgatacctggaatacagagttcaccgtgctcgatgattatcgcggattgaatgcaaatatgcatacagtagaggcatttctcgcagcagcagatgtgacgggagaggagaagtaccgtgtgagagccggacggatcatcgatcatgtaaaaggctgggcagaagccaaccagtggcggattccggagcactttacaaaggaatggatcgccgaactggactgcaatcaggacaagccggacgacccgtttaagccgtatggagcaacgccggggcacggcatcgagtgggcgcggctgatcgcacagtgggcgctttcgacctatccgaatgatccggatgcggcaaaggaatacctgacggtttctcagaatctgtacaaccgtgccgtagcggacggctggaatgccgacggtgcaccgggcattgtctatacaacagactgggatggaaagccggtcgtacacgaccgtatgcactggacacttgctgaagcaatcaatacatcgtccgtactgtaccatgtgaccggcaatcaacgctatgcagatgactatgcacagttcatgcagtatctggatgaaaaggtgctggatcatgcacacggctcctggttccatcagctggatcaaaacaacgagctgctcggtaccgtatggcctgggaaatccgatctgtaccacgcgacgcaggcgacgctgattccatattatagtccggcgctttcgattgcaccggcagtgaaagaaggaaatctgatttaaccgaatcaagcaagtctctgcttcaattgcgcaaagcaataagcagtgggttgggacttgcttgtatcaggagtggtacaagccactcctgataagctgcgaagcagctattcggttatgagcaagtagcgaagcggattgcgaatatccggttgacccgaatcagctgcaaaacagcattcggctatgacatatcataaggagggacccggattccttatgatcctgcaagtagcgaagctagaccctgtcagcagagctgcagggatggattgcgaatatctgcttgaccatatctgagattttccactagtttacataacaacattatgtaaactagtggaaatacaatcaattatataatatataagagagataaataaaaaacatcaactatgtctgtaaaatatccatgacataattgatgtttttattttcttttttactcacgccttccgcaattttactgccgtagcagctttccgcctgcggctgtcatccattgccgcataatgctttttcgtcgtgttgacatccttgtgcccgagcacatcagccacaaggtaaatatcgccggtttcctgataaagagtcgtgccataggtacttcgcagcttgtgcggtgtgatttttttggtcgtcgtgatctcgcgggcgtacttttttaccatattttccacagcctgtataccaatccgttttcgttgggtagagtagaagagagcatgctcatgtccggccaccggtgtgatcgcagcgcggtcttccagataattgagcagcgcctgctcgacctcatcgccgaaataaatcatcatttcggatccgcctttgcgcacgacccggattgcatcatttttaaaatcaacatcctccacatccagtccgacacattctgacacacggattcctgtgccgagcagcaacgtgacaattgcaagatcacgcagcctggttttttcataataggcctttttctgaccggtcagagaatcgcctgcatgttcaatatagtccagcagctcagccgtttcgtccggatccagccgtatgatggctttatcatgcagttttggcatgtccaccagcagaaccggattcgtttttatcatttcacgtttgtaataatagttataaaagcttcgaagagcagacattttgcgcttcaggccgcgttcgccattggtctggagacggttgtcctcggcagaatcatagaccttgagatattcctgaaattcttcaatatcgacggcctggagctgatccagtacgtcaacggtaaaatcatccatcgttttgtctttaaaggccggattttctgataataagaaatgaaagaaaacccggatgtcatacgcataagaaatcctcgtacgcgcagaggtcgtcggctccatagcacggaaataatcgcgggtaaatggagggagtgtttttaaaacttcacggagcttttgggtttgttcgattgttacctgatcatggtaagtctgcgttttttccatatgtagagtcctttctgaatgaatacagatcgatctatttgaaaaacatgtgtttgtcgtatagatctattatactattttcagcactttctggcaaggatttttcttaaaattggtcgatttcaatattttctaaacatctacaaataacatcaatccggtttttttattattcattacattccttgtctatcaatacaatctttcacacgcttcaattcaacgatatac

SEQ ID NO: 666 - DNA, 5871 bp, Unknown
  16S sequences of unknown bacteria
gggcgctgatgtgtatggcctctccccggggcactgtctccggcaatgcagaccttttgggccggacaaggcagcgggcactgcccaaagctaaggggcgctgatgtgtatggcctctccccggggcactgtctccggcaatgcagacctcctgggccggacaagggagcgggcactgcccaaagctaaggggcgctgatgtgtatggcctctccccgaggcactgtccccggcaatgcagacctcccggaccagacatggcagcgggcactgcccaatgacaaaggggcgctgttgtgtatgacccctccccggggcactgtctccggcaatgcagacctcctgggccggacaaggcagcgggcactgcccgccgaagggcccccccttcgaacgtggagggggcctttcggaagccccccgcgtttttgccttacaaaaggcacataaagccgatgcttactgcgagtagggcagcggattctccgttttctcaaggatagaatcaacgctgaccccatataaattggaaagtgtcaagagatgctcaaccgggattgtacgaattccgttttcgtaattgctatatgcaccgcggctaatcgataaagcggcagcaacctgctcttgtgtgtagttgttgctatcgcgtaactcccgtattcttttatatatttttgccatgccatcatctcctgatgaatattatatatgacacagaagaaaacactgacttttgacacaaatcgtgtcaaaatatttttagatgatacaaatcgtgtcaaacaaggagggagcggtatggtagtagaaaggctgtcgacgatatttggcaacaagcagggggaaacgccggaggcggagcggctgcatgaacagcttttgcagacgctgacaaaagagcagcgctgccttttgctgcacttgatcgacgaaaaagacatggagcgggggctggcacaggaacagaactttgcggcagggctgacattagggcttcggctggggctggaggtatttcgctgcgacgaagaggaaagctgccggtagaaggcggcctgcctgatggaaaaaagaaaagagccacacggctctttttttgatggacaaatagaaggattgcttttgccgagcggcttagagcagggcgttgagcgcatccaaaaacgctttggcgtcgtttgctgcgcggcctttgtattgcacgatattttcatgcgtggtatgccccagcaggatatcgccgccggcagggcatcccggatagagaaacttgatcataccggtgccatggccatagccgaaatcctgaaacgtatgctccgccttttccagggtggatacgggcaaaacggtttcggccggcagggccatgaggacgttgggatcgcgctggatggtgacggtttgctgatcggtatccagcgtgagcttggcgccgacgcaggaaacggaataggttgccatgggaaatgcctccaattcaaaatgggattttcctgcattgtatcactttttgctatgtttcacaagacggttccggcggcacagccaccggcaaacggggcgtttattgccatgaaaagcggataccccatgatacttttccctcctctacaatacagacgaacagacggacaaggaggagatagcggcatggattggagcgatgcgctgctgtttttcgcggtgctgctggcgctgtttgcatcggcgtgggcagcggggctggcccagggaacggccaggcggaacaggcgggagaccggagcacgctttgccccggaacgaaaggaaggacaaagcgcagggccgggggcggccggcgcggacaaagcgaaggaaaagccgctgtgcacggcgttggataacctgacggcctatggcacgaaccggcagcagacagaggtggaggacaggcatgaaatttgggaggaatgaaagcggccgatagccgggaacaaggcgtagaaacgcattgcggcggagagcaaaatagaaaaagcattcccctgcgaagggaaaaggcagagcgcggagaataaggcaaatagaaacaggccgaggacagcggccgatccccggggcagggggcagagcaaagcacgaaagacaggccggaaaaggaaccgcccactcggcaaagggatagaaggccgaggacagcagccgatccccggggcagggggcagagcaaagcacgaaagacaggccggaaaaggaaccgcccactcggcaaagggatagaaggccgaggacagcagccgatccccggggcagggggcagagcaaagcacgaaagacaggccggaaaaggaaccgcccactgggcgggaggagggacagatgtttacacggaacggaacgggaaagcgtaccgagagcgacgctacgacggagacatggcaacggtacgaacgcggagtatcgtaccacgaacgcaacaacctatacgcccaaaccgacaaaaaccaccggtattttgcaggagaccaatggcgcggcgcgtatttgggaagcatttcgccggtacgatttaactttattaagcctacggtgctgtacaaggtatccaccgtggcgcagaacaccatgagcctacactatgaacccaacgcattttccatgctggcagggcaggaaaaccaggagggcgcacagctatttttgcaggcggcggagaagatctgccagaagctgaacgggcacgcctcccggatgtgggaaaaaaacaagatggacaccatgctgtgggactgtgtgctggaggccgccattgccggcgacgcatttttgtacttttacgaaaaggacggcgaggtggtgtgtgaacaggtggacaccaccaacgtgtatttcggcaacgagaacgaacgcgacctgcaaaagcagccgtatattctgattgcatttcgccagacggtggagcaggtgcggcgcgaggccaagcaaaacggcgtgccggaggacctgctgcgccagatcgtaccggacagcgacacggccacccaggccggcgacagcgccaagaccgaggtggaaaccgacgaggacggcggcaagtgcatggtggtgctggagctttccagaaagacgcacaaggacgggcggcgctgcgtggtttcccgcaaaagcacgcggtatgtggagatacagcctgaacgcgaccaggggcacgcgatgtacccgatggcgcacatggcttgggagcccatcaagggctgctgccgcggatacggcgaggtgcgctttttgatcgataaccagatcgaggaaaacaaaaacctggccaggcgcgcggtggcggtgatgcagagcgcataccccaagatgatctaccgcacggacgccatcggcgacccggaagcgctgtataaaacgggcgcatccattggggtgaacgacatgaacgcgcaggatgtgcagaactatgtgcggtatttgagcccggccagcacatcgccggatgcctacacgctgacagaagagctgcgggaagtgacgcgcaacctggcgggcgccagcgaagcggcgctgggcgacatcaacccggaaaacgccagcggcaaggccattttggcggtacgcgacgcagcggcggccccgctgagccggcaaatcgcggcataccggcagtttgtagaggacatcgggcgcgtttggtttgatatgtgggcggcgtacagcccggagggcaaggcggtgctggtgactgtgacggacgcgatggggcgcgaggtacaggcggtggagatcatcccgtatgaggcgatgcaaaggctgaaggtgcatgtgaacgtggatgtttcgcccagcgacgcatacagcaaatacgccgtggagcagagcctggaaaactgcctggccaacggctggattacatttgaggaatatgtagaggcgctgccggcggacagcgcggcccccaagggcaagctgaccgagatcttgcaaaagcgggcgatggcagcgcagccggccctatccggaacggaggacaggctatgatatgcaggcattgccagctggtggaaatggaacgggtgcgcagagaaggggagacgaacctgtaccgctgccccaaatgcggcgcaacacagaggatgacggcacagcaaacagcggcggccagagcgcgaacacaaatgcaaaaagcgcgcacgaaggacgcatagccggcggcgcctactaggcggaagcaaaagaaagtatggatgaaaatgcttccccggggcagaaagcatggctaggcacggaagaggagccggacgaggaagcgcctactaggcgaaggtttgggcaggacgaaagcgaaataaggccccggggcagaaagcatggataggcacggaagaggagccggacgaggcggcgcctactaggcggcagagtgctaggcacggaagaggagccggacgaggaagcgggcactgcccgccccccgacgggggtaaaacgggcccgacagggcaaggaggagcatcatgatgcaagaaaagacagaacagaactggacacaggcggacagcgcgcccggcgcaagccaagaccaggcggcccttggcggagacaaagggacggatgcggccaaagaggccgccgggccgagggggtacggagcccatggcggcacccatccccggggcagagaggatggcagggcacaaaacaaagggcccgaggaggaaccgctgtatagccaggccgagctgcaaagggagctggaccgcgtagcgaaaaaggagcgcgagcgcggacggcggcaggcgcaaagagagcagcaggcgggcacgcagccagaaggcggcgcggacggcacagatcagcagacggaacgcgaaaacgcacagcgcgccacagcgccggacggcgaaaccgggcaggagggcggcacggcagcggcagaacaaagcacggaggcagacccggccgaccttttggacgctgaacagcagcgcatgctggggcgcgcgatggcggacaaggccatccaggagggtgacgaggcggtgcaaaggggcatcgaacggcttttgctcaaagaggagcccctgacagcccgtgaggacgaaacgctgttttggctattcaaccacgcttcgctgaaggcctgtgccgaggaactgaccaagcgcggcgtggacggggagagcatcgtaaaagacaaggactttatcgcctttgcggagatgatgcgcagcgacgtgccgctgctaaaggtttacgagcaatacgcccgcacccgggggcacaaggcaaagccggcctccaccggctcggtacaggggcaggggcccgcgggcgcgccgtattttagccaggaacaggtacggcacatgacaagaaagcaagtaagagcacactacgatgaaatcgaaaagagccgccgcttttggagatagcggccggcacagaacaaaaggagagaaagcattatggcatataccaaatttattccggagctatgggcggagaagatccagcgcgaaaacgaaaagatgctggtgctggcaaagctttgcaaccgccagtgggaaggcgaactaaagaaaaagggcgatacggtgcatatcttgggcatcggcgcgcccaccatcggggattatgacggcacagccatcgaggcgccggaaacgctggcggatacctccattccgctggtgatcgacaaggccaagtatttcaacgtgctggtggacgatgtggaccgccgccaggctgcgggcgatattatggaatacattttgcaggaggccagcgaggcgctggccgtgcaggaggatagcgacattgcaacctgcatttccgccggcgtgaagagcgaaaacaagatcgcggccgccagcgtgacggccactggcgataccagcg

SEQ ID NO: 667 - DNA, 32759 bp, Unknown
  16S sequences of unknown bacteria
catgccgtcatttctgattagagcctcgttcttccgagactttgtcaatactctgatcgttgacaaacctttggtttgtcaacgaggattacccggccgcttgtctacgcaccgccctgcgctaacgcttgcgcggcgttccgtggctgcgcactgcgcttcgctccgtgtgctcgccacttcagcccttcgggccttcgacggacagcgaccgggacgggaatgcatttttcccgcaaatgcaagcatttgctctgcaaaaaatgccagaaatgacgtgcacgccgtcatttctgatttaagcctcgttcttccgatactttgtcaatgctctgagagccgctatcccgcaaaagggatagcggctctgattttcatataaaattaacaaagaatttttttccgaacatattgactttctttgacctttgagtataatagaatcatcgcgaagagatgagcgaggcggtgaaagaccgcaaggaaatggctcccaaaagagccggatgcgaacctgcatacctggcgaacgccagcggtgcgggggcacacgaatggaggtttgcagtatgagtacgtatcttcccacgattttcggtgaaaatttgatggatgtttttgatgattttgatcgcaactttttccgtggctggggcaatgtggatcgcgagttgtatggcaagcacgcgcggcacatgatgaagacggacgtgaaggaagtcgagaacggctacgaagtggatatcgacctgccgggcttcaagaaggatgaaatcacgctggaactgaaggacgggtacctgaccatctcggcgcagaaggcgatcgagaaggacaacgagaagcacgggcgcatgttgcggcaggagcgctacgcgggcatgatgcagcgcagcttctatgtgggcgagcacatcacggaggaagacgtgaaggcttcttacgagagcggcgtgctgcacttggtgatcccgaagaaggacgcgccgaagatgcccgaaaagaaagtcatccagatcgaaggctaaaaacaaataccataaaccaatcgggggctacctcaaggcaatgaggtagcccccgattcgttggcaaaccgcaggtttatgaacgagcagaaaaccggtttgccttatacccatgttttgcgcgcctttcgcgaaaaggcgaattaaaggatgggtgcgctcgacgccttcaggcgacggaacaggcgcgtaagcacgaatatcgcggcaacagagagcacgatttccgcgcacatttgcgcgtaagccaggccgtagagcgggaacagccaattgaggataaacagcgcgggaatctccagcacgatcttgcgcaaaatggcgaaaatcagcgcctcccgtcccatgccgaccgcctggaacacgcccacggcgacgaaatctatgcacaggaaaggaatggccaggcacatgccacgcaaaaagcgcgtgccatattcaatgatcgtgggattgtccataaacatgcggatgagcgaatccgccgcgaaggagtagaaaatggtcacggcaaccatcacgcatagcgcggttcgcaaggtaaagagaatcgtgcgcttcatgcggtcgatgcgccggctggaataggtgtagctcaccagcggcatgatgccctgcgaggaacccagcacgatgtaaaacggcacttggttgatcttctgggcaatgcccatggcggccacggcgtttgcaccgaaggaagaagtgaaattgttgagaatcgtcatgccggtgacgttgagcagattctggatggaggccggcaggcccacgccaaacacgcccaacacgatttcctttttgaagcggaacatcttcggctggatacacacaaaggtgttgccgcgcttcaccgccagcaaagcaaagaaatacaggcaagccacgcaattggaaagaaacgtggccaatcccgcgccttccgcgcccatgttcaggccccagggcaggatgaaaaccggatccagcgcgatgttgagcaaacagccgctcatggtgcctatgctcgcgtgcatggccgcgccctccgagcgcaccagataagccattaccacattgagaattgcgggcaccgcgccaaaattcaccgtccacttcatatagcccgcggtggcctgcgcggtggtttcgtccgcgcccagcagcgaaagcaacggcccgctaaaggccgtgcacagcagcgaaaagacgatgccgcacgcaatcgccatgtaaaagccaaaggccgagctgcgcgaaaccgtttcataatccttgcgccccagcgcgcggctcatcatgctggagctacccacgccaaatagattgttgaccgcgttgaaggccagtagtaccggtgcggcaagcgtgaccgccgcattttcgatgggattgttcagcatgcccacaaaataggtgtccgccaggttgtataagatcatcaccagcgagctgaggatcgtgggcaccgcaagagtcgcaaccgccttgggaatgggcacgctttcaaacaaagcctgccgctggggattttgcatagtatcatctccacaggaaaataaaaagcgccgccggaacgccacctttttgtcattgtagcattccagcgggcaaggcgcaatgcgattgggttagcatgatgtggcttctttttgaactttgcggcttattcctccgcgtcttcctcttctgcgccactgggcttgatatagctttccaaaataaagcggggacggcgcttggtttccatataaattttgccgatatactcgccaatcaggcccagcgcgatgagattcacgccgccgatgagccagatggacatgatcaggctcgtccaacccgccacggcatgccccgtgcagagggaaacgagcgcgtatatgccgaatatcgcgcccagcagcgcgaacagcacccccagcaccgtaatcatgcgaatgggcttgacggaaaaggaggtgatgccctccatggcaaaaccgagcattttcttgagcggatatttggattcgcccgcgaagcgctccgcgcggtcgtaatagacctttttggaagaaaagcccaggagcggcaccatgccgcgcaaaaacaaattgacctcgccaaaacgcagcagcgcttccagcgcgcggtgagagagcaagcggtagtccgcatggttgtccacaatttccgcgccgaacaggcgcatcagcttatagaagccttcagcggtcagacgcttgaaggccgtgtccgtttcgcggctcttgcgcacgccatagaccacgtcacagccctcgcggtaggcgtccagaaagccatgaatggcttccggatcgtcctgcaaatcggcgtcgatggaaatcaccgcgtcgcactggtcgcaggccaacgtcatgcctgcccacagcgcgttctggtgcccggcgttgtgcgcgagcttcgcgccctcaaaacggggatcctcaaagctctcgatgatattccaagtggcgtccttgctgccgtcgtccacaaaaagcacacggctttcgggcgtgacttcgccaaaggaaatcagggaatccatcaattcggaaagcctgcgcgcggtttcgggcagcacttcttcctcattgtaacagggaacgacgatataaagcgtgggtgtcggattcataatgcctccaaattctggttgccaaagcaggcactttgacggttggttgcgtgggagaaaatctggctggccgtgccgccctcgcggctatttcatcaccacattttccgcgccgagcaattcttccagcgcgacgcgattgaaatccgcgcgaacggaatagttttgcggcgcgcgcaaggtgcgattttcgtccgccaggcgcagcgttacgggaatgggtccgggcgtgagcgcgagcagggaaagcgcacggtcgaagcgggcgcgatcgagcttcaaatagagcatgcgcgcggggcgtttttccggcacgggacggggtgcttcgcgcgcaggcgagagatacgcctccggcgcgggcgtttccgagactccctgtcccagggcgcgcgcgctttccaaaatcagcttgggcgcctcatcctcgcgcacgctcaggcggccgttgagcaacaccacgctatcgcccaacagcacggagcggtagcgctcatagacgcggggaaacacgagcacttcggttgcgccatacaaatcttccaactgcacgaaggccatgatctggtcgtttttggtgaccttggtctttacagccgaaaccatgccgcccatggtcacaggcaattgatcgtattgaaggccgtgatcctcgctttcttcctccagggcgcgcagcgtgcgggagctggtttccagcgcgtcgagctgggcgcggtattcatccagcgggtggccggtgatgtacacgcctgtgacttccttttccatggccaacatttcgcggcgggggaattcggccacatctggcagtttgggcgcttcgtgcggttcttcctccagcgcgtcgaacaaggagagctgtccttccaccgcgccgtgggcgcgcttactggccgcgtccatggcccggtcgaaggcggcgagtttctgcgcgcgggaaccgggcagcgaatccatcgcgcccgcgcggatcaggctttccacggcttttttgttcacggcctcgccgggaacgcgcgccgcgtaatcgaacaaatcacgaaacggccctttttcccggcggtttgcctcgataaaggcgatcgcgccgccacccacgctcttcaccgcctgcagaccgaagcggatgcagccgtcctccacggaaaatttcgcgttggaacggttgatatccggcggcaggatcctgatgcccatgcggccacaggactggatgtagaaggcgaccttatccgtgttggtggaaacggaattcatcagcgcggccatgaattccacgggataatacttcttcagccacgcggtttccacggccacgcgcgcgtaggctgcggcgtgcgatttgttgaaagcgtagctggcgaaggcggccatctcgtcataaatctgctcggcggcttcttcgctcacgcccatgcgcaccgcgccggggatttccacggcgccatcgtccttcaccacgccgtggatgaaattttccttttcctgggccataacgtcgtgcttctttttggccatggccttgcgcaccaggtcgctgcggcccagcgaataacccgccaaatcgcgcacgatctgcatcacctgttcctgatagaccatgcagccataggtcacatccaggatgggtttgagcttgggcgtgatataggtcacgctggcgggatcgtgcttaccgcggatgtagcgcgggatggaatccatgggcccgggccggtagagcgaaaccgcggcgatgatatcctcaaaattctctggctgcatggtctgtaaaaactggcgcatgccgccgccttccaactggaagataccatctgtgtcgccgctggcgatcagcgcgtagacggcgggatcgtccatggggatatcctccggccgcatatcggccttgccttccgcgcgcatcatatccaggctgtcgccgatcacgttgagcgtgcgcaggcccaggaagtccatcttcaaaaggcccaacgattccagcgtggtcatggggaactgggtggtgatcaccgcgtcgttggtctgcaggggcacatagtccgaaacgggtttgggcgtgatcagcacgcccgccgcgtgcgtggaagcgtgccggggcatgccctccagcttttgcgcggtatcgatcaattcgcgcacgcgctcctcggtttcataggcggcgtgcaattctggattttgcttgagcgcgcgttccagcgtcatatccagggcgaagggcaccatcttggcgatgcggtcgacctccggatagctcatgcccatcacgcggcccacatcgcgcagcacgccgcgcgcagccatggtgccaaaagtgatgatctgcgccacgtggtccgcgccatatttgtccgccacataggcgatgacctcgccccggcgctcataatcgaaatcgatatccagatcgggcatggacacgcgctctgggtttaagaagcgctcaaagagcaggttgtatttcagcgggtcgatgcccgtgatattcaaggtatacgccacgatggagcccgcgccgctgccgcgccccgggcccaccaggatgccgttcttgcgcgcgtaccggataaaatcccacacgattagaaagtaatccacatagcccatggagcggatgacgtccagttcatactccagccgctcgcgcgcctgcgcgttgtcctgcggatagcgctctttcagcccctcctcgcacagcgcgcgcagggtttcgaaggcgtcctgcccctcgggcagcgggtatttgggcaggtgcagcgtgtgaaaatcgaaatccacccggcaacgctcggcgatcttttgcgtgttttcgatcgcctcagggaacgcggggaacacgcggcgcatctcttcctcgctctttacatagagctggtccgtctccatgcgcatgcggttttcatccgaaagggttttgcccgtttgaatgcacataagcacttcctgcgcgcgcgcgtcctcttcggttagataatggcaatcgttggtggccacgagcggcacgcccatttcccgagaaagcacgaccagctcgggcagcacctgcttctgttcggccaagccgtgatcctgaatttcgataaaataattgccctcgccgaagatttccaggtgctttttcacggattcgcgcgcagcctcgcgccggccgttgagcaaaagctgtggaagctcgccggaaatgcaggcggacaacgcgatcagacctttggcgtatcgccggagcagatcatagtccacgcgaggcttataataaaaaccgcgcgtaaagccctcgctcaccagcttggtcaggttgtgatagccctcatcgttttccgccagcaaaattagatggttgtaatcgcgagcgccgcttaagcggtcgtccatattggggcaaacgtacacctcgcacccgatcacgggatggatgcccgcttttttggccgcctgatagaattccaccacgccatacatcacgccgtggtccgtgatggcgcaggccgtcatgcccagcgccttgagcctttccatcaacggatcgatggaagccgcgccgtcgagcaggctatattgcgtgtgcaggtgcaaatgggcaaacatgcgtttcctcgctttctattgtttcaagttccgactgcagtgcttcagagttgattccattgcggtgcaggcaacgccgtcgcgcattcctcctgcaaataccgctcaaagacacgaaaaaattcgtcgaacgcctccgcatcccgattgccagaggtgtacaaaatatgattccaccaactggcatagccattgaaatcccctattcctcgtccctgataccactcgataaagccgctcagatattccatgggatcctcgtgaaggcagagccggaaagcatgctgcatgccaaataagtgatcgcgcagcgaaagcagggacttttcccccagccacagccctggccgggctttaatctgcgcaaacagcataagttcctcccatttgctagccacccattcacgctcctttcccacctgcgcgttgctctacactcctatagtataccagaaaattgggactttggcgatgttcccgtgaaattttgtggacaaattcagcgcacaaaaaaggcccttcccatagtcgctacccgcgcgccaaaaaattggcgcgtgcgagattgcgctgctgccgcgcactttgccttttcactgctccaaacattaaatcttcgatatatttgcaaaagccactttacaaataaggatgggggtgatataataagaaaccgtcagcagtggtttcgagtccttttttgcgcctgtagctcagctggatagagcaacggccttctaagccgtgggtcgggggttcgaatcccttcgggcgcgccaactcatccggcgtggtgcgcgggcggcctatggtgggtgtagttcagtggttagagcgccaggttgtggccctggagatcgtgggttcaagtcccatcacccaccccatctgccgtccgttgcctcagtcggatttggcttcgccagttgctttggggcgtagccaagcggctaaggcacgagactttgactctcgcattcgcaggttcgatccctgccgccccagccatatgacccattagctcagtcggtagagcatctgacttttaatcagagggtcccgcgttcgagtcgcggatgggtcaccatttttcttcagcttcgtgcgggcgtggcggaatggcagacgcgccagatttaggatctggtgccgagaggcgtatgagttcgagtctcttcgcccgcaccacacgattcttttgcggtagtagctcagttggtagagcgtcgccttgccaaggcgaaggtcgcgagtccgagtctcgtctaccgctccaacaagcgcgggtgtaactcaatggcagagttccagccttccaagctggctacgtgggttcgattcccatcacccgctccacgccaatcgtttgcggtagtagctcagttggtagagcgtcgccttgccaaggcgaaggtcgcgagtccgagtctcgtctaccgctccatatgcaccattagctcagttggtagagcacctgactcttaatcagggtgtccagggttcgagcccctgatggtgtaccaaccaattcacccctggcgcactatggccaggggtgaactgttctattctcgctgtcacatcttccaagccgctctgtccggtttgcgctttgctctgccaattttcaaaatgccatgcgaacgtgatcggcaggttgcgcgggcggtaacccgagcaattcccggcccatgcgcacatatgcgcggtaattttcaatgggaacgccgttgggaatgcggtgatccagcgcgaacaccgtgccgccgcccagcaattccccctgcattttggtctccagctcacggcgcacgtcttccacgctgccgcgcagggcaaatttgtccagaccgcccttaaaggccaggcgcttgccatattttttgcgcagcgcaaggatatccatgcccgccatgggttccgcaggatacatgcaattcacgccagcgtccaggaaatcgtcgatcacgctattcatattcccatcgctatcctgcgaaaacaggcggcacccttgcgtcttgagcggttcccacaccttgcggtaatagggcgcaatgaattcgcgcacttgcttgctacctgccagagggccggtcttgcccgccatgtcttcatgcacgctgagcacatcgatggtgacgaaatccagcacgcgttcaaataccttgaggcaggtatcagccatgtggccgagcatatcgtggatcatttccggctcgtcataaaatgcatagcacagattttcctcgcccatcagcccccgcggttcatcaaagccgccgggcatgcttgccaccaccagcgtgccctctttttgcagcgctttaaggcgcttcaattgttccagatcgatccgttccggcgcaaaatcgtaccagcggcggatgctttcccaatcttcaggacccgttaccggatagctcatgggcagcggcaaggaagcgctctgcttgcacatttgcatttttcggcccattttgtcgatggaatacacgtgcgtggcggtctcttccagcacgcgcggcgcaatgcccgtacgcgcgccggtatcggcgggcgcccaagcgtatttcacgctatcccaaccaaaggcgcgcagcgagatctcatcttcgcttgcgccctgcgcgcgccattccgcatccaaccccaccaaaggcccgaacaattcgcagaacatctcccgaggcgaagcttcaaaggtcatatgcgccaaatattcttctcttgtccagatcataaactacctcctgcgccttttgattgttatgcccatattgcatcgctggccccctgcgttctaagcgggaaaagcatcggtatcgatgaccatggcgctgcttgccgtcccctcgcacagcgcagccaatgtaacataggggatgccattgcgcacgctgcgaaagccaggatggtaatgcccttgaaacacggcggcggtgcgtcctgtttgcaatagcgcgttgatttccgccgcgttttgcaaaatatggcgctgctccacgccaggatccaggcactgatgcaggaaaaagaagtgccggtgcgcagtgtcggccatggcggcgcgcacgcgcgcaagttcctcttccggcaagcgcgtctgcgtccagtctaccgcgccaggccggtagggcttgccctgccaatcgaaattggcgttcaaaaaatgcaacgcgacatcgcccgccacccaagaacagggcgcgatttgcaagccggaaaggcgagtgaattcttccggtgcaaacaccgtgcaatcatggttccccataacgcacgcgcagggcacattcgcactcagcagcgtgctcgcggccgcgcgtaggttgcgctcgttttgcgaaacatcttcttctgcgtcgatcaaatcgcccaggcatacaacgcgctctacgcccgctcgcgaaaaatcctgcacggcctgctgcgcgcgcgaaagcgccaactgcggatagcgccggcccagcatcacttcctggctgcaataatggagatccgtcaaaagaccaatgcgcatgtgcagcgtccccttttctgttcgcgatattcctaattatagcagaacgcgcggcgaaaaacaatggcttcggcggccgcaatcgacacaaagtgctacgtcttgacacaaaacgctatcgcgccgccgcgcagtgccactgcccaacacaaaatggtatttacagcgggcgcgaagcaatgctacaatgcaggcaagaagttaggagcaacccgggctgacgcaggcctggagaggaaggaggggcggctttgaacggaacgcaaaccgccattggtttaagacgcgggcgtctgcggcgcattcagcgcaggctgacgaacgattggcaactctacctattggttttgccggcactggtatacgttttcctgtttcattatatgcctatgtacggcgtacagattgccttcaaggattacagcacgcgcatgggcatctgggccagcccgtgggcagggctaaaacattttgagcgttttttgacctaccccaattgctggaaaatcattcgcaacaccctgtccatcaccctatattccctagccacatttccccttcccattcttgttgcgctactcttcaacgagctggacaaccagcgtttcaagcgcacggtgcaaatggtttcctacgcgccgcactttgtgtccaccgtggtggtgtgttcaattgtaacgctgtttctggaccgcagcaacggcattatcaaccatttgattgtggccctgggaggcgagcggaacgactggctaagcgttccttccatgttttcggacatttacgtctggtccggtgtgtggcagaatacgggctggagtacgatcatctatctggcggcactttccggcgtctcgccggagctgcacgaggccgcgcgcatcgatggcgcgagccgcctgcaaatcgttttgcacatcaacctgccggccatcgcgcccacagtcatcaccatgctgattttgcgctttggtcaggtgatggatctcggctttgaaaaaatctatcttttgcagaattcgctcaatctggacgcatcgcaggtcatcgctacctatgtgtatgaattgggtgtgcgcagtggtcagttcagctattcttcggccattgggctgttcaacactgtgatcaatgtgattttgttgctcatcgtcaaccaggtcagccgcaaggtggcagacatcagtctgtggtaaaggaggcgcgctatgcaaaggacagttggcaggcacatccgcaaatcccgctccgaccgggtatttgacgtgtgcaacgtggcgttcatgctggttttttcgtttttgatgatttatcctctgtatttcactgtgatcgcctccatttccgacccatacgaggtgatcaatggccgcgtatacatcgccccggtggggctcacgctggaggcgtatcagaacgtttttaaagaagaccgcatctggatgggctatcttaacaccataaagtatacggcttttggcacgcttttcaatttgcttttgaccattcccgccgcctacacgctcagcaaaaagcacgttctggggcgccgggcgatgagcatgtatttcctcattcctatgtattttggcggcggcctggtgcccacgtatttgcaggtgaaggccctgggactgatgaacacgccttacacgctgattctgctgggcggggtgagcatgtacaatctgattgtcacgcgcgtgttcttttccacttccatcccagaggcgctgtacgagagcgccaaaattgatggcgccagtgagttgcgcatcttctggcgcattgtgttgccgctagccaagcccattatagcggttatggcgctgttttattccgtcagccactggaacagttatttcaacgccctgatttacatctcccgcgacgaataccaaccgctgcaaatcgtgctgcgcaacatcctgctgagcaaccagatgagcctggccatcctgggcacggataacctggaagccgaggtggtgcaggccgccgcacgccgccagtatctggcgcaaggcatgaaatacgcgctcatcttcatctcgtccgctccgctgctcatcgcctatccctttgtgcaaaagcactttgtgaagggcgtgatgatcggctcggtgaagggttaaccagcggcacgagccgcttgggataaacaaaggaggattggttccgcatgaaaaaactcgtttctctggtgctggcattggtcatgctgctttcgctcgctcccgccgcttttgcccgtgaagcggaagggggccgcaatttctacgattatcacgattacagccagttcccgctgggggacggcagcgattccgcggagaacaccatttccgtggccgtgcgctcggatcccacttacagtgccgacgcctgggatacctggttctggccgtggatgaaacaggcgagcggcctgaacttcgacattgagcaagtgctttccaccgccatcagcgaccgcaagaacctgatgttcgtttccggcgacattcctgatgtgatgatcggctttggtttttcaacctcgcagcttgtgaaatacggccaagtcgaaggccaactgctggcgctcaacgattacatcacgccggaaatcatgccctacctttcccagtggtttgaggattatccggaatacgaggcgctgtgcaccgcaccggatggcaacatctattccttcccctgcttcatggcctacaacccgggcaacagcgagcgcttcttctggaacaccacttggcttgacgaggttggcaaggaaatccccaacacgctggatgagttcctggacgtgctctacgccatgaaagaggcgcggccggattcctatccgctgggcggcggcgccaacggcgacgacccgcgctcctatatcctcaatgccatgggctatctggctcccacttcttccaacaacgacaagggttataacatcgctgtgcgcaatggcgagctggtgatccccggcggcgacgaactctacaaagaattcttgaccatcatgcaccagttgtatgaggatgagatcatcaatccttccttcttcagcatggaaaagaccgctatcgatgctatgatcgccgaggacaagaatggcgcgattcccatctatgcctatctggccacgcccgaggtggaaaagttccagcagtggaccagcggctatccgctcaccagcgaatggaacgacacgaagcaatggctggcggcctccacgctgaacattggcggctgcgtagtgtcggcggactgtgcgaacccagaactggtttgccgctggattgatttcttctttggcgatctgggccacctgtaccagtggaacggccccgccgctaacaacgacgattgcatgggcctgacgaagggctacgtgatcgacccggtgaccggcgcgagcacctatgtggacgtgacggatggcacctatgaaagcaacctggtgcgtaactacgcgcagatgatgggcttcttcaatgtgttcggcgcgcgcggccatgccttgggcaatccggacatgaccgagctgaacatcatgcagaagttctatggcgcggagatgaccgaatcgacctatgacctcaccaacggcgaccagcactaccgctattccatgcttcaggcgatcacgccctacgaggtgagcgatttcccctatatcatctatttcgacgacgagaccaacaacagcatcagcgatctggcctcggtaatcaccccctatatcgaaaccgaaacggccaagttcatcacgggtgtgcgcgacttgagcgaattcgatacctatctggaagaactcaaggcgcttgactttgacacgtatttggggtattatcaagaggcatacgacgcatatctagcggcgaagtaagaaaaaacacagctttgtacgggcaatctgcgcgcatggcgtcgcgggttgcccgtgccttggaaagggaaacatctatggcgaagcgaaaggaatccagcatgcgtttgcggtattttggctcctatatgggcgtggtgctgtgcgcgtgcgtattgatcggcatgctgggcctcagccgtgccataaacgagatctacgaagcgagccggctcgagtatcaggagcgcatggagctggcagtggaagatttgtgcgcccagcaggaaatcctggagaatatttcctttcgcatcaaaagcaccgccctgtaccggcccttctttacggagcgtaacgcctattatgaaacggaagtcgtggaagacattctgaaataccgggattattcccccctgatcgatcaatattatctgctgcagcgggaaacaggcgatgtatattcgccccagggcaagttgacatacgcccaattcgcccaatatcggctgcaagtggaggaatcgtggctcgacggcctgttttccggcatggcaatgcagattttggcgcatccgcatgatccggatacgctgctttttgtgcttcccttccgcgtgcagacggacggcgtacacgtgccggacacctgcctgattttcctgatcgagcgtgccgccttggccgagcgtctggagcgcatcagcgccctggatccctccatgctcgccgtctactggcgggattttctgctattggggaatccatccatcctggagcgggaaacgcttttggtcaccagccaggaggcggactggcagatcttttcttttgtgcagcccgagcgcatcaaccagcgcctcacggatttccggcgctatttcatcctggtgctcaccctaggaacggtttttatccttgcgctggccgcgctgattgccggccgcagctaccgtcccataagccgcttgactgcgcgactgaacattccacaaaacgccagcgcggaggacatcgaggcggcggtgaatgccctgcaggacgcgcagagctacaccaagcagcaattgcaaaacgacctggccggcatcgcccgccagcggcgggaaatcgccaaacagctactgtttgcgcgtctgaacggcatgcgcgacgcgcgcctggacgcgcaactggcggaggcgggcatcgcgctgtcccatccgttgttttgcgtggtgctggtgaaatggctggatggcaagagtcgggaagaaaccgttgcttccatggtgtacgcgctggcggacggcgacatgagcctgtatccggcgggactgtaccgcgcgggcgagagcattttgttgctcaactttgctctgcgggagcaactggaggattttgtgatggtgctgcgcgaaagcctggaggtggagggcggaagggtagcgctgttcgtgggcgatatctgcgaggacatggggcagatcaccctctcctttgtgagcgccatcgcgcgccgggaagcggaattttcgggagaaacggagcgaatcgggccaatggaagcgggttggtatgatgaccggcaggtgcggctgatgatgcaggccctgcgagagggcaattccatcaaggcgcaaacctgtctggacgcgctttgccagatgctgtgggaaaaataccccatgatggcgctgcagcgttgcatttgggcggatgttggcagccagttgctcagaacggtcgcgcagatgaacgtgcatctggattccgagcaattgcacatgttcctcatggcggtggatacgcacagctttcagcagcatctttcgcgggtgctggatcaggccatcgccgcttcgaatgcgcgcacggcccaagaaaaccagcaaatggagcgcaatgtggtggaatacattcaggcgcacctgttttcgccgcagttcaccatcgccgaggtggcgggcgcttttgacacttcggaacgcaaggtaggcgccattataaaattggcgacgggcctgccttataaagagtttatcattcaactgcgcatggagcgcgccaaagaactgctcacccgggaggattacaatgtggcgcagacgggcgaagcggtagggtataacaacattccctactttattaaaactttccgcaatttcacgggctacacgcccggcgaataccggaaactgtttgaggaaaaggaggatgcgcgatgaatgtgcattttgcggtaatcaccgatttgcacgtggatatcatgcacgatggcgtagcgcgtatgcaggcattctgtgaggccgcggtggcggaacatgtggattttttgctgcacttgggggatatgcagtatcccgaggcggattttttgcgccaatacgcgcccgaaagcctggaaaagcgaaagggccgcgcctggtttgtgtgcgaccgggatgatgaaaagctggcggttaaacgcctagcggcgcaaactgggctgaaattgtatggcgtgctgggcaaccacgatatggattcctgcgataaggccacggcctgccgctattggggcatgccagggccgcgatacagttttgtggaaggcggcgtgcgctttatcgccttggacaccaattttgtccgcgaaggtgcgaaaatgctggattttgaccattgcaattatcgcggccgccgcgcggaagacatcggctttttgacccgcccgcagctcgactggctggagcaagaaatcctgcgttcgcaggaaccgtgcgtgctgctctcgcacgcggccctgggcgacgacctcctctgcgcgcacgatcgcgcggcgctgtgggatatgctcgaacgggtcaacagcgaccggcggcgcgtgatcttggcgctcaatgggcacaaccacgtcgatggcatgagcgtgcgccggggcgtgcctttcatcagcgtcaacagcgcctcgaacatctggatcggccaccaatacgacaccgtccgctatagcgagaccatctgccgcacttatccacacatcaagggctgcgcgccctatcgcgatgcgctcttcgccctgttcgccatcgacgattcgggcatatccatgcaggggcgcagcacgggctttgtgggcccttcgccgcaggaattgggctttcccaaagaggcgtccttcttcgagcccgcgcctctggtgcgctcgcgctctctgccattgcgcgcccttgcgggcgagggccctgtcgctgaatagcggcaggatctcctcttcgggcgctgccgcgcggttgcctgccacgcaaaggggcgcgtgttgctatccgggtttccgcaacacgcgccccctttttgcgccgctgttatgcggtttccccgcccgcccagggaagcacgattgcgcctggcaaggcagcgaggttctctctcgtgatttccaaggtggcggatttcgcgcgcgtggcgccggtgagcgcgcaaaaccgcgtttcatccgcgatggggaaattgccgttcaggcagggtgttttgaagtgcatggggatggcgatgcgcggtttcacgcgctcgatgacctggatggccgcgctagtatcgatggtatagaaaccgccgatgggaaccagcagcacatcgatgttttgcaatccatccacgcccgaaacatggcccagatcgcccaaatgcgccaccgaaagcccttcgccctggaacacaaagatcaggttttcaccgcgcttggcgccgccctgatcgtcgtgataagcgctgcgcgtggcgatgctgacgccgccaatctcccattcgcctttggtggaaagcacgcgcgggcaagcgatacccgtggtgtcgttatggtcaaaatgctggtggctctcggtgatcacgtctgcgcgcgcgggcttttgcggatagccaacgctgcaggggtcggtcacgatggtcagtccggccatttccaaggcaaacgtcgagtgtccataaaatgtgatcttcatccagattcctccctttcgatttgttgaatcaatgcttccagcatcgcaagcccgtcatcttgctcgtgcgtgcgcaggcaaaccgccatacggccccgcgcggcgcgcacaagcgcgggaaactggctatccctgtgcgcggtttgcttgagcagctccaagtagacgcgctgcgtttccggcggataaccggtgatgggcgaaagcgcgtataagccgccagcgcgcgcttcctgcgcaaagcccggcacgggcgcgccgcagcgggtgacgaagagcgcatccttgcgatcgagcttgagcacggcctcctcgcccaaggcttgccgggcttgatcgcgccaaaatgccaagctaccgcccatacagttcccggaacacatccgatagcgcgtctaccgtgtcttgcggggtcatggaaacgatgccataacgctccgccgcgcgttcgcccgcccggccgtggatctcgctcgccatccaggcggcggtctccggcggatacccctgcgccaacagcgcgccgagcacgccggcaagcgcgtcgccgctaccgcccttggccatgcccacgctgccgctaccgctaacccaatcgcgttcgcccgcgatgtagctgtccgcgcccttgagcagggctacagggccgagtgcatggagcgcgcgcgcgtcttccaggcaggaatgggcgctccgtcccagcaggcgggcggcttctcccggatgcggcgtaattacgtggcgcggccgcaaaagtgcgcgcaaagcatcatcccgcgcgatgtggttgagcgcgtccgcgtccacagcggcgggcaggccgcaggatagcgcccagcgcacgacgcacgcgcacgcgcgcagggatagcccgcagccaatggacagcgcggttttgcccgcgagcgcgcccttcaggaggggaatcgcgccctccgcaatggctccatcctcttccggcaagggcagacacatggcgcagggctgcgcgatctgcaagatgggcagcagggattgcgggcaagccacggtcgtgagccccacgccggagcgcagcgcggcggcagtggcgatcagcgccgcgcccgccatgccgcgcgaacccgcgatgatgagcaggtggccgaaatcgttcttatgcgcggcgcgcggacggggcaaaagcgcagcgcgcacgtcgtccatggtgacagtatgcatcaatttccctccaatattgccacggcggcggccatatcgccggtgtgcgtgatggaaagatggatggtttcgccgcccagcgcttgcatgcgttccagcgccttgcccgaaagcgcgcacaggggcttgcccagcgcgtccaccctcacttcgatggccgcggggccaaacccgcgaaagcccgtgcccaacgccttgaccacggcttctttggccgcaaaaatgcccgcggcggtctgcgcgccgcgctcgtcgatgcgcgcgttttccgctggcgtaaaaatgcgcgcgcgaaagtgcggcttttcgcaagccttcgcaatgcggccaatttctaccaaatcgaggcccaatccaagcaccatgcgcgtttttccccttcccgcattttcctatattatagcacgcgcgacacaaatcgcgcaaaggattttcattcgaaggcttgtaaaacttgcgaaatactattataatatcatctgggcgcattcgccgctgacgctgcgcgcccggcatatgcaatatcgggccgcgcgcccgtgaaaaccaatggcaagaggagaaaacacatgcaggctacgcaacgcgtcgcacaggcgctcacccgcaacatcggcaaggttgtgatcggcaaggaaaccgccattgaactgatgctcaacgccatcttgtgcaaagggcacgtgttgatcgaagacgtgcccggtgtgggcaaaaccacgctggccagcgcgttggcgcgttcgctggattgttcgttcaagcgcattcagttcacgccagacatcacgcccagcgacatcacaggcttttccgtggtgaatttcaaaaccggcgagctggaatacaagcagggcctggtgatgagccagatcgtgctggcggacgagatcaaccgcacgtcgcccaaaacgcaatccagccttctggaagtaatggaggaagggcaggtgacggtcgacggcgtgacctaccgcatgcccgcgcctttcatcgtgctggccacgcagaaccccgtggattttgtgggcacctatccgctgccggaagcgcagttggatcgcttctttatgaaaatttccatcggttatcccacggcggaagaagaggccgccattctggagcgccaggccacgggccaacgtcccatcgaggatttgcgcgccatctgcaccggggaagacatcgtggccttgcaagggcaggtcaattccgtgtacgcctctcccgaggtgcgcgcctatatcgcgcgcatttgccaggcctcgcgcaagcacgcggccttgcaactgggcatttccacgcgcggcgcgattttccttttgcgcagcgcacaagcgtgcgcgctgctggccggacgcgattatgtgatcccggaagacgtgcaaaaaatggccgcgccggtgctcgcgcaccgcatccagctcagtcctgaggcgcgcatgcgcaatatgacgccggaacgcgcgctttccagcgtgatgagcggcgtgcaggtgccggtaaaggtatagggccatgcatgcgagaacggccttgtttgcgctcgcggcggcgacgcttttggtttcggcgctgtccacgggcgcgggcatttattatctgctcttctttttgctggccgcgttgtttttgttggcggcgtgcagcgtgctgctcacggcgttttccctgaaagtggatgtaaagggcgtgcgcgcacgcgccatgcgcggcgaaaacattcctctaatcgtaaccgcgcggcacatgtgcccgctaccggtggcggatgtgaagctgatcttcgccatgccggaggacgatttgggcgcgaacaccatcacagcgtttttgccgccgtttgcccggcgcgagttccgctttgtaatgcgctgcccgcaccggggcgtatatgaaacgggcatggaacgcgccgtgatttcggatgtgttcggcctcatcgaattgcgccgccgcctgcgcgggcagaaagtgaaggtggaagtgctgccgcgcgtgcgcgaactggcggcgctggaactgcgcgcgggtgaaacggggccggaatcccgcagccgcgcggcggaggacgcgagctcgccttccggcgtgcgcgcctggcaggacggcgatgtgctcaaaaaagtgcactggaagctcaccatgcgcaggcgggaaatcctcgtgcgcacctatgaagaatcggcccggcccgatactctgattttgccggatctgtcgccgatcaacgcgctgaaggatcaggcgctttccattgaggattgtgtgtgcgaaatttgcctgggcgccgcgcgcgcgcagctcatggccaacgaccccgtaagcatgcctctcaccagcgccgcgccctcggaactttcgggccgctccatcgcggaagcggctggctttcaaacggcgttggcgcgcgtgcagttcgatagcccctattcttatgaacaagtgcttttgagcatgtcgcgccgcatgcagcgcacgggcggcgtggtgctcgtgaccccgcggctgaccatgcgcattgcggacgcggcggtgcgcatgcggcaaatgggcatgacggtaaacgtattctggatttcggacgcgcagcgcgacgaagcgcttgcgctcaccgcgcggctcaagctggctggcgtgggcgcgcgcgtgatcaatccatggacggcggaggaatcggcatgaacatacgcgcgaaaaagcccctggagcttgcggcaaccgcgctggccgcggcgctgttcgccggttccgtggcgcacatcgccgcgcgcgcgttgggcatatccattggcgcggcgcaactgtatctggcggcggcgtgcgcgagcgtacccgtggccgcgtgttattttcacaaatgggcgggcctcgccgcgtgcctggcaggccttgccgcgctagcgtttctattccgcgcggaagcggccagcgcgctgagcgctttgaccgccgcaacgcccgcgctgagcgattggggcccgtttgcggcgggcgctggcagcgccgtactggctttgctcacgtttgcgctgtgccgttcgcgcggcggcgcttatcccgcgttcgcgctgctcgcggtcgtgctggtgatggcctgggaactggacgcggatttttcgctttggcgggcgttccccgcgctgatagcgctctgcgccatgctggcgggcagtgcgaatggttccgcgggcctgttgcgcgcgttgctaccatccgcgctgatcgcggcgctactggcgaccctgctcgtgcccagcgggcgcgtagtgtatccgccgctggagcaggccgcgcaaaccgcgcgcgcgatctttgaggattatttccgctttacgcattcgcgcgtggcgtattctttgtatatggatggatataaaccgctgggcgaggcgctcggcggcccggccacgccggatagcgaagtggtgatgcgcgtggaaagcgaggaagacgtgctgtatctgcgcggctccattcgcgatacgtataccggcgcggcttggacggacgattcggtgaaaagccggtatctgtttatcgaccccatccgcctgggcgtgcgcgccgaaatcttcgaaacccatccagaaaacgccgccgcgttccgcgaggtgcaggcgagcattgagtttttggatgaaggcaccagcacgctctttgtgccgcaccgggtgacggacatcgaagcgccggtttccatggccatctatttcaatacggcgggcgaagtcttcctgccgcgcgatgtggaggcgggcgacgcctattcgttcaccgcgctggcgccagaggatgaggcagtgctcgcgccgctttcgggcgtgaccgcgctggaagaggctgagccggcttatacgcaactgcccgcgtcggtggacgcgcgcgtgtatgagttggccgccagcatcaccgccggcgcgcaaaccgattacgcgaaagcggccgccatccgcgattacctgcaggccaattacgcgtacacgcttgaaggcgcgtatgtcgatcccagtcaggacttcgtttcggcctttttgttcgatttgcgagaaggctactgcacgtatttcgccagcgccatggcggtgctcgcgcgcgcggccgggctgcaatcccgctatgtggagggctatcgcgtttcgccagaaggcggcgtagcgctggtgacgggcctggacgcgcacgcttgggcagaggtgtacgtcgcggggctgggttggctggtgtttgaagccacgcccggcggcggtgatccctcggagggcaatggcgcgccagaaggcggcgaatggatggaacaggagcctacgcccacgcctacaccagcgggcggagtaggcattcccacgcccacgccagattcgggcgcaaacgcgcctacgcccaccccgtcgcccacgctgccgtctagcgcggagggcagcacgccttccccttctcccggcacggcgggcaacacgcccacgcctccgccatccgctttggacacgcccactcccccaccgccggatagcgaaaacgatgcgccgtccgaaccgcccaatcttacctggctatggtggttgttgagcattctggcgctcctggcgctggcggcattcggcttgtggcgcaggctgcggagcagcgaaccggcgctggtggccgcctccgtgcgcgataaggatgtgaaattgctcgtctggtaccgcgcgctgctgggcgtgtttgccgccgagggccaattcccggatagcggcgagtcccccgcgcagtttgcgcaccgcatgcgcgcagcggggctggcgacagagacgttcgaacgctttgccgccgcggtgatggcggcgcgctatgcgggcaaaagcgcaaacggcgagcaactggaatgggccgcgcaggcttatgcggaattgctgggccagctgcgcccccgcgaacgcgcacgctatatccgcgcgcggttgttacacggtctgggcgatctttcgcacattccatgatacgcgcccaaacaaataagaaagcctggttgaccgtcgcacacggtcagccaggctttctgcctgcggtgaaaactttggttcaatcgccactcaagtggccggtcatccagccctcatattcgtccagaaaatcttccgccgcttttaccatgcgcacgcccaccagcgtttcatccacaaagccaaaggtgatcgtaaggccgccaaaataccggtcgatgatctgcacctgcagttgcagcttttgcggctcaatccaaccggcggaggccgcgcaatcgtagcggaaatccgtcaattcatgcacattcccgtattcatccgaatagccgcgctgcgggaatttgccatagagattgcgctgcatgccaaattccaggcgctgttcgccctgcgcgttccaatagtggaagcaggccgcgccatcttcgccaaattccagcgaaaagcgcgtgatgcccatgggattttcttcgcagagataggttttaccctgcacggcggcggcaaagggcgaggcggcggcgccgtgcgccacgcgcagggaaagcggctgatccaaatcaaaggattccgcctgagtagactgaccggagagcgcgggcacgaggatatcgaaaaccgcgccgaagatggtggcgccagcctgctcgcgattgatctggttatcgcctgtgcagacgaagatgaagtccttttccggcaggcaaatggcgaattggcagcccatgccattgaaggcaaagccgttctgttcggttttccagatctgatagccatacccccacgcgtcgtgggcgttgtggcccgtgaaatcgttggttgtctggcaggcggtggcggcctgcaggaattcgcggcttaagatctgctcgccttcccacgcgcccaagttcatcacaaagcgggcaaaggccgccaacgcgcgcggtgtgcagatcagggcggaatcgccccaggcggttccatccggcgttttgagcatatgcgcggattcgaacccgcccaagcgattgagcacgcggcttttgaggtattccaaaagaggcatgccgctcaggcgctcaaccaacgcgccgaggatgtaagaacccgtggaatcgtaatcgaacagcgcgcccgcgggcttgaccggctggtgcgaaaaatagaacgcggtgcggtccacaacgcccggctggaaccaattcatgccagaaaagcaagtggacatcatcagcatatgccgcacggtttgcttttgcaaaaggggcggcacactttcgggcagtttatccgggaaaaaacggacgatgggatcgtcaagcgacagttttccctcctggcagagaaagccaatggcaatggcgacaaacgatttggtgacggaatacatccggtgcggcgtttgcgcggtgaagggcgcccagtatttttcaaagaaaatttcctcgccgcgcatcatgagcacgctgtgcatgcgcatttctttcttctccagcacctgcatgaattgcgcgagggcctccacgggaaaggccacacgctccggcgtggcatgcttgatcatggaagaaccgcctcctaatattgattctaggtagccatattttacaatgaagagcacaaactgtcaattgacaaaatgcagacgggtgtgtaatattaaggataaaatggacaggaattttcagctggagtgtgaatagataccatagcgcgggaggatgacatggggaagcactggaaccgcaggagcaaacgaatctatctggtggtgttttgctgcctggcttttttggcggggagcgttttggtatttgctggccacaaaaacatcgagcaagagcgcatttcctgggaacgcatgctcaccgaggaagcggaaagcgcgttcaaccatatcgagcagcagatttccgcgggcatccaatcgtgcaatagcgtctttctttcgcgttggtattcgcatttccgcaatgtggcgggcgtttatgccgcggaatttgaggacggactcaaacgcatggaaatcatcagcgatttgaattcccgctgcgcagccttcccggtggtgacaaacatcgtgatcgctacgcccgcgctggacacggtcatcagccgggatggctggttcacgctggatttgtggaaccaagtctacgccagcacgccgatcgacgcttcgggcggcgatacggtagcgcccaccatgcagacgacggatgaggatacctttgccatcgccctgcaagaccccaccagccgccgcgataaaagcgcgattttcctgctgatttcccgcaaggaggcgcaggagatggtggtagagacgctttccgaacaagcgacagaggtgcgcctgctttatgctgggcaagaagtgtttgcctatggcgcgcgggtcgagggcaatgtggcgcgcgaatgccatgccacgggcatgaatttggtgctggaggcggcattttggagctacgcgcaggctggcttgccatcggcgctgttcgcctatggaattttattccttgcgctgcttttgggggccatattgctcgcctttcccctcacgattgtcatcgttcgccccctcaacgagatgatcttgcgctttggcggcgcttcggacgatttggatgcgccattccgcttcatttacgcctatgtggacgcgtttgcccgcaagcacgagcgcctcaaccaggaaaacgattcgctgcgcgaatcgcgcgagcgcattctcgcgctcatgcacaacgagatttttctgggcatgctcaccaacccggaatacgatttcgaggcggagtatgtgcgcatcggcttcccctgggtggcgcaagaaaaaccgttcctgctggccgtgtgccaggagcagcgggatctgccgcacttcgaccttcctggcgcgctgggttgcgcgcaagcgcccatggatgggcaaatctatttgctgtattggttcgcggaagaaggccaggcacaggaagcgcgcgaagaactgtgcgattgcctggcgcaagcgggcaggttccacgccgtttccccggtgcaaagcgacgcgcgcgcgttgcacggcgcgtatagcgcgctgcgggaagaattggcaaagcagcgccgacaatatctggaactgcccgtagcgctgcaagcgaaactggtgacgggaatccgcgcgggcaagcgggaagagagcggccttttgctggcggaagcgctggagcgctacaatcccatggcagttttgcaccttttgctgcgcgtggcggacgaatgcgaattcgatctgggcgtggatatggcgtattttgccggattgcgcgaagacgagcggcgcgaacggctcgggccgctgctggaagcgagcgtgaaggcgctgtgccagtattttgccgacgaacgccgcagcatgaataacggggaaggcaaagaaatctgcgaattcatccgcgaaaactattgcagcgaagatatgtcggtcaacctgttggcagggcgcttcaatatgcatcgcacgctggtttccaagctggtaaaggcggaaacgggcgaaaccttttccaactatctttcccgcctgcgcatggagcgcgcggcggaactcttgcgcgctggaaactgcaccgcggcgtatgtcggcgagcaggtgggcattcccaattatcccacgttcaagcgcacgttcatccggcactacggttgcgcgccccgggaatgggcggcagaaaatcgaaattcttgagaggaagcgcagttgtattaccggcaaaatagccaaaaacaggcgcagaggtggtaggcaaatggtgaaagcaaaatcatcaccatttgaatattgacattccgcgctgttttcgtgaataatatacgcaatcggaggggcaagaattcacccctttggcgggtggcgatgcgcagcgccgtccgccgcggcaacgcttctttgttaagaacgttttgcggcacggcccagtgccgcggacggaaggacggaaaggagagctatcccttatgatgaaaaaatggatttgcctggcgctgtgcctgctgatggtttccggttgcgcgctggcctatgacggtaccgcgcccatcgccgaagagccgatcaccatttcggtgctgacgaccaatccagcttcgctcctcacggactttgccaacatgacctggtggcaggaagcgctcaagcgcgccaatgtggtgctagaagtggaaatgatcgatccgtcttcctatgcggatgtgatcaagccgcgcctggcggcgggcatcgacctgccggatctggtttatgtggggtccaaggacgaagacatggcgtatgtcaattccggcctgttcctggatttgacggaatactacgatacgatggccttcaacctgaacaaacgctttgaggaatatcccaccctcaaatcccagctcaccacgccggatggcagcatctattatattccatatatcttgacgacggactccaacatgcgcactatgatgctcaacgcgcagtttgtggaggccgtgggcatgacgatggaggagatcacggacatcgattcctacaccgagtatctctataaggtgaaggaaatggatgccaacggcaacggcgacccggacgatgaggttccgctcttcctgcgcggcagcggctatcttgcgctgttgggcatgtattggggcatggatctaggcgatagcggcggcttccgactggacgaaaacggcgccgtggtgtgcgactatgtgagcgaggaataccgcgagttcctggagtgggcgcatcagttgtatgtcgatggcatcatttacaacgagtttgccaccagcagctttgatatccaacaggcgctgctcacttcgaaccagatcggctcgatggcgcacttcatttccaacatgacggggtattcccagaccattgatcccgaatgggagttcaatgtggatgaaccgatcatgcaagccgtggcgctttccggcccgtatagcggccccgtggtgtatggccgcgatgccttcggcgcttgcttcgcgatttccgccacctgcgagcatcccgaggaagtgttcgccttctgcgattatctgatgagcgacgaggtgggcgtgctcacctggtacggcattgaaggcgtggactacaacatcgtggacggcgagtacgtcttcaccgatctgtatttgaacaacgaggacgactaccttggcaaggcgggttataactttgcgggtctgcccagctatcagctggactacatgagcaagcaatgcgaccaggtgcgccagcaggcgctggatctcgcgccctatgtgtacaacccaactttccccttctattacaagctggaagaggaaaatgagatcatcaacgcctatagggccgacttggatacgtatttctccgagaacctggtggcgtttgtgatgggcacccgctcgctggatgaatgggacgcgtatgtgtccaccgtggaatccatggggctttcggagctcgtgagcgtgtaccaggcggcggcggatcgcgccgcgcaaactgcggaataatcgcagaaccgtttctcccgaatcgctcgccgcgcggccaaagccgtgcggcgggcatggccttttcgcggccgaaaacaggggccgtaccataaaggaggcgcaaccatgaccgagccttattcgcttgccgcacaaaaaagcggcctgggatacaggattttgcgggccatcaagcgggataagctcctgtttttgatgttcttgcccatatttgcgtattacatcatttttaactacattcccatgacgggcgcgatcatttccttcaagcaattccgccccggcggcgggatttacaatggcgattgggtgggactaaaatggttcattcagttttttgaatcgccctttgcctatcgcaccatccgcaatacggtgctgatttcgttttattccatcctgtttggcttcccaatgcccatcctcttcgccgtgtgcgtgatggaaatccgccacaacaaggcgcggcgcgtattgcaaaccgtgagctacctgccgcactttatttccactgtggtgttggtgggcatgatcaacaactttttcacgatgaacaacggcatcgtgaacatgctcatttccctgctaggcggggaagaaatcaatttcctggtgaatccccgttggttccgcacgctctatgtaggttccagcgtatggcaaagttttgggttcaattccatcatctatatcgccgcgatcaccggcatcgaccccacgctgtatgaagcgggcaaaatggatggcatatcccgcttccaggaagtggtgtatatcaccattcccatgatttccagcaccatcatcatgctgttcatcatgcaggtgggtcgcatcatgagcgtaggctttgagaaggtgttcctgatgtatagcccggcggtttacgagacggcggacgtcatctccacctatgtataccgcaaaggcattgaatccagcaattatggcttcagctcggctgtgggtctgttcaattccgtggtcaatttcgcgtttgtgttcgccgcgaacagcatctgccggaagctgacccacaacagcctgtggtgaggagggacagcatatggcaaaacagcgcacgttggaccggccgcaaaaaggcgatatggtgtatatggcactggtatatgtgctggcggtggtggcctttgtggccacgctatatccgttcctgtatgtcatcgcggtttcctttagcgattccaaggcggtgtacgggggcgaagtgtatctgtttcccaaggacgttaccctggcaggctacgaacaggttttgaaccagccggatctgtggctgaaatatgggaacaccattctgtataccgcggcgggcacgctgttcaacatcgtagccaccacgctggccgcgtatccgctttcccgcacgcgcttttgcgcgcgccgctttttgaatttctttatcacattcacgatgtatttttccggcggcatgatccccacctatttgttggtgaccaatctggggctgtacaattcccgctgggtgatgatcattccctcgctgctatcgacctataacgtgatggtgtgccgcagcgccttctccggcattccagaagaggtgatcgaaagcgcggaaatcgacggcagcaacgattttcaaacgtttttccgcattgccgtgcggctgatcacgcctacgctggcggtgctcaccctgtattatgccgtggcgcactggaacgatttcttcaccgctttgctgtacatcagcgatgaatcgctcatgcccatgcaggtgctgctgcgccgcgtgctgatccagtcttccagcgagctgatcggcaatatggtgacggacgacaaagccgccgcctccattcagatccgctatgtgaccatcgtggtggcaacattgcccattttggtgatttatccgctgttgcagcggtatttcgtgaagggcgttatgctgggcgcggtaaaaggataagcaggggaaaaacaaaaaacggcctgtgcggacgagggcaaatctcgcttatccgcacaggctttttcagcgctttggcgagcaacactataagtcccaggcgccgctgcgcgttccgcgaaagcaattggggattttggcatagttttgggggcaaattccctggaaatgcggcgcttcatttgctatgatatagagggacgcagtgcatccagggaatgggagggcaaattcgatggaatacgtgcaattgttgttggcggtggttttgctggcggtggatttcgcctttgtgaaactctatcaaatccggcaggggcaggggatgcgcgccagtttgcaatacagcgcggtacaagggctattgtgcgcgctggtgctatttggcatcaatggattccgcctgagcgccacgccattttcgctcggcatggcctttttgagcggcgcgctggccatggcgtataagctgattggcttccgcatcctg

SEQ ID NO: 668 - DNA, 4407 bp, Unknown
  16S sequences of unknown bacteria
cccttgaatcccgctccggcaaaaccggtgcgcacatttttgttccttacttataagaataccataaacgaaccaaaagagaaaggtggtttttcacaatgttcctgttcttttgtggaaaaagtccccgcaacgaaggcgcggcctttgtggctcccaacgctaccgtgcagggcgatgtgatcctgaagcccggctccaccgtatggtatggggccgtgctgcgcggcgacgacggtaccctgaccctcggcgagaacagcaacgtgcaggacaatgccgtgctgcactgcgacgtaggcggggccgtgaccctgggccgcagcgtcaccgtgggccacagcgccgtggtacacggctgcaccgtgggcgacggcaccctgatcgggatgcacgccaccctgctgaaccactgcgtggtgggcaaaaactgcatcatcggggccggggcactggtgccggagggcatggtcatccccgacggatcggtggccgtgggcgtccctgcccgggtgatcaaacccgtgaccgaggcacagatcgccgcaaacctccacaatgccgcccactatgtggagcatggcaaagtgcacgcacaggaactgaaaatcacagcagattgaccaatttctgccgcattgcaaggatcatgttgcattccagttgcacatcgcgtatgataaaagcaggtaatatctgctttatttctgagaggaggatgtttatgtcctgtaaaatttcccgccgcagcttcctgaaagtttccggctgcctgatgctcggctctgcggtatccggcctgctttgcggcgcaggcgaccctgcggagggcggcgctgccgtgcccacggtaggcggcctgcgggtgaattacgtccgtgcctttgccaaggattacggaaataatttccggcagatggagatccatctgaatatagagaacaccaattcatctgcggcctatttcaatcaagaaaactttgttcccatgctcggaaacagccgttacggcggagcgtttacctttaccggcctgagcaagtggaacggctccagatatgtgcaggacgtccagctgaaagccggggagacccagaccatctcttacagctgcaagctgcagacggaggatctgagcgccggtctgcggaccgttgaccctgcaccctggagcctcacgctgctttacggcgggcagcgccagacctttaccggctacctgcttccggatcattacagcaccgaatacaccgccgggccggtggaaagcaccgtcctgccgtcggtgggcggcatcgtactttccggtttctggagcagtgattttcccacccaggtcccttcttacagtctgccgatctactttaccatgcagaacagcaatgacacagccgcccagctgccgttccgtggcgttgccgaaaacggggatgttctggacaatttcaccatccggatggacggccagccgcggaatcattaccggctctatgcctgtacccatacttcccgtttcactccagaggaaaaaggccaccttgaaaccctccagccgcaggaaatctgttttgcggaaaccgggatttcgctgaccaaagacgagtacagcaccctgtacacaacggggcatacgctggagatcaccttttcctacggcgatgaaagtgtgaccgtgcgcggcaatacccgaaccggaatctttgaagcaatctgacgtattttcatttaaaatttctgtttttttgattttttcacaaaaagataatgacttttcctgcaaaatcgggtatactagggcctgtaagggacgcggggccgcaaccgcccccttacacatgattcctcctcacaccaaagcaataccccaaacagagaacccctccggtgtaccgcaagcgccggaggggttctctgtttgtttttgtcttttttatgcatgcgccagccttgcggcaaatacggtgagcacgatcttcgggttcacctgtgcgcccagccgctggatggcagcttcggccagccgcagggtacgctgggcctgctggccctgtaccggggcatgggggctgccctgcagccccgccgctgccacggcccggaggtcccgcaaaagagctgccgcaccggccttgtctttttcatagggggccagcagcacggcggcggtgtagctgtcgcccgcctgcgcggcccgggccagttccatggccttgtccacctgctcggtgcgagccttgtcgcgggccgccgtgagcaccgtgccaatgtggccgtcgaacagttcactgtagagtgccgccgtctttttgtccaccccatgggcggtgcagtagcgggcacagtccgccggggacaccggcgcgatggcaaagctgacgcagcggctgcggatggtgggcagcaccccggccagcgaatcggccgtgagcaggaagagcacgccctccggcggctcctccatgaccttcagcagggcgttggcggattcctcgttcatgcgctccacatgatacagcagcaccgcgcggccctcggccgacaggctggtgttgaagatctcgctgcgcatggcggtgacctggctgaccagataccggccgccagcccccatgccctccaccgagatggcttcgcgcacgatgccggtctcgatctggccgctgtcgcgtttgccggccttgcccacagcgcggcagcattcgccccgcagcagggcctcggcgggggcaccaccggccggatagagataatctgcggcaatgcagcgggccgcaaacccggcccccagcccctcttcgcccaccagcaatacgctgtgggtcaagcggcgggacgccagcatctggtgcacgctggttttcagttctgcgttgccttccatgcggtccagcatcatggtggatatgctccttttgctttatgcttcacctgccatcggcaggccggttccgagtgacagcagtttaccgccggttcttgcgcttccactgctcgcggcggatccaggcccgcacactgcggtaggccatggggccaaagaatgcccagacgttcagcatactgagcaggtagctcagcttgccggccagcggcgcggacaggaagctgaacacccacagggccgccgcaaagaagccgaaatacttcacccggatggggatcacgaagaacagcagcagctgtacctccgggtacagcatggcaaaggccagcagcagcgaaagggacagacagtaagtgctggccgtcacgccggtaagcaggcaggccagcaccgtgcccaccatgcccagcaggaaatagagggtatagcggaaatcgccccactccttttccagcgccgtgcccacgaaccaggtaaagtagatgcccagcaccacgctgaggatgctgccgccggagaaggggatgaacacaaaggtaatcgcccgccagatctgcccctgcagcaggaaaaaccggttcaggcccacccaggcggtgatggtgcggtcgataaacagctcaatagcaaagacaaggatctgccccgccaccagaatgttggtcaggtttggaatgccgaagcgcccatatttgcgctccaacttgttcagccaattgttcatgcatcatgcctccagaagtggatgtttcacgcttgtctgaggttattgtaccatgattggacagggcattcaagaaaaaacaggcactccggcgcggtgtgcacaccggcggggaaaaactcaggccgttacagcaaaatgcagccgcactccggcccatttcacaacaaaaaagggtggtatttttccatttcggagagaacttttcactttttccaccgggttttccactgattttgtgaaaaaaaggcccagtttcccacgaggttttccactttttccaccgggttttccacatggaaatctggttttgcttatacaagccgtaatgcagcccggcgattcatgccagtttctgggaagaaaagtgggcactttgccttttatataaaagaaagtcgaaggattttcttttctttttacagttcgttccggctgacgattcggtccctctccagattggaaaaaagaagtcctgagttttccacagaacgggaacgccgctttttcgtgtggaaaaagcggggaaaactgcggttttccaccgtctgccgccgttctccggcagagagtgctctacatgccgtttttgctccggaatgcgtccggaatcgcgcgattgcttgtgttccgtcccgctctgtgcccagtaaaaaaactccctccgtcacggttcacgccatgacggagggagttttcctgttttacatcatattgcggaacaccagctgtgcgatctggaaatacaggatcaaactgcaggcatccacgatggtggtgatgaagggcgttgccatga

SEQ ID NO: 669 - DNA, 4178 bp, Unknown
  16S sequences of unknown bacteria
gatccgcagaccggggcggtgtccttccccatctaccagacggccaccttcgcccaccccgccctgcacgagtcgacgggattcgcgtacagccgatgcggcaaccccacggtgctcgagctcgagaacacgatcgcgctgctcgaaggcgggctcaaggcatatgcctacacgagcggcatggcggccatcacgactctgctcaagatgttcgagcacggagaccacctgctcgtgagcgacgacctgtacggcggcacctaccgcctgctcgtcgacgtgtactcgaagcgctacggcatcgagttcgatttcgtggacttctccgacctcgacgccgtcaagcgcgcgatcaagggcaacacgaagggttttttcctcgagactcccaccaacccgatgatgcacgtctcggacatccgcgcgctttcagacctcgcgcacgatgcaggcgccatcctcatcgtggacaacacgtttctcacctgctacttccagcgcccgctcgacctgggcgcggacgtggtcgtgtacagcggcacgaagtacctgtgcggccacaacgacgtgacctgcggatttgtggtcatcaaagacgagacgctgctcgagcgctcgttcatggactacatgagcgagggcggcgcgctggccccgttcgaggcgtggctgatgctgcgaagcctcaagacgctgggcgtgcggctgcgtcagcaggagaagagtgcgaaggcgatctgcgccttcctcaagaatcatccgcacgtgaccgacgtattctacgtaggcgaccccgagcacgagggctatgagctctcgcagcggcagacgaccggcagcggtgccatgatctcgttcaacgtggacagcaacgagcggctgctcgaggtgctcaagcgcgtcgagctcatcacgttcgcggaaagcctcggcggggcggagagcctcatcacctacccgctcgtccagacccacggctccatcccggcccagatcagagacgagctcggcatcggcgagcgcctgctcaggctcagcgtcggactcgaagacgccgacgatttgatcagcgacctcgaccaggcactggcataaggaggtatggtgagcatgacacgctacgatttcgacgcgcccgtcgaccgccatggcacgggatccctcaagttcgaccgcgcgatcgcgcgccacaaatcgcccgacctgctctcgctgtgggtggcagacatggactttcccacggctccagagatcgtcgaggcgatccagcggcgcgccgcgcacggcatcttcggctatacggagccagatgacgactacttcgacgcggtgtcgagctggctcgagcagcgctacgggtggcgcccgcaagacgactggtacgtcgtcacgcccggggtcgtcttcgcgctggcggcggcggtccgcgccttcaccgagccgggcgaccgcgttctcatccagcagccggtctactaccccttcaaagaggtcgtggaagacaacggcgcgcaggtgctcaacgtcccgctcgcctatgaagacggtgcgtattccatcgactttgaggcgttcgaggatgcggtgcggcagcaacgccccaagctctttttgctctgcaacccccacaaccccggcgggcgcggctggacgcgcggcgagctatcccggctcgcctcgatctgccgggacaacggcgtgctgatcgtgagcgacgagattcaccaggacttcgcgcgccccggctttgtacactgttcactgggcaccctggggcaggaagtgctcgagaatgccatcatctgcacgagcgccagcaagaccttcaacctggcgggactgcaggcgtccaacatcatcatccccgacgcggaggtgcgcgccaagttcgtgcacgccgtcgtcgcggccggctacagccagcccaacaccctcgggctcgtggcgacccaggccgcctacgagcacggcggcgaatggctctctcagctcaaggactacctcgagggcaactgggcgctgctcagggagcggctgcgcccgtacgaggaccgcctccacctcgtggaaagcgagagcacctacctcgcgtggatcgactgcaggtccttggggctgttcggcgacgagctcaagagattcgtggaggacgaggccggtctgtggctcgacctcggcgacatgttcggcgcggatggtgacgggttcatccgcatcaacatcgccacgcaacgcgcgtacctggacaaggcgctgggacaactcaccgccgcactcgacgcccgcatcgcgcgcgacgcatagcgacctccacgcgcgggaaacgtggcattgccacgcatctgccgcatcctgcgtgaaaaacgtggcagtgccactcttctgccgcaaggcgcacgcaagttgtggcagtgccacgcatctcgcgcctgcggagcgcaaaatctataagttatctcttgctaactctcctcatatgctgtattaaggttagctgtatctaacttacgcgtttcgggaggttgacttggaaagcactcacgccacacaggtattcgaagccaaggtcgtcaagcattgcgcgcccgttcttacgggcatcaagcccgcaagcatgttctcgtgccccctcaaatcagcgcaatgctgcgggaatcccgcctgcacatcgttgaagctcgtcgacttcctcctcgcctacggcgattgcagagcacgcctgagccggcttggcatcgagatgacgatcctcgaccagcgggagcgaagcgcactcgtcttcgtgtaccgtccctcgcatctcctgcgcaccatcagctcgaaggagtcagccgagctcctgggaacacttggctacgacgcttccgacgtgaacaagagcctgagcatactcgcccagcgcatcgacgtcgcaaatccgagctcaggcagacgccgcacgtgctcgttcccgcacgagatcggagtgttccttggctatccggtcgaagacgtcatcgggttcatggaaaaccaaggcgataactatctcgtctgtggttgctggaaggcatactcgaatgcgagcgatgcaatcacctgcttctgccggtacgaggagtgcactcaggatctcgtgtgccggcacgaagccggaacgcgtatcgacgaactcgtgctgccggagacgtttgctgctgcatagcagctcggcggccagacggcaatcgacatcaacagccagaatctgcaaatagaatggagtcaatcatgagcaatgtagcagtcgtgtattggagcggtaccggaaacaccgaggccatggccgaggagattgccgcaggagccgagcgtgccggtgcacatgtcgacctcgtccaagcgtctgatttcgagccgagcaaggtcgcgcagttcgatgcgttcgcattcggctgccccgcgatgggcgtcgaagaactagaagacggcgagttcgagcccatgtacgatgcggtcgagcccaagctcaatggcaagaaggtcgtgctgttcggctcgtacggctggggcacgggcgaatggatggagacatgggaggatcgtgcgcgcaacgccggcgtgaacgtggtcgcgacggtcatcgcgaacgaggaacccgacgagagcgcgctcgccgaatgcgatgctgccggcgcgtcgctcgcgtaggcgcggcgaaccccgcgccgcgcacgggaaacgtggcagtgccactcatttgttgtaaaacgcacgggaaacgtggcagtgccacacatctcgcgttaatcgcacgtaagttgtggcagtgccacgcatctcgcgcaaagtgagtggttttgccacacgccgaaggcgcatgcgcacctggtatccccacatgcattcgcgctacactcgaggagtatcgcaacggcacagacaggatcaagaatggataaggaaacgttcgactacgtcgaggagcgcgcaaaggttctcgcggtatccgaagcgagcacgcaagtcacaaaggatgccgcccaggcgtggctcgacgccgttactgccgacagcactgcggccgacgaagccaccaaggccttgctcgacacgctcgagggccgtcccaccacgatcgacgagtccatcgagttcgcgaagggcccggctgtccagatgttcggcaaggaaaccgccgacaagatgctcgccgagaa

SEQ ID NO: 670 - DNA, 23167 bp, Unknown
  16S sequences of unknown bacteria
ctgcgcacatcctaagttacaggcgtatccgccgatatttagtctgacgcttaaagcgtctggaagcacgtgacttcagtcatgtgaggacttcacgtggtaaaagaatacttagcgaaaacagcgtaagcaaaattccacaaacctcttgtgtttccacgaaaagcagagtagaatgatggcaagatttcatggagcaggtaagaagaaacggattttgaacgacagatcgcgaagcggattgtgaatgtccactttactattgggttcgaaaggaaggaacttgccccagagcggaaaaagaagcgcggaggatacagacatgctgcaggagcagggggcagagtttacgcagacatttgcatatgaaaagaaaggaaacagcgcagtcatcaggcgctgtttttcacgtgatacgaaagctgtgattccggaagagattgacggacttccggtgacggagattggggcgtatgcgttttcggcgcatctcgatgaggccgtgtttcaaaaggagttggcagagggaaaaatcagaatcagcagatctgtttttggggagaaaaatcttccggtacttgatgcaaagctggaagaggttgtatttccgctttctgtcgtgcgggttggacgctactgcttttacaactgcgaccatctgaaaaagctttcgtttggaggtggactgaaggactggggcagcggtgtttttaccgggtgtcatcatattcgatcgatttgtatggcggtgagcggggacggcagttcgatgctgaaggatatgctggatgagatccgggaggagctctgtgtggattatattgaactgaaaaatcagggagcagacagaaccactgatccggagcgcccataccgtgcaccggtgacggcccgcctgatgtttccggagttttatgaggagggcgtggagaacacaccggcgcggattctggagacacatgtacacggaagcggcatcttatatcgaaactgtttccagggaagaaaaattgatttttatcaatacgacaatgcatttccacatgccatggcgcaggaatccggggaatttgtattgcagcttgcgctttggaggcttcgttatccgaaagaactgagtgggcgtgcaagagaatgttatctggattttctgaaaaatcatgtaagggaatatgcagaatttttgacaaaaagcagacggatcgaagaaatacgatggatttgccgggcgttggaaaaggaaaaaaaggagccggaaacagctgggggaatggctcttgactgctttttggaagctgtgacggaatgggccggaaaaaaacagtatgcggaggcactgagctttgtgatggattatcgccatgcacaccatgcgccagtgaagaagcgtgcacggcttgagctgtaaaagggtaagtgtatgtagttgagggaaaaataccttttgaccctgacctttgtaaaaattcgggacatcgaatggctgttttacaatatgcgttgatgttattttattatcactgtacttttagaaaagaggtggaaagccatgacagaaaaaaatgccatttatcaggagaaggaagagacgctttcgtttgttcagattggcatggagatcctgcgggtggcacgaaatgaactgtatctgaatatgcgttttctggatgtggcgctttcaagcctgcgttttgtgccggatggacagatccgcagacttggaacggacggaaacaatctttattttcagccggacggcgttgtggcattgtttcgaaagggacggccggtgatcaaccgggcctatctgcacagtatcgtacattgtctgttctgccacctctggaatcggaaggatcgggatgcaaaatactggaatcttgcgtgtgatattgccgctgaatcgattatcgacgatctgtatttaaaggcggtgcttgtgccgaaacgtcaggtgcgccgggaatattaccggaagctgaaggaacggggcggtgttgtgacagcggagcgggtttatcggtttctgtgtgaggagcatccgtcggtaatgcagctggagcttttgaaacgggagtttaccgtggacgatcaccgtgagtgggagaatgaccagaatcagaagaagaacagtccgcagccgcagaggcagcgctgggatgatatccgggatcggatgcagaccgaaatggagacattttcgaaagaggcggcggatgatgtgcgcactctggaggagagcatcgcggcggagaaccgacagcggtacgattaccgggaatttctgcgcaagttttcggtattaaaggaagaaatgaaagtagacatggattcctttgattatattttttataattacgggatggagctttacggaaacatgccgctgatcgaaccgcttgagacgaaggaggagcagcgggtcgaggattttgtgattgtgatcgatacctcaatgtcgtgcaagggggagctggtccgtgcatttctcgatcagacgtatgcggtgctgagcgaatcggaaagctttttccggaagctgcatattcacatcatccagtgtgatgaccgggtgcaggaggatgtagtgatccgaaatcatgaggagatggaagattatctgcagcactttacggtgaaaggctttggcgggacggattttcggccggcatttctatatgtacaggagctgctggcaaaaaaaacctttacgaagctgcggggactgatttattttacggacggctatgggacgtttccgatgaagaagccgccgtatgacacggcattcgtctttatgaaagaggattaccgggatatggacgttccgccgtgggctatgaagctgatccttgagaaggaagaattgatggactgcatagaacgagagaagacagaatcattgtaagagaaataaaaatggcagtaacggtagaaagaggccggaagcgaaagaaaactgctgcatggtaaagggcgaaaaaacaatggtgacgctgatggataaagataaaatacggcgaaactgaacagacggaaaaaagtaaaaaggaagaatagtatatgaatatcaaacgtgcaaaacaggaaatcaaggatacgatcgaagcgtatcttttaaaggatgaatatggggaatatgtgatcccgcagatccgtcagcggccggtgctgctgctcggtgcacctggtatcggaaagacccagatcatggagcagatcgcgcgggagtgccaagtagggcttgtctcttatacaatcacgcatcatacgagacagagtgcgatcggcctgccgtttatttcaaaaaaggagtttggcggcaaagagtattccgtgacggaatatacgatgagtgagatcgtagcttccatttataataagatcgagaagaccggattgaaagaggggatcttgttcattgatgagatcaactgtgtttcagagacgctggctccggcgatgctgcagttccttcagtgtaagatgtttggaaatcatgagatcccgcagggctgggtgatcgtagcagccggaaatccgccggaatacaataaatctgtccgtgaatttgacgttgtgacgatggaccgtgtgaaaaagattgaggtggagccggattttgcggtatggaaagagtatgcggtgaaaaaccagctgcatccggccgttatttcttacctgagtacgagaacggcgaatttttatcggatggagacgacggtagacggcaggacatttgcgacaccgcgtggctgggaggatctgtcccagatgctggtggtctacgaaaagctgggcaaaaaaatggatcgtgaggttgtgcgtcagtatattcagcatgaaaagatcgcgaaggattttgcaaattatctggaattatacgagaagtatcagatggattatcaattggaagcagtgctgcgcggtgagattgatgacgcattgaagaaaaaggcgagtcatgcatccttcgatgaaaaactgagtgtagtcagtctgctgctttcacgcgttcggaatgcgtttgcggatgtgctgcgcggccagaagaggatcgatttgctttacgggcagttaaaagagctatgcgaaggactgacagaagaaggcgggacaaatccgctggcctttgtaaagcagacgacagaagcctttgcgaaagaatatgaaacgaagaaaaaggcagaactgctgaccaggctggaagaacgtatttaccgcgatgtgcttgggcttctggaaaaggatgtctgggatctggcgcaggagggaagcggagcggaggtttttgagaagatcagagactggtttggaacgcttcaggatcagcaggaacaggaagaaacggctgcgtcacagatgctggagtacgcatttgattttatggaagaggtgtttggcagcggtcaggagatggtcattttcgtgaccgagctgaacagcgattattatacggtgcagttcctgcagcagtatgagtgtgagcgctattatcgctacaaccgtcagcttctcgtagacgagagcagccaggcgatcgaggagcagctgcggcagatggggcggtaagaagcggtcaggagcgggcagcaaagcggatcgtggatatccgctttaatctatagcaatcctcgtaaataatgcatttaagacagttcagcagagtgcgaaagacaaggaagaatgcatcgcagaaaaaacagaagcaacagaaacgaaagcaacagaaaaggtacggtctgccgatagttacatatcgcattaaaccgtaccttgtttttattttattgaattgctataggctgccgaaatcaggcagactgtgaatcattgtaccgttttatttgatgactttgatccagccttccggtgcctggatgcggcccatctggatgccggtcagtgtctcatacagcttcttcgtgatcggtcccatctcggtcataccgctcgggaagcagatttctttgccgtgatcgacaatcttgccaaccggggagataacggctgctgtaccgcaaagaccgcactctgcaaagtcttttacttcgtcgaagtagacctcgcgctcctcaacctcgagtccgaggtagtcctttgctactacgagcagagagcggcggggaatggacggaagaatgctgttggacttcggagtaacgaccttattgtcctttgtgacgaacaggaagtttgcaccgcctgtctcctctacctttgttctggtcgctgcatcaagatacatattctcatcgtagccctgacggtgtgcgtccatgattgcataaaggctcattgcgtagttcaggccggctttgatatggccggtgccatgtggagctgcgcggtcgtaatcgcagacacggatcgtgatcggctttgcgccgcccttgaagtacgggcctaccggggtagtgaagatacggaactgatactcatttgccggttttacgccgataactgcgtcgcttccgaacatgtacggacggatgtaaagtgttgcgccggagccataaggcggaacgtaagcttcatttgcagctacggtctgaacgactgcgtctacgaaacgttccttcgggaataccggcatctccagtctcttgcaggagctctccatacgctcagcgttcagatccgggcggaacgtaacgatgtgtccgtcttccgttgtgtaagctttcataccctcaaaacaggtctgtgcgtactgcagaacgcccgcacactcggaaattgttaccatcggatcggaggtcagaacgccctcatcccatgcaccgtttttataatttgctacaaaacgcttgtcggtcggaatatagccgaaaccgatgctgctccagtcaatatttttcttttccatgatttatacatccctttctttcttatgtactgtcggaattttttgcattttacctctgctagtacattcttacgttgtagtttacgcccgtgatttcttgatgtcaagaaaaaaatcgaatgaataaaaatgctttgtgatgaatgttttttcaggaaggcttctgctgattttttttcttttccagaaaggagccacgcatcacggcagtttctccgaatttctttttgatttcatccatggcggcatcgagcctgcgctgtttttcaagatccggttttggcggatgagaggaagcggcagagccggaaacagtggatggttcggaagaatcagctggaaaaagcggaaaatccccgtcgaataaggaaagctggaccggatcggattcggcctgtaatttggtggtacgaatgccgagaagccggatcggagtgccgttccacagctcatcaaagagacggcaggcgcagctgtagagtgcatcacaggtggagatgggcgtgagaagctgcgtttgtctggagcaggaacgaaagtcattgtatttgatttcgactgtgattgtatgagcgagctgtgatttcctgcgcagtcgtccggaaacctgttccgacagtgagaggagcacctgctttgcctgtctggcatctgttgcatcacttgcaagcgtcgtagagtttccgattcctttgaaggtatgatcgttcggtacaagcgcggagtggtcaatgccgtttgcgtgctcccacatcatgcgcccctggcttttgaactgcgtttcgagaaattcaggggaagcgtgtgccagctccccgattgtgtggatcccgagctcctcaagccttgcggcactgcttttgccgaccataaaaagctcgcgcacggagagcggccacatttttaccggaatctcctccgtatagagtgtgtggacgcggtcgggtttttcgaagtcgctggccattttggcaagcagcttgttcggggcaatcccgacgttgaccgtaaaaccaagcgtagtccgtacctgatcggcaatcgttcttgcggcagattccggtgaggaaaagcggtggctgatcggagagtaagccagatagcattcgtcgatggaaacctgctcaatatcagaggtatagcttccgagcaattccatcagttcctggctgcgtctgtgatacagctgatgatccggtggctccatgacaagaaacgggcatttccggaatgcgtttataacaggttcccctgtctgaatcccgtatttttttgcgggaaccgatttggcaaggacaacgccgtgcctgctttttttatcaccgccgataatcgatggaatcgtccgcagatcaagggagggatcattttttagtttttcggcagcactccagcttaaaaaagcggaattgacatcaatatgaaaaataagattcatggcggatcatttttgagaaggtctggaaacaggacgctcctggtatgtggcaagtgcggactggacaagtgcaacggcaccggcaacgtccgttttgctgacatcgaccgtcagatgagcgtatttttcatagagggggatacgctctttgtagagatcctgaagtgtctgaccgggttttaaaacaacgcctcgttttttcaggtcaccaagccgccttgcaagtgtctggcaattgaccttcagatagatgacggtactgatatcccgcagatgcttcatagaacggtcactgtagacgacgcttccgcctggtgagataacggagtgttctgcagttaccgtactgttgacacgttcctcgatgcggttgaacccttcaattccctcatcgcgcatgatctgccagagaagacggttttcttctttctggatcagaaggtctgtgtcaacgaaatcatagccgagaacttttgcgagaacaatgccgaccgtactttttccggctcccggcataccgatcagagtgatattttccatttttccggatttcctttctgtgtgataacatgcttcattatcgccaagtataagccagaaataaaatttgcgcaagtattttgcactttggcttacaggggagatgacagagggagtggaaagtctttgcggaaaaccaggttttgtgttacactgtctttgttcgtgcccggatatcgtatataccagatggcaagcgagagatgcagggcatttctgaaacgaacaacaaaaaacagggggtaaagaaaagtatgaaatttcaggatatgccgtaccagcggctggatctggaaaaagtaaaagcagaatttcaggcactgaccgaagagctgaagctggcgaagagcggagaagagcagtttgcggtgcatcagaaatattacaagctgacgaatcatatcgcgacagtaacgacactggcacatattcgccatgatgtcgatatgacagatgcattttatgaaaaggagcaggattattacgatgaaatccagccggaaattcagaatctgaagcagacgtacgaaaaggagctgttccattcaccgtaccgcgcagagctggaaaaaaagatcgggccggtagcgttcaaaaatatggagatcgcacaaaaagcgtttgacgaatcacttattccgctgatgcagaatgaaaatgcacttgtaaaccgttataataaactgatcgcaacggcgaagattgactgggagggagaagaactgaatctttccctgctgcgtccgtatatgacgagcaaggaccgtgatgtacgccgccttgcgtggaagaaatacagtgcattttttgaaagtatttcggatcagctggacgagctttacgatgagctggtaaaaaaccgtacagagcaggccagaaaaatgggatatgaaaattttgtagagcttggttattatcggatgatgcgtaattcctacggaaaagaagaggtggagcgtttcagggagcagatacggacgtattttgtgccatttacacagaagcttcatgaaaagcgcagaaagcgtcttggtgtggagaagctttcttacattgatgaaagcgtttattttaaagaaggaaatccggcgcctgcgatgaagccggaggagattctgcaggccggccagaaaatgtatcatgatttatcgccggaaactgcgaaattcatggatttcatgatggagaatgaactgtttgatgtattgggccgcaaaacaaaacgggcgggcggttatatgacattccttccggattacaatgcaccgtttgtctttgcaaactttaacggcacaagcggtgaccttgatgtcattacgcacgagtgcggtcatgcattccagggctttcttgcggcagaggatccgattcaggagcattgggatatcacaatggagacagcggagattcattccatgtcaatggagttctttgcagataagtatatggaaatgttccttggagcagatgcggaccggtatcgcacgatgcatcttgaggatgcagcggcctttattccgtatggatgtatggtggatgaattccagcatattgtctatgagcatccggaaatgacaccgcaggagcgcagacaggcatggacaaagctggagcagacctacaagccgcatctggattatgaaggtgatccgttcttttcaaaaggcggattctggcagaagcagcagcatattttcaatgatccgttttattacatcgattacgttctggcgcagacgtgtgcgtttatgtataaggtaaagatgatggaaaattatgaagaagcatgggagagctatttaaagctctgccgtctgtcagccggaaaattttatgcggatatgctgcatgaagtcggactgaatgtgccgtatgaagagggctgcatcgaggagatgacgaagaagcttggagaaatgatcggggtgtgaaactcaaataaacgtcccgcgtgattggtatagttataaaaaactctgaatggacgcaaaatcaacagaagcgtttcattcagagttttttattttagatgcttttacccggagcagatggggcatcatagatagcctgggccattgcggcggcttcctgcggcgttgcacttcccgcaatcagatttcgtatcgcaataccgagggcaaattcgtagtgaaccgtggaaaaatccggggcgatatcaggatcgactcctcttattccgatttcaaagctcttttttgaagcactgagccatgggaagacagttcggtttttaaaatcgttgtaaatatcgagaagaggagagcttcctccgagccgtgccagaagagaggcggtatccggtgaataataccagcggaagaactgcctgcaggcttcgattttggaggagtgttttgatactccgagcacgccgcctcctaacagcgggtgatggccgggaatgatccctgagctgatttttcctgcaatatttgaatgcttcgtattgatgatggatccggtgtggttggaataaatggtgacagacgcaacatttccggcagcgaactgctggatgctgtcggtccaggtattttcatgtgctgcaaaacgcgccattttctgatatttttccattgcctgtatcatttccggtgtatttaaccggatgggttctccggaacagaaggtatcataatggtctgccatgaaatacggaagaaagtcactggctgcaaaaaaagaagagccggtagtaagtgtggtaccgtatctggttggagaatcgggattgtaatgtgcagtgaaaaattccgcaacgtgcaggaactgttcgattgtttccggtacggcaagagcttcccggtaacgttcgtaataagcacggcaaagcgttgcattttcaaacagatccttgcgatacagaaaaacctgaacgcttggatcgagcggaagcgtgtagcgcgtgtcgtttaccatgctgtaattattgtacgccggctgaatcagtctgaccggaaagatgtccggcgagatcccgatctcatcaagaggaagataggtggatgggccaagcgtattgagacgggcaacgtccattcgaaccagatcaaaatagaaatgtttattcagcatttcaatataggagtgcagatcatcataggcaagactgctgattttcagacggattccacttatttcttcaaacagaggaattaatttctgcagggcctgtgtggaaggggaattcagagtcagcatagtgagctcacaggggctttgcctgatgacatttggaaaggtgtatggaattccttttccttcgaaaacggtctgccctggtaaaacagaggcatcctgctggtatgcggtgaagagcttggatatttttgtgccgatctgactgtagtcaaattcgaaggtagtacagtaagaatgagaagcagcaccgacggtaaaaatagcaggcctttttgcaggctttgaaagctggagtgcgaaatccagagccttagcccgaagagagcttgacgttatgacacagtcgaaggcagtttccgcctggataatgctgaaggcctttgcagtggtaaggctgatatcagaagaaaatacctgtattttttcttcactgcacctgagagtctgccggattccggcaagaagctcccggctgctgcagaaattgtttggatcacagaagaaggcgattctttcccaaccgtttttttctgcgaacgatgcaatgcatttgcctgcagaccgataatcaaatgagagggcatactggtttttggaaagctgttccggaattctttctgcaaaaaaaacaggacagggaatggcctgataggcagaaggctcggaatcaagcaggcaggaaacagagacaacggcagcaattccggaaaacggaagcttttccagaattgctttttctgttccggcgatgtcattcgtctcgtaaataaaggtttcataaccatttttgtgcatggcggtctgcagcgactgataaaggtcgagatagatatcttcccggagagtcggaagaagaagggccacagaggtaggggttccctggcgcagcatctgtgcctgcgcatttggaacgtatccaagcttacgggcggcttcttctacgagtttgattttttcaatgctgacctttccggttttatttaaaacattggatacggtgccatgggagacaccggcttcacgtgcaatatctttgattgtgggcataaagttgctcctttcgggatattctgtttacatcctttcacgatttttctatagtaacaatatcagaaaaagaagcattttgcaagatgaaaagaataaacattgacacgtaccaataataatgataaaacaaaaatgtacgattgaaatcttcaaaagcaagtgcaggaaagaagctaaaagtacataaaaaagaaaacggaggaaaaaggaaatgataaagaatattatttttgacattggaaacgtgcttgcagcgtttgactgggagggaaatctgagatcttttcatcttccagaggaagaatatgaagcgattgcagatgcggtataccggagcagtgactggaatgagatggatcgaggggtcatgacgacagaagaagtgatacgaagattctgcgcaaaaatcccgcagtatgaggcagatatcagaaaggcgattggactgtattccaatacaatccgccagtatccttatacaaagaagctgatcaaaacactgaaggagaaaggatatcaggtctattatctgtcgaattatggagagtacgcactgcaggagacgaaaaaagaactggattttacagagctgatggatggagggctgttttcctatgaagtgaaaatggtaaaaccaaaccgctggctgttcgctgagctgatggaaagatatcatctgaaggcagaagagtgtatctttttcgatgataatccgaaaaatgcgcaggctgcatgtgagattggaatgacagggatcactttttgcggctatgaggatgcacttcataagctggagaactgtggtgtgctgtagaagcagatggagatagctgcagagcagattgggatagctgtggaaacagataggaatacaagacgggaactctggatgctgtctgaaaccagaaacagatactgttcaatgataaaattggttcgttcaaactaagaatgacgagaaatagaaaaaatagacaaaaaacaggaggggacggaaggaaaatgccatgaaaattaggaaaagtttatgaaatcaaaaaaaatccaaataaataattgacacgtaccaataaaaggaatagaataaagctacaaggcagagatgcaaaggaaactgaaaagaagattcataaaaaggagaatggtaatgaaaaagagaatgatcgcaattttagcagcagctacggcaattggcatgacgatgacgacatcctatgcggcagaagaagtgaagggaaccggagttaccctgactgtttattccaattctgtttcagacggaagaggcgactggctggctgacagagcggcagaggacggatttaagattcagtatgtaagcctggctccggcagaaatgatcacaagattaaatgcagaaaagtattcaccgattgcagatgtggcattcggtatgtacaccagtgtatgggagacactgaagaagcaggagcttctgaccgtatataagccggcatgggcggacgaagtatccgagggattaaatgacacggaggattattaccatgcgatcgtaaagcaggcgattcttctggcttatgataagaatcagctcagcgaagaagaggctccgacagactggaccgatctttggacgaaggatgagtataaaggaaaatatgaatacacaggaaacggacttggaggagcaacggtgcgccatgtcctgaccggaattctcagccgttaccaggatgaaaacggaaagcttggaatctctgatgaaggctgggagcagattgcagcatactatgaaaacggagttccgtcagaggaaggcgttgacctctatgcgcatatttcagatccggataaccctgttatgatgggacagatctggtcgagcggaattgaggcacgtgatgagcagtacggaaccgataccggatacgttgtgccggagtgtggtattccgtatctggtagaaagcgttggaattgtaaatggcacaaaaaatcaggaagaagcagagcgtttcgtagactggtttggaagtgcgcagattcagggcgagtgggcacagcagttctccacccttccggcaaatacaaatgcagtagcaatggcaaacgagttcaatcagaagatcgcagatcttccggcacaggatattgactggtcatttgtgacagatcatctggatgactggtgtgaagagatcgagctgaattatattccgtaaggaagcgtttggcctgaactgaaagccgaacaatcaaaggttgctgttcaaactgccggtttgagcacagaacagaaaataaagctgcagttttcctgaaaacggaaagctgcagcagaaacaattaaggagaagagtcatgataagacttgaaaatattggtgtcagatttggcagtttcgaagcgctgaaaaatattaatattcatgtaaaagagggcgaattttttacgtttcttggtccgtccggttgtggcaaaacgacgacacttcgtacaattaccggatttattcagccgagcagcgggactgtcagtgtacgtggaacggatattacgaatatgccggtagagaaacgaaatattggaatggtattccaaagctatgcattatttccgaccatgactgtgtttgaaaatatcgcttttggtctgaaggtgcaaaaaatgaataaagaagatatccgccagaaggttttgacgatggcggaaaaagtagatttaaatgaagaacagctgaaaaagaaggtttcggagctttccggaggacagcagcaaagagtggcgatagcaagagcgcttgttacctcaccggagattatctgtctggatgagccgctgtcaaacctggatgcaaagctgcgcattcagcttagaaatgaactgaaggatctgcagagaaaattcggaatcacgactgtgtatgtaacgcacgatcaggaggaagcactgaccttatcgaatcgcattgcagtttttaataaaggagtgattgagcagatcggcagaccggatgaaatctacaatcattcggcaacagaatttgtatgtaattttatcggcgatattaatcggttggaggaaaacttcctgaaagcttccggagcagggctgtgcgccggtgtggatctgcaaaagcactgttacattcgcctcgaacgcatgcatgtaaacggggaagttggcggagatgcttttcagattgaggcaaccgttaaaaatatggaatattatggtttgtacattaaatatacgctggaggccggtggccagcagatcaaggtaatcgaaaaaaacagcggaaaaccattatatgatgcaggagaaaaggtaacggtatcgttcaggcaggaagatatcatgcaatatgaggggtgataaaatatgaaaaagaaaaaactgaatatttttgcatttctcttctttttgtggtttattgttgcatgcctgatctatcccaatatcaatacgatctggtctgtatttgtccaggacggacattttacgctggaaccgctgcagaagctgattggatcggcgaaggcaatgcggagtttaaaaaacagctttattctggcacctaccttgtcgatcacggttggtgttataggagtcagtcttgtgcttattacggaatattttgaggtaaagggtgcaaaaattctgcggctcggatacatgacaacattgatttatggcggaattattcttgcatccgggtataaatttatttatggaaacaagggcattctgaccggctttctggcaaagatatttccggcgtttccgacggactggtttcatggatactgggcagtactgtttgtcatgacgtttgcctgcacctcaaatcatatgatctttttgcggaatgcaatgcgggcagtcgattttcagacagtggaggctgctcagaatatgggagcatccacgatgcgtattctgtttaaagtagttttgccggtgctcactccatcacttctggcagtgacaattcttacttttattacgggcttgtcggcgacatctgttccgcttctgatcggaggcacagagtttcagacgattacaccgatgattctgacgttttcgaaaaacgacaattcaaaggatctggcagcgcttctggcactgattctgggtcttgcgacggttttgctttttactattatgatacagatcgaaaaacggggacattacatgtcggtatcaaaggtaaaaactacgattacaaagcagaagatccgtaatccgattgtgaacgcactggttcatatttatgcatacgtgttgttcctgatttatgtggtgccggtggttctgattgttctgttttcatttatggattccgcatctatcgcaaaacgggaactgaatttttcaacgcttacactggaaaattataaagctgtattttcgaaagtaacggcatacaagccgtttctggtcagcattgcctattcagctctggctgcggcagcggttgcggtacttgtactgtttgcctgccgtgtgattcagaagaaaaagaatgggtttggaacagcgctggaatacggacttctgattccgtggctgctgccaacgacactgattgcgatcggactgatcacaacgtataacaggccgaatcctctgatgtttggaaaggtgctgacgggaagctttttcctgatgtttctcgggtatgtgatcattaaaattccattcacgcttcgaatgaccaaggccgcgttttttgcattggatgattctttggaggacgcagcaaaaaatcttggggccagctccatctatacgtttttccgcgtgatccttccggtggttcttccgaccgttctcgcaattcttgcgctgaattttaatggcttgcttggagattatgatatgtccgtatttttatatcatccgttaaatcagccgctgggtgtatatatcaaagaacttaccgatgcacagacgaatgcggataattccgcactgacctttgtatatgcagtattaatgatggtgatttccggaatcgtgctttatctggtatacgggcgaggaaacagtaaattagatgatacgcagtgagcaggggcttgtttgtatcataagcctgagataaacctgcgcatgataaaggttatgagcaggtaatgaaatcggtttgcgaatatccgctttgattggatacgaaataaaagtcgaatgaaaatatccatcggacagacaggaggaaaaggaaatgtttggaaaagaaaagtacaaagcgattaatgaaaaactgaatcgcagatttgaagaaaaaaaagtgctgatcgcagttcatcgaggcgtatggtgcggaaatatcattgaaaacacgatagaagcatacgatgcctgcagagcaatgggagcggatctttttgagtgtgacctgtctgagacaacagacggagttctgtatatgtttcatgacggaggagagtggagagttctcggaaaagatcagagtattttaagtatgtcgtcagaagaagtggacagtctgatgtgcagaaatggtctcggagagccgagcggcagatatctgcagcgctttgaacagcttcttgagcattatacaaacggggaactgttcaatgtggatcgttcctggccgtctcttgcgaaactggacgagataatgcagaaatatccgcatgcgatctcacaggcagtgattaaaacgccggtaaaagaggaatatctggaatttttccagaactgtccgaataaatatatgtatatgccgatcgcctacaatatggaggaggttaagaaagtactgtcgtatccggacattaatgtagtcggtgtggaggcgattctttcttctgaagataccgatctgttccgggatgaaagcattgcatggattcatgagcaggggctttattactgggcaaatgtgatcacacttggaaataagccgggacacagactttatgcaggatatgaggatgatgtggcactggcgaaaggaccagaagcgtcctggggcaagttgattgataagggaatcgatatccttcagacagactggccgtatcagctgaaccagttcagaaaagaaaaagtatgattgcagcacgtgaactgaccgcagccggaatatggatccgtattctggctgcggttttctttggaggaatacttggaatcgagcgggggatgaaaaatcgtccggctggtttgcgtacctacatgttggtttgtattggctcctgcgtggtgatgcttgtgaatcagtacatatatcaggtctatcacacgggcgatccggtacgtatgggagcacaggtaatcagcggaatcggatttcttggcgccggtacgattgtcgtaacaccacataatcagatcagaggtcttacaacagcggctggactgtgggcagtagcctgcgtggggctggcactggggctcggactatatgagattgcgctggcaggaggtgcggctatcttttttgcactcggtctgcttgaaagactggatttctcagtgcgtcagaatgcgcggactctggatgcatatatcgagctggatcggaagataccaatgcatcagtttataaaaaatatgcgagaactggatcttgagatcagcaatctgcagctggtgggcgagaatgattatgcagaagaaacaattccgtttacggtgacggtaaaatcaaagaaaaaattcgaccatgatgttatgatacgaaccctgcgaagagtcgagggagtaaggtatatcgaggaattgtaggagaacaggtaaaaaacactgcaggctaagtaaaaagcctccgcatacaggccggaaaaatcctgtatgtggaggctttgcgttttaaacgaggcaggcagcgaagcggatggcgaatatgcgccaacagatttatccaattacagctccgattgcgccaaacagccctgcgcttgcagcgcccatgatgatgccggccagcagtacgccgagcagtacggcaagtacgctggatttgaaatccatatcgagcaggctggcggcgagtgtaccggtccatgcgcccgtgcccggaagcgggatgccgacaaaaagcatcagcgcaacaaaaagtcctttgcctgctgtagcctgcagctttttgccgcccttttctcccttttcaagacagaaagtaaagaattttccgatgactggtttgtcctttccccatacgagaattttgcgggcgaagagataaataaacggtaccggaatcatattgccgatgattgcgatgatgtaagcctgggaaagcggaatgccaaatccgacggcataggggatcgctcctcgcagctcgatgagcggaaccatggatatcagaaatacgatcagataattttgcatgtgaattctccttttaaaatgataataacgattcgcagacaattttctattatatatgaaaaaagggcgaaggaacagtcctatttttgctaaaattaaaaaacggcattttgaccaaagcgggacaggcttattccggataaggttatgaatgtccgctttactgtcttcctgggcagaagaaaaagaatataaaatcgggcataatgagaaaaaagagtggaaaagtatcttgacaaataccattagggggtatatattatgcattgcaagatacgggatgggggtatattaacgcggaactgtgtttaaccgagccaggcaagttccctgcgcggttgcgaatatccgctttgacttgagtcagaaaaacaggaggatccaatggaaaataaaaaagacaaaatcacagaagtgtcggaaaaaaaggaagatgcagcagcgcaggaatcgtgctgctgtcagtgcagccataagacaaaggagcgctcggaaaaggagtaccgcgacctgatgaaccgcctgaaacggattgagggtcaggtgaggggcattcagggcatgctggagaaggatgcgtactgtacggatattctggtgcaggtggcggcggtaaatgcagcgctcaacagctttaaccgtgtactgcttaccaatcatctgcatacctgtgtggccgaaaatgtgcgtgccggcaatgatgaggtgctcgatgagctggcaagtgtgcttcagaagctgatgaaatgacaggagggaataccgaatggaacaatataatgtaaccggaatgagctgtgcagcatgctcggctcgtgtggaaaaagcggtatcgaaagtggaaggcgtgacgagctgttcggtcagtctgcttacaaattcaatgggagttgagggaacggcagcaccggaggcagtgatcggggcggtcgaggaggccggatacggcgcttccttaaaaggggctcatacaaaggaaagcggaagtgccggggcatcgatggaagaatatgaggagatgctgaaggataagacaacgccggttctgaaaaaacggctgatcgcatctctggtactgcttattccgctgatgtatgtgtcgatgggccatatgatgtggaactggccgctgccgcatttctttgacggaaaccatgtggcgatgggccttgtacagctgcttttcacgacagcgaccatggtgattaaccagaaattttttatcagtggttttaagagtctgctgcacggtgctccgaacatggataccctggtggcactcggttcgaccgcatcctacggatacagcgtgtatgcgctctttgcaatgacacatgcgcaggtgctcggagatatggatggggttatggggtatatgcatgagttttactttgagtccgcagcgatgatcctgacgctgatcacagtagggaaaatgctggaggcgcactcaaagggaaaaacgacagatgccttaaaaggtttgatgaagctggcaccgaaaacggcaacggtcctgagaaacggagcagaagtacaggttggcatttcagaggtaaaaaaaggtgatcattttgtggtacgtccgggtgaaaatatacccgtggatggtatcgtgctcgatggaaacagcgcggtaaacgagtcggcactgactggtgagagcattccggttgataaggcaaaaggagatacggtttccgcagcgaccttaaaccagtctggtttcctgacctgtgaagcgacgcgcgtcggagaggacacaacactttctcagattattcagatggtcagtgatgcggctgcgacaaaagcaccgatcgcaaaaattgcggacaaggtttccggtgtctttgttccgacggttattgccattgcgcttgtgacgatcgcagtgtggctgctggcgggagagagcattggatttgcgctcgcacgcggtatttctgtactggtcatcagctgcccgtgtgcacttggcctggcgacaccggtggcgatcatggtaggaaacggaatgggtgcgaagaacggcatcatgttcaagacagcggtatcgctggaaaatgcaggaaagacggagatcgtagcactggataagaccggtacgatcacaagcggcgaaccgaaggtgacggatgtgcttcctgctgtaggtgtatccgaagaggaactgacagaggcagcgtttgcactggagcagaagagtgaacatccgctggcaaaagcaattctggcttatggaacggaacgcggcagaaaaccgcaggaagtggcagagtttgaggcggttccgggcaatggcctgaccggcgtgtgcaatggaaaatttttagcaggcggtaaccgggcatttatggagaaaaagacggcaggcagatcgaaagaggcggaggagctttaccgccagtcagaggagcttgcaaatcagggaaagacaccgctgtatttttgtgcagatggaaaactgctcggtgtgatcgcagtagcggatgtcatcaaggaagacagccctcgggcagtccgtgaactgcagaacatggggattcgtgtcgtgatgctgactggtgataatgagcgcacggcaaaagcgatcggtgcgcaggccggtgtggatgaagtcattgcgggcgtcctgccggatggaaaagaggcagtgattcgcagactgaaggagcaggggcgtacggcaatggtcggagatggaattaatgatgctccggcactgacgagagcggatcttggaattgccattggtgctggtaccgatatcgcaatcgatgcggcagatgttgtattgatgaagagccggttgagtgatgtaccggcagcagtccgcttaagccgtgcaacacttaggaacattcatgaaaacctgttctgggctttcttctacaacgtgattgggattccgcttgcggcaggcatctggtatccgatctttggatggaagctgaatccgatgtttggagcagctgccatgagtttatccagcttttgcgtggtaacgaatgcgctgagactgaatctgttccagctctacgatgcccgtaaagataaaaagcatgcggcaaagcacagcaaaacgacgatcggaagccagaaagagagttctgaaaacgatacggacgaggctgggccggaaaacaaaaaagaaaaggagacaaaaacaatggaaaagacaatggaaatcaaaggaatgatgtgtggacactgcgaggcaagagtgaaaaaaacgctggaagcgatagcaggtgtggaagaagcagcagtcagccatgaaaaaggaaccgcagtcgtaaagctgagtgcggaagtggcagatgatgtgctgaagcaggcagtggaagcgcaggattatgaggtaactgcaatccactgatcggaaagtattatcattttctaaaaaatctgaatattcagtgaaagaaacggcgcggcgcttgacgtgccgttttttttgtacttaaatggtaactgttcagagcaggcagcgaacgcggattgtgaatatccgctttgggtttggcttaggatggttactttaaatgaaatggatgcgagctgcaggtgatctgcatttgtcggatttcgtgaaaatatagattgtgaatgtctgttttacacagaaaagaggttattaacagctaaatataaattataaaatcatacaagtacatgttgagttttataaaatattagggtagaatattattgaaaggagttgatgctttgagtaaatattattct

SEQ ID NO: 671 - DNA, 21401 bp, Unknown
  16S sequences of unknown bacteria
agacgacaacgtcttgataaggagcatgaagggtatccatcatccggcgaatgccgacggatttatcgtctggctctacaaaaatgtactctttatggtaacgggcaaagggaagctgggaaagaagcggaagctgagattcctgttcttcaaggcaggccacgtataccttgtagatagcggtagcctttgtataatcaaaatccggcgcgatcagcgttttcatgaaagtgtcatgagtggcttcccaaaatgtgccgtctttacaggtgcgatagggtaaattcccggtagacacaccccaggggaaccccttcttttcacaatctgcgatgagctgcttgcaaagcgctagcggaaggggaacgatttctacgatcttaccgccgatggtaatgccgttgccgccatcgctgacaacattatcgaacccgagcgccttggtatactccaaagccttggcttggctgcgtccagtggcaatgcagacaaagtgtcccttggcacgcaacgcttctagggtgcggatggtagacttcggcacaatgccgccaggattttcggtggttaaggtgccgtcgatatcaaagaagaagtattttttacgggccggttgtgtttgcgccccaacatgctccataggtttcaggcctttctgtgcattgttcctattcaaaggacatagaacattactgaaagaaaatgtagcatggatggcaatggctttcaaggcacagaaatgtaagcattggaaatttcacaaaaattcctttgtatcgcaatggggacaaaaggaaagtccggatttttttgcctgggcatgctggtctttacgaggtacgcggtacaatcggccgtctttacaaaagcgcgcgcctgtctgtttaaagaaaaagggcacctgatgcgcgatacattgccgacgcagcgattcaatccattgcaggtcgcatacgcgtgcctgaggcccggattcgccgccagcagtgaccttttcaatctgcccagtggagagcgcatgggacaaatcgacaggctctaagagcggttcacagatgatttctctatggcgcagaggggcggataaaagcaagggaatgcgttcatcagcgcgctgttgatcctcacaggtagcacagatcgtgacgttttcatacccatcgccccagttgccgggaagggaaacaaaaaaacgatcgatacgtttggtgatgatataaaaatgaagatcacgccgtaaatccatcatcgaccaggcctcggcccgccatacgtccgcctgatccaagaaaaaatccgagctaaagcaggtatacagcgtggtgccggcgggcactttataagatccgtctcgcttctttgcaaggggcagacggaaggtactgtttagcacggccacggaactatcacgctgatatagagcgtcccggcgatatacgtagcaattttgacagccagggctgatttttacgcatccgtgccatggattccacagaggcataggcaaggcacctccaaaatcagatataagtactgtaacacagcataaaaattgcagcaaatcaatgcggcgggcagttcgaattgtgatatcatggaaatattgtaaaaggtatgatgtatagggggaggaacaagctttgggacaggttctgcaaaaggcattgggatgtatatttgccattgcgctgggatatgtgctcaagcggctggggtttttccaggcaaaggaaaaagagaccatcaaaaaaattacgctgaatatcacgctgccggcagcggtgattacctcttttgcggggtttcagccggaggcgcagctatatctgctgattcttttagggctgggcgccaatttgctctttctggcgatggggatgttgctgggccgcaataaagacaaggcgaccaaggttttttatatgaataactgcccgggatacaacatcggcgcttttacaatgccgtttgtgcaaaacttcttaggcgctttcgggatggtggtcacatgcctgtttgatatggggaattctgtgatgtgtaccggcggcacctatgccctgacctctgccaaaacgggggaaagcaagacctcggccaaggcggtggcaaagacaatgctttcttccgctccgtttgacgtctattgtattatgattgtcgtggcgctgctgggtctgccgctgccggaggcgctgatttccgtaacgagctttgtaggcaatgccaacggattcttggcaatgctcatgattggtatgatgtttgaaatgcagtttcagccgcagcatctcaagcaaacgggggtggtgctgctcatccgatatgctggcgcagcgctgctggcgatgctgttttattttgtacttccattttcgctgaaaatacgccaggtcttggtactgctatgctttgcgcccattccctccatttctccagtttttaccggacgttgcggcggagatgaggggctatccagctttgctgcctccatttcgattttaatcagtattgccattatgacgatgctggttgttaccatgggcctggggacgggcgcataaaataaaagacgccgattttcggcgtcttttatcttgtaagcacatacattttcatatcaagcaccgctccgttttttacggcattgtgcctgagcgtgccttcatacacaaagccaattttttccaagacacggcaggatgccgcattataggcaaacggccctgcaaaaatgcgcagcaggtttgtcgacttaaacagaagctggcagatcttacgcatggccttggtagcgatgccctatccccaatagggttctcctacataatagcccatatctgcggtacggaagtgcatattttcttttcggtatgcggagatgctgccggcaagccgaccatccgcaagaatggcaaaggcgtaaaccgaatgtgggtcggtatcgatgagagggcggagaaaggcatgggcgtcatccactgtgtagggatatgtacattgcggttgtttgcaatggcagccaaggacggatggaaaccgacaaggcgatcaactcctcggcttgttcttaacaaggagcatggcacacaaaggcaccataagccaagattcatacaaaggagataggtgcgccttgggaaaatacatcggggccggcaatcaataccttggcctgcggatgcatcagcaccagcatatgacgcatcgcagattgcggtaaggaaatgcagccctttgtagcgcggccaacgccgcagtgtaaaaagatggcgcttcccttgttgggtacgcaagctgtattgtatgccagagacagtgcataggcataggcagcgcgctggctgaaaagatgctcggcgctctgccaatcgggcaaaatggtttcatccatgcacacgaagcgattgtaataccggctttttggatcgtccacccagtagtgagagggtgtgagctgcgtataggaaaggcgggtgccgggatctggcagcaccccgaaggcacggcctatagggaaaagtcctaggggggtctttccatccccctccttttccttgccaaggccgcgaaggccggttcggcaggggcaggaaaagcgttgcatgaaaacatggccatactgctgaaacagagtggcacggcctactgtatcgtgcgagacaatgacaagcagctgaggcgatttctgtgcttctgggtaatatgccatcaatttagtaagaaaatgctgattcatggtgcattttatgcgattttccatccgaaaatgacgaacagagagcttgcaagaaaaaacaagccggacgtatactgaaaataagggagttttcttataggggcaggggggaagagttactgtgcagcttttgaatgtgtctcgtattctgaagaatacgccgtcggagggagagctaccttccgtcaaacagtttatcaaacgcacttttctcattgcgtggccatctacactggaatcatttctgatttccttggtcagcctggtggatatcatcatggtcagtacacttggcacgagcgccattgcctctgtagggctgaccacgcagccgaaattcatcggcctggcggtatttttatcgctcaacgtggcggtatctgccttggtggcgcgccggtatggagaaaaggaccgggaaagagcaaaccggattcttgggcaggcgttggtgctgaccttggggctaacggccatcatcagtgtgctgtgtgtggcatttgcagatccgatcctgcatctggcaggctccgcgccggatacgcatgaggatgcggttgcgtattttcgcatcatcatgggcggtatggtattcaacgtgctgacgatgctggtcaacgctgcacagcggggcgttggcaatacaaagatcgctatgcgtacaaatatggtgtccaatgctgtcaacgtagtgtttgattatctgctcattggcggccattttgggtttcccaagctgggcgtggcgggggcggccgtcgccacagtgctgggcactgtatgcgcgtttatcatgtgcctgttttcactgatgaaaaaaggaatgttcttggatctgcgaaaaatactacggtcctggcggtttgacaaaaagacactgggttcaattttcaatattggttccagcacgtttgtagagcagatcttcttgcgcgtaggatttttgacctatgcgatcatcgtagccaatttgggcacggtggcttttgccgcgcatcaagtgggtatgaatatcatgacgatctccttttcctttggcgatgggctgtctgctgccgcagtgactcttatcgggcaaagcctgggcgaaaaaagaccggataaagcgaagatttacggctctgtctgccagcggtttggccttacctgtgcgctgtgcctgtcgcccatctatctgatatttggaagaaacatattttcctggttctcgtcggatgaacagattttggcctatggcgcgatgataatgaccattttgacatttgtcgtatttttgcagatttctcaggtgatctattccggctgcctgcgtggtgctggggatacgcgctatactgcgtttgtatccttgatatcggttgccatcatccgaccactcagcggttacctattgtgctatccgatggggctgggcctgcttggcgcatggctgggtctgctgtttgatcagttcatgcgttttgtgatgacggcggttcggtttgtacatggccattggatgcatatccacatctaatccggtgttgacaatttcacacggttggatacaataaaatcaacggatgttgattttggaggagtacgcagacgcctgccaaaagagagggcgctccataggctgtaagggcgctttggaaagggctgcggaaggtcgctgaaggaatccgttcgcaggcctgcgcgatggcatgaatgaggggcgctgtgtgcgcctgaacaaaggtggtaccacgaagccggcttcgtcctttgaaacgattttcagagtacgaaaccggctttttctatactaagcaacaatagaccaaaggagagaaatggatatgcccaaagcaattcccgaaaagacgtatgattttaaggccgtggaggacaagctctaccaggcctggcaaaacgccggttgctttacgcccgacatagagccggacaagcagccttataccattgtgattcctccgccgaacattacggggcagctgcatatgggtcatgcattggatgagacattgcaggatattttgatccgcaccaaaaggatgcagggcattccggcgctgtggctgccgggtacggaccatgcttccatcgcaaccgaggtaaaaatcgtagaggcgatggcagaagagggcttaacaaaagaagaggtagggcgcgatggctttatggaacgggcctgggcatggaaagagaaattcggcggccgtatcgtcacgcaactgaaaaagctaggggcctcttgcgattggtccagagaacggttcaccatggatgaaggatgcagccgggcggtcaacgaagtgtttgtaaggctgtatgaaaaagggttgatttacaaaggaaaccgcatcatcaattggtgcccagactgccagaccgctctttcggacgcggaggtggagtatgaggaccagcccggccatttgtggcatatccgctacacgacgccggatggaaaggacagcatcatcgtagcgaccacccgccccgagaccatgctgggggatactgccgtggcagtgcatccagaggatgagcggtatgcgcatctgattgggaaaaccgtggtattgccgctggtcaataaggaaatttccattgtagcagatgaatatgtggatagggaatttggtacgggcgcggtgaagattacgccggcccacgatccgaacgattttgaagtgggcgtacggcacaacctgcccgtgattcgtgtgctggatgatgctggtgttgtcaacgaaaacgggggcaaataccagggcatggatcgctatgaagcgcgccggcatattgtagaggacctaaaggccatgggtgcgctggggaagatagaagagcatgcccacaacgtgggtacctgttaccgctgcggtacgacggtagagcccattgtgagcgagcaatggttcgtatccatgaaacccttggcagagcctgcaatcgaagcggtacgcagcggaaaggtaaagtttgtaccggaacggttttccaaaatctattttaactggatggaaaacatcaaggattggtgtatttccagacagctgtggtgggggcaccgcattccggcttggacgtgcgaggaatgcggcgagctcatcgtagccaaagaggcgccgcatgtctgcccgaaatgcggtagcgcaaagctaaagcaggatgaggatgtgctggatacctggttctcctctggcctgtggccgttttctacgctgggttggccggaacagacagaggatcttcgctatttttacccaacctctacactggtgacaggtccggatattatctttttctgggtcgctcgtatgatcgtctttggtctggaaattatgggagagccgccctttgataccgtgatgatccacggcattgtgcgcgatagccaagggagaaagatgtccaaatcacttggcaacggcatcgatccgttggagatcatcgaccaatacggcacggatgccctacggttctctttagtgcaaaacaatgccattgaaaacgacatgcgcttttataccgaacgcgtagaggccgctaggaactttgccaacaagctgtggaatgcggcgcggtttgtgctgatgaatgtgggcgattatgagccgaagggcttagaaggtctggcgctggcaccggaggatcattggattctgcacaatttagatgaggcggtgcgcggcgtaacggccaatatcgacaatatggagctgggccttggtgcgcaaaaggtatacgatttcctctggtcggattattgcgactggtatattgaaatgtgcaagacgcggctgcagggacagggccaggaaaagcagactgcgctggaagtattgctctatgtattggacgccacgctcaagctgctgcatccgtttatgccgtttgttacggaggagatctatcaatctttgccgggctcggaaggatttttgatgaaagcgtcttggcctacagtgtgcagtctggcctcggcaaagacggcggaaaacgtgggccagctgatggagctggtgcgctctatccgcaacctgcgccgcgagctcaacgtaccgcagggcaaacgtgcgccgctgtgcattttggcaagcgagaacgaaagaaagtgttttgaagaaaacaaggcctggtttacccgcttggcctacgccagcgagcttcagtttttagaggatgagacgcaggctcccaagatttcctcgtccgcagcttctccgttgggaacggcctatctgccgctgggagagctgatcgatttggagaaggaacgtcagcgtttggacaaagaagtgcagaaagtgcagagtgaaatcaaacgtgcagaggggaaattggccaaccaaggttttgtcagcaaggcgccggccgctgttgtggaggaagaacggcgtaagctgcaagagaatcgggcgctgctggagcgtgtgctggctctaaaggcaaagctgttatgatgtcgttcccttcacactggacagaggagcaaaaacagcggttcgatgtctacctgccctatctggggactcgtaggttgatgcaggaaattccatgcattcatgtggcgggcaccaatggaaagggctcggtttgcgccatgttggaaagcatgctgcgccaggcagggtatcggacggggctgtttacctccccgcatctctatcacgaaaccgaacgcatcctcatcgatggccgccctatcgacccggcctatatgcaagaagggatggaacacatagccgcgatactgccgagcgcgggctattttgaaagaactttcttttgtgcaatggaggcatttgccgcttctggctgcgagattgcggtgattgaagcgggcatcggcggggcaatggacgtgaccaatctggtggcgccctgggccacggtgattgcaaacgttggattggaccatacggcggtgctaggcgatacgctggaaaaaattgcccagcaaaaggcgggcattgccaagcggagcgtaccaatggtgttgtattcggatctgccaaagggtgtgcatgatgcgattgtcagtgtctgccgaaatgcaggcgcccccatatacgaaggggagagaatcaggatcatacagcaggatggggccttgcatcccgtgttgacatttcaaaccgataagggcgaggttggcccgctgacgctgcccttgatgggggcgcaccaggtaaaaaatgcacagcttgcgttggcagcgatgatggctcttgaaggaaaaatcaaagtaacagaagaacaacttgccgaggggctgcgtacaacgcgctggcctggcagaatgcagtggatgcccacctgtggcacgggcccgcagattttggtcgacggcgcgcacaatccacaggcggccttgcagctcaaagagaatatccagcggctgtttggaaaatcccctgtcgtgcttttatgcgcagtgatgcgggataaaaatacaaaggaagttgtacgccaactgaatgaaatcgcggaggttgctgtctgtactgtggcggagccccaaaggggaacgccgccgcaggatttggctgcgctgttttcctgtccggctgaggctgagccggacgcggccaaagcctatgccagagcatgtgaggcagcgcgccatcggggagcgctgcttgtggtagcaggctctttgtacttgcctggcgccatcggcatcggcagcgcgcaagaaggataatatagggagattttgacgaaatttggtgaatgtgagacaagctttacaagggagagtataatagaggaaacagagcgtaaaaggaggagaagcatatgaaaaaatcgtttgctttcataatctgtatgctgctggggctagccgtgctggcaggctgcggcggccaaacggcgcagcccgtcgaaagcgcggcagctgcgcagggcggtgctactgtgcagcaaaaagagctgaccgagcaggaattacaaactttggagccgttatttcgtatcgtgatgggatgctcagagaatggattttctgggcagccggatgcaaaaacggcttccatcgtggtatacaatatgataaactatgatatttttacagcggaggatggagaccgtacagacgactgggtcagcgatgcgatgctgcaaaagatatacgaggattgctttaccgaccatgctacgccgttggacttttcctcgtatacaatcatgagcagaaaggacgagggatataactgggagcattcagatatggggctgacgccagaggcaaccgtcacggacagcaaaggcatcggtaacgatgaatatgaagtgcatgtttcgcttagatacccagaggatactgagctgacaggaacgggtacctttgtgatccacaaaaaagaggacggaaaatttggctatactttgagcgcgtgggagtatacctggaacgcttaacagcgcacaaaaagggaatggttttccattcctttttttatattttggacgatatttgaaaatcaagagggattcggcgattctcttctaccttcggaaataatcggattttttgtagtgtatcatgaaaatagatatactggggggagaaaagatgaaaaagaagctttttgcactatttttggccgtattgactttttgtgggctggcaggttgttcatacagtgttgacagcgagccatcattcacacaatcgcctgtgagttcgccaacggcatatacgccggagccggcaacgcctgcgcctacgttagagccaacgacgacgatgacggaaagagcgacgcaaacaccggagaaaacgcagaaaaaacagcaacaggctacgcagaaaccaaagaaaacacaatccacaaaaacggaagacaaaacaggcaccgtatacattaccgatacaggggataaataccatcgttccggctgccgctatcttaaaaagtccaagcatgcaatctcattgtccaatgcaaaagcacaggggtatacgccttgctcggtctgtaaaccataaaaagcatgccattcggcatgcttttttactaaacgcggggcaagcaaaagcgaatacaaagcccaggcctgttcttccgcggctctgcccagattttcccgccgtgtgattgcaggatctcgcggcaaatggaaagccctaacccggccacagagcgcccggcatccgaggtaaacagcggatcgaaaatttgggagagctgtgaggaaggaacgccctctccactatcctcaaaagcaaagcagatggaagggccttcggcgtagcaggagatacataacgatttttcgccatcctggaaatgttttagactgttgctgataaggttgccaaaaacgcggcgaatctttgagatgtctacctcaacggcttgtaaaggggcctggttggctaaattcatttgtacgccaagcgaggtaagctcctcttgatattcctcctgtaaaaggctaaacagctgattggtagtaacgatttgttttttcaaagagccgggcaggttacagcttagataatcatcaaactcctctaccagatcccgaatggtctgcgctttatcatatatcgtggaaacatagcggctggtacgctctggtgtcaaagcggatttctgcatacgctcagcataacccatcacactggtaagcggcgttttgatatcatgagagatcgaagctatgatctggttttgttttgccttttctacctctagatcctccgtcagctgcacgaaggcattttgcagctggccaatttcgtccttgcgtgcggttcgtttgggctttataccagccttataggcctgcatatcgccctgcatccgcatgatgggacgcacataatgaatgtacagaatcaggtagagcacaggaagcacaaacagaaataaaaggataccggcggtaaagagccgacggacagcgggaatcgatgaggcggacttaatggagataaattgcgtaacacgcagcaaaagcgtctgcccatcagcctgcaagggagaggtggcattgatggagatggcgggttcgtcctggtcttctgtgcggtagagcgtgcggccgtcgagatctaagagatgaaactgatatccggtagcatcggcctgctgctgtaaatagcgagaaaagtctgattctaatggcagatgatcggcataggaggcgcactgtacctccagcgacgcttgcagctgttcaaattcatgagccgtagaagaagacaaaaaaagattataatagccaaccaacaggccaacggtaaggaacaacgtggcgagcacgatcaaaagaacctggtttcgcagacgcatggtggtttactcctgtgttttgataaacttgtagccaacgccccagatggtcttgatatattcgctggcagggtctatttttgtgcgaaggtttttgatattgacggcaacggttccgatatcgccgtaatgctctccccaaacggcgttaaagatctgctcgcgagacaatacgcgccctgcattttccatcaaatactgcaaaagctgaaattctctggtggaaagggagatgggcgccccgtgcttggttacttcaaagctttcttggttgagccggatacagcctacctccagccaaggggaggcgggctttgcatgggtgcggtcctctcggcgcagatgtgctttgacgcgggccacaagctcctcaacaacaaagggcttatagatataatcatccgcccccatctcaaggccgacgagagtatccagtgtacggctcttggccgttacaaagaggatggggcaggagactagatcgcgcaccttacggcatagctccagcccatccatttccggcatcataatatccaaaataatcagggagaaatcctgtgcctgttggatcaatgccaacgctgctttgccatcatgcgccaggacagtagaaagcccttcatcttccaaggcatcagaaacaagctcggcgatggccctgtcgtcgtccacaaccaaaattttcggcataagagactcctccttttctttattgtaccacagcgttaaaacagattggccagcttttgccaaaagctgagctgtggcgctttctcttcctccggcactgcgggctcgggcttatggatgtcggcggttttcagcacgaactgaacagcatctacatgctcattttctggcgatacaaacgaaacaggggtaaagtccttgccggcaaacgaatcgatggctttttgcagctcttcgtctatggcttggtctatgtgtgaagtttcttgattcatggtattggcaccgtccgagagggcgtcggcgccgaccgccagttgccccatatttttctgtatggtagctacgcctcctgtataagtgccgagagcggcatcaaaatcgccatattgctcttccagagtggaaagcgaatctgtcagcgtagttaaggcaggattaaggtccgccagctcggtttttttctcagataggccgttggctacctgatcgacagcgcccattttactttggtaaatggtgagaagggcctgaacattggggtcctggctatttttcaggttggcaagtacggccttttccatatcgctttgctcggttacctgattcaggccattgacggcggtatccaggccggaaggaagggcagatagcttggttttcagcgtttccgcgccgttgcttagctctccaatggcgctaaggacagtgctggaagcctgggtcagggatacagaagagtcgttgatgcgatttaggccgtccctaatttggccggagccattagcaagatcctgtgcaccagtgtgtaaagaggacacagcccctttaaggtcgttgatcttgcctgtaaaagagggggtatcaatctgatcggcatcgacatccagcgccagagagatgccgttgatgttgatgccgtccatttcaaaatcggtgacgtcgctttgaatggatatatgcttttcactgccaggcaggatggtataggtcagctgcttgtctgtaccaacattggcttccgtggccccatcagcggagatattcttgcaccgagaagtatccagggccagggttgcttgcaaagcatagttttcatagaagctggcggtttctgcgctgtttttggtgatatccatcttgatctcaagatggccagagcggccggccagcgtagatgcatcgatggggcttccgtctaggaaataggatacctggatttcccacggcagctgacgctctggcaacgttccttggtagtaaaagcgccctttgggagcagagatagagacctggccatcctggtatatcagcgcatcgctggtggaaaggtttttggtttcggtataagcgccatagtcgtgtatggtctggggctgttcaagatcaaacgcattgacgacataaatggcctgtacctggccggtagaggaaaggttggcgtatatgatttcttctttttctgtggcgtcttctgcggccaaggctggggggatcaaagagaacatcatgagagccgctagagaggcaggcaggactttttgcattgtctttttcatgttgattacacctccgaagtgtgaaaatggaattttttgtgcgaggttgtttggcaaataactttatcaaacaggatcagcagaccgggtagtacaaacagcacaagcaacatagacaacagcgcgccgcgccctaccaaaaagccgagctgactgatgataagcccagttgaaatcatccccatgatggtgccgcataccgcaaggatagagccgcttgtcaaaatggagatggtgcagtctcgtaccgcatagacggcagattggaccttgttttccgtttcccggtgctccaaatatcgattggtgaacaaaatggcatagtccactgtggcgcccagctggatggagctgatgatcaggtacgaaatatagtgcagcgtcgtccccataaagtagggcactgtgagattcagccagatggaagattcgatcaccagcagcaataggatgggcagcgagatcgatcggaaggtaagcagtaaaatcacgaaaatggcaccaatggcaaccgcgttgaccctgacattgtccgcaacgacggtatcctttagatccagcgtgtttacagcctgcccagtcaaatgataggtatctggataggcgccttgggcgatctcacgcaccttgtttacgacgctgaacgcctgctctccgtcggtatctgtgccgacggtcaggacgatgcggctgtaatgatcgctgatcagctcgctgagctggctttccggcacatattccgtgggaataggagcgccgacagtaccgacatacgagatgacggaggtgatttccggcatggcgttgagttgatctaccacggatttttctttggcaaggtcgccctttggcaccatcaacaccatctggttttcccggccgaatttttcttcaatggcacttgtttcccggccgatctgtgtattttcgccgccaaagatcccggaggtgccaaacttgaaagtgttgttggattgtgccagaaaacaggggacaacaagtatggcaaaacagatgagaataggggccttgatttttacggcaaagcgccccatcttttcaaacgaaggcaggaagcggcggtgctgggttttgtcaatgagcttatagctgtataccgccagaactggcagcaataccagcactgtgaccaaactgaaaaggatggctttggccatgaccagccccatatccggcccgatcttaaaccgcatcaagatcagtgcggcaaagccgatgacggtggtaagcccgctggccatgatggaagaggtggattttttgacagcctccaccatggcttgctgcacatccatgccggtgcgccggaattcggcaaatcgatgcagcaggaaaatggaatagtccatggaaacggcaagctgtaaaatggcaccggctgcctttgtaacaaaggatacggtaccgaagatgacgttggtacccatgttgagcaggatggcaacgccgatggtagccaagaagagcacgggctcaaaccagctagaggtggtcagcagcaggatcacaaatacgatgggaatgacgatcatcatcatacggcttaattcagagctggtagattcgataacggcgacggtatccacacagctgccggccatcatccccttatcaccaagaagggcgcgtatatcggccagacactgggcctgcttggaggtgtctaccgttatgctgaacagtgcgcagttgtccttgtaccaatcctcaaccgtttcctgcggcatggtctccagcggtacggccaaagactgcacatcatccagccattgaatttcctgcacgccgtcgatctcgcgcatcttttccttataggccaacgcttctggaatggtaacatcctgtaccataacgcgtgcattggctgggtccttggcatattctttttccatcacatccagtgcgatggtggagggggcgctgtctggcaggtaatccataagatcatagttgatattgaccgtcatggaaagcagcgcgcttgcgatggtagcgatgataaaaatgagcaatacggtttttttatgcttcaatatggtattggcaaatctatccatcgtatcgatcctttcgttttgatttccaatagtaccttacagattcttttcaggaaaggagtcgaaataaaattaagaattcttaaagccaagatttgtagagaaaaagaaaagcgccggttacacggcgcttttagcatggttattttagcatgattacggtatccttggcgcgtggctttgccgtcggagcttcatctgggacaccgacaatgcatgacccgacagcttggtaatcctcagggacagaccactgcgctttcaatgcacgcccttcctcggtttgaaaaagatcgatcacgcaatggatccaacaggagcccaggccttctgcctttgcctggttcatcatattgcccaggcacaaagcgccgtcggacaagggcgcaatggcatctttttgaacaaatacgatgataagggtaggggcattgtaaaaggggctgtctgcgctgcctgtcatggacatagcagcttgggccaccttttgtagttcgttgggattttgaatgacaacgagcttccaagcctgctcattcatggcgctgggtgcaaagagacctgcggtaaggatagcgttaagctgatcgtctgtgatttgcaagggtttatactggcggatgctgcgacgggtaagcaggatattcgacgctgtatgcatatatagacctccttttgtattggtaggttaagcatagcacaatacatagcataccgtatagaatgacagcaatttgtccgatgcggcagaccatacggcagaaatttttttgacaaagatcatccccgccctttacaatgttgggcaaggggatgaacgcccctaggactggaaaggagaaaatcaatatggaacataaaaagggccgctttgaaatgatggtcgatacaacgaatacagcacgcgctatgggaagcgggagcttggaggtgttggctacgccggcaatggtcgccatgatggaacatgcagcctgccttgcgctggaaggtgcgctgccagaggaactgactaccgtaggcgtggacatgcaggttagccatgtatcggcttcgcccgttggtatgaaggtttgggcagaggcagagctgatggaaacggatgggcgccaatatacctttgagattgaggcgtttgaccaagcaggccctatcggaaaggccgtgcataagcgtgcgagtgtcaaaaaggaaagattcatgcaaaaaacgcagggcaaactgcaaaaataagcgtgtatacacataattttcggccaactgcatatgctttggtaagacggatgctccttgaggatccggctagagtaggcgttggccttttcttataccttaggatttcttgactttttttccacgacaagatatagtaaatataataggaattattcttaattatagcgcttctcttgagaaagtgggtgaagagatgaaatacagcaaacagagagaaatggtattgcaggccgttggccgtctgccagggcatcccaatgctgcggaggtatatgaagaggtgaaaaaagcatgtgcatctatcagcttagcgacagtttaccgaaacttgaacacaatggcggatcatgggctcatcggaaaagtttgcctgccggagggggcagacaggtttgataaggagacccatctgcacgatcatatgatctgtacttgctgtggggacgtgatagatctgccgccggcgccctggcagcagacctatgcagagatagaggaaaaaacaggctttacgccagagagtcatcggctcatcgtctatggactttgcagtgagtgtttcaaggcacagcagaaggagaacgcagtatgagcagcttggaaggaaccaagacaaaagaaaatctggaagtcgcatacagggagaaatccgaaatacgctgtcgctatgcgtattacgcggcgcaggcgaaaaaggaagggtatgaacagattgcagggatgttccagcaagcttctgaatataacaaggaacatgccagggtctggttcaagctgctcaacgacggcatcggagataccaaggaaaatgtacggcaggctgtgcaaacggagcggcagctatggaccgagcagtatttggcatatgctgagcaggcaaaggaagagggatttgatcagatcgctacgctgtttgagggcatggcggccatatccaaaatgcaggagcgtggatttgcccatatggaacaggcgctggaaacgcaaagcgtctttgcaaggcaggaaacgctccggtggctttgccgaaactgcggatttatccaaacggggctgcaggcaccgatgcaatgcccgatctgcgcacagccgcaggcatattttcagccaatgatagagaatggataataacagcacagcgccgtaaaggcgctttttcttttactttgtaaaaagtttccacttttcccaaataacatcagaaaggatcaacatggcgaaacaggcaaacgagcaaaaaaagccagacaaaaaatacgatgtatggaggatgcgctggagttttattctgtgcggcttgtttgctttgctgcttgtaccaggcagcacgatagcgctggccggtagagacaacgcattgtacttttctctctctgccattgggaatgcgcctggcaatcgattggccctgattctatggacattggctagcagcggcttttttgtgtatgcgttgaggctgcttctgctgctgtgcggacaaaacaacagcttatcagagccgttgatgtgcttggcaggggggatgcttgttgtgtgcaatcttttgccttttttgcccgatgaactgcctaggttggcgcagtatcataactttttggcgatgtctgcttcctgtctagtggccttgagtttgctggtgtttgttgtcgacttgagaaagtttgacatagcggtatgcaaggaatcggctggtttgctgacgctggtattggtatccgggggccttccgttttttctgtttggcgtcaacggtgtgctggaagggatttgtatcatactcgtatgcctgtttttatttttcgtattgatcttggtggtaagagcaaacgctgcagccggcatctatgcacaaacagagagggaatctacttgcagaaaggaaggacaataggccgaatttttcttgcacaaagcagaaaggggcgatatagtataacaaaacaaaagaataagaaagcggagtgacgcgcaaatgaaaatcgagacgcagtgtctgcatgagggatacacgccgggcaacggggaaacacgtgtacttcccatttatcaaagcacaacgtatgtatatgacagcacagagcacgtaggggatctattcgacctgacagcagaaggacatatgtaatccagaatcagtaaccataccgtagcggcggtggaggaaaagatcgcggcactggagggtggcgtgggagcgctttgtacctcgtctggccaggcggccaatctcattgccatgctgacgattttgaaatctggcgatcatatgatcagcaccgggacgatctacggcggaaccgtcaatctttgggctgtgacctttcagcgctttggcatagaggtaacctttgttgacgcggatgcgccggaagaggagatcgaaaaggcgttccgccccaatacaaaggtggtattcggcgaaaccattgcaaacccctccattgccgtgctggatatcgaaaagatggctaggttggcgcaccggcatcatgtgccgttgattgtagacaataccttcgcaacgcctgtattgtgcaagccctttgattttggcgcggacatcgtgacgcattcaacgacaaaatacatggatggtcacgcagtacagctgggcggcgtgattgtagacagcggacgatttgattggacctgcggacaatttccggagtttaccgagccggacgaatcatatcatggcgttgtgtatagcgaggcttttggcaatgcggcgtttattaccaaggcacgggtgcagatgatgcgggatctgggctcaacgatgacggcgcagggtgcgttttacttaaatttaggcttggaaaccctgccgctccgcatggcaaagcactgtgaaaatgcggacgccgtggccaaatacctggccaagcatgaaaaggttgcttctgtgaattatccgacgctgccgggggataaataccatgccttggcgcaaaagtatcttccgaaaggaagcagcggggtcgttgcgtttgatatcaagggtggcagggaatcagcggtgcgctttttggattcgctgcatttggcggccattgtggttcatgtggcggaaacccgtacggctgtgctgcacccggcaagctccacccaccgacagctgacggatgagcagctggttgccgctgggattacacccgggctgatccgtttttcctgcgggattgagaatatagaggatattctggaggatctggagcaggctttggcaaaggcttgagcaaaaggcgcattatgcgcctttttattttgcggaaaagtgaataaatattctatatataatatgcatattcaatgatatattttgcataaatgagtatatcaagcggggtttttcacaaaatatacgtatttgaatgaatttttataaaaaaatttctgacaaatgcttgacatattgcatgaagcaaactataatacatccatctgatatgtcatacgactggggaggaaaagaacatgaagcatggtaagaaagtattggccttgctggtatgcgttgcaatgaccgctgtactggctgtgggttgtggcggaagcagcaaatctgccttggatgaaattaaagaaaagggccagttggtctggggaacgaatgcacagttcccgccgtttgaaagcaaggacggcagcggcaatgtggtaggcgtggacgcagatattgcaaaagcgatcgcagatgaactgggcgtagagctcgtggtagaggatatggaatttgattccctgccggctgcgctcaagagcggcaagatcgacatcatcggtgcgggct

SEQ ID NO: 672 - DNA, 32759 bp, Unknown
  16S sequences of unknown bacteria
ggcaaaaacaagaggagccgtgagcctgccggaaaaccgaccccctccccttacatcgttaaacccgtgatattttacaaaggccgggtagtcgctgtgccccgggcgcataagctctttcaaataggagtaatcctttgaattttggttttcgttttttatcacggcgcaaaggggcgccccggttgtgtaaccgtcatatacgccggagagtatctctacggcgtcgctctccctgcgtggggtggaaaggccgccgttgcccggtttgcggcgagccatttggctgtttatatagtcaaaatccagctttatccctgccggcagtccgcctatatttatgcccaccaccttgccatggctttcgccgaaaattgaaagttgtatgtttttgccccaatcagcacccattgattttacctccgagagatttaaaatccgcccaaaaattcggataagattttgctacgcactctgtgttgtctattgatattttcccttttgcaacagttgagcacatcgccgccaacatccgcatacggtggtcgccgtaaaccgttaaatcgccccttgtcagaccttccgtgtaggaagtgtaaatcgcactttcatcgcaatttatattgcccccaaggctttttatcagccgagcagtaccggttaatctgtcgcattcttttattttaagcctttggcagtttgttatttttccccgtccttttccgaaacagagagccaaagagagaaccggcaaaatatccggacaattctctcccgaaaattcaacggcttttaaatctgccggcttaaccgacaaaagtcccttttcccccacaatttcacagcccatatgagccaaaatattcaaaacttctctgtccggctgctttgaatttatattcagcccttttatttttatatcacaacccaatgcatccgccacaaaataatttgcggcggcggaaaaatcaccctccacaaaatattttttgggagttttataggtttgaccgccttttattttaaaaacttgatagtttatgtttttgatttctatgccgaaatccgctaaaatatccagggtcatatccacatatccggcagattgcagcggagttgtaagagtgatttcggaattttcccggcacaaaggcaacgcaaacaaaagccccgttataaactggctgcttacattgcccggcaatgtaaaattaccacctttaaacctgcctgcaagtttcaaatcaaaccccggcaaattttgtgtgtattctatgcagtgagatttaaaaatatcaaagtacacatcaaaagggcgtttggcaaggccctttgaccctgtaagcctgccggcgcctgcaacagccaaagccacaggcattaaaaacctggcggtggatccggattctttacaatctatccgggggataaaatcacggtgttccctgccgcctatgcctgttataacaatattattgccctttttttccgcctttgcccccaaggcggaaattccgccgagggtggcaataatatcgtcacacaaatcgacgttttcaattagggtttcaccccgggcaaggccggcgcagataatcgccctatgtgcggcagactttgacccgggcacagtgacaattccccgcaacttgccgggcaatatatcaattttgcccatacagagcctccaaatatcttttcattgcggcggcatcctccgactgtgtgcctgcgctttcacagattatggtggggcttaggttgttttcatacaaaacattcataagcggttcaaattcaggaccccatatatcatcttcaaaggtcaaatgctttttttctccgccttttgtgtattctattttagaaaaatgagcgtgaaaatgtctgaacctgtcgtcctgcaatacttcgtttattctatccactatgcgaaggtagtcgtccttgccctttataccgccggctgttcgggcatttaagtgaccgaaatctatacagggaataatccttttgtcggttttgcaaagggttaaaacttcctccaaactgccaagctgattgattttacccatggtttccgggcagatgtgcatatttccatagcctttttcgtccagggcggccaccattttctctatggtgtcaagggctttggtcattgcctcctcccttgtgattttaccccgagaacccgggtgaaatattattctcttaccgcccatggcatttaaagcctcggcgctttgcaaaatgtaattaacgctgttaaggcgtttttcttcgtctatggacgacatggaaataaaatacggccgatgcagtgatacggcaatatttttctccctcagtttttcgcctatttgtcccgccttttcactgtctatgcgcacgcctctgccgcattgatattcaaaccgggtaagaccgaatttttcaagatagtcggcaatttgcaaggtgtttttataacccatagctttaaagctgtctgccgtgccggccgggccgaataatgtcattttgcaaaacctccgtgctttttaagatacttttttataaatggcttttcaaatcgccttttaaatttaaaaaatgttgttttttccggttctatgggcataacctgcaaaattttcattccccgcaggtgtgctgccaaaccatcggttaaaatttggtcgccgattataaccgtgtctttttttgtgcctttcatttttgaaagggcttcgtttattccctttgacagcggcttttttgcgtcatggcaaaagggcaaaccaagcatgtccgcaaaaggagtaaccctttccatgtgattgttggaaactatcatcatattaaagccctctgctctcatcaaatcaagccagttgggcaccccttgaccgggggtagggttgtcatgggttgtaagggtattgtccacatccaaaataagatttttgaccccaagggtatgtaaaaattccggagttatatccgttgttttttcaaacagatagtcgggagagaatatcagcatgatttttcctccttattaaaaaacctgtcttttaacagcacccctgcaataaggaagaaagccccaacggccataaggcataaaccgagggcaaatccccgtggaatatatgtcatttcaacaatattttccccttcttccagcggaatcgccgtaaaccatgtcataaatttttccggctgcacctttttgccgtttaccttaatgctccaacattcatcatacataatggtggacagagcatacttaccctttgcggaaaactctattgtattgccctgttgttttatgatttttacggcattttgatttatggcccggcttacaacttccagtttttcataatcccggttgccgctttcatcaagggtttccacaccggttagggcaacatacatattgtctatgtactgccgccaattttcgctgtattcaatactccgtgtgtcgccggtgaaaattataggcaaccgatatgggttgcggtaaagaatattttctccgttttcgccgtcataaattttttcgtatatgttgtccggcacctgtgagccggaattaaaaatatattttatgccccaaaaactgtcgatatacggaatactgcgagaatagattgtactgtaaaatgtgtcctcgtagccgaaatattcgtacatttctttttgccggttatcaaacagcgaactgaaatgagatgtgccgtagtaacctatggacattgcctgactgtaagaataaggatctgtgtcctccaagcgataaaaagatttatcgtctatattctctataacgcttttaagggcgtttactttattgtccgtccgaaatttctgcttttgtgagggcatattgtcgccgattaaatacgggcttgaaatacaaacagcctctgtcacccacaaaagacccagcacccacttaaaagcgccgtttttgattttattgccaaaagcccccagaataagcacagccataagtattgtaaacagcttgttcacctgcattccaaaaagtttaccggcaaaataccaagacagcagggctatcacagccgccggcaataggttttttaaggaaaattcctctgacccttttgcggccgtacttaaaaacaaaaagtagaatatacagctttcacgaaagccgaagccctccggccaggcaaagccgtgccacatatagtaaatctgcggtacatacatcatcaaaagtataacggcaaggatgcacagataagccgttttttccctttttgaatactttttgctaacgaaaaacatcaccgcaaagcaaaattcaagtacccctgcaaacaagacagggctttgatcgaaattaaaatttccagaaatcgcacaggcaaaagcccatatatagtttgtcataggcttttttctgtcggtaaaaaagacaaaatcgctaactttaccgccggaaagagcttttaccgacggaataattaccgggcaggcaagaagtataggcacaatggcggcataagccattgtgacagttctttttaccgttaatttccaatcgtacccctttaaaaacagagagtaccaaaagaagtaaatcagtataaaaaccgaaaacattgccgctatatagtagttggaatacaaacaatatgtgtaaaccgccataaaaagccaaggtttttttccgtctgccacatattccgtacccagtaccaatataggcaatagggcaaaacagtcaaaccagataatattgcagtaatagaatataaagtacggatatacaccgtatgcaaccgccgcaccgatgcttacagccatgctctttgaagttttgcgcatataaacatacatgcacagcccccgaaaaacaagttttgccgtgataatggcaaaagcggttgcctccatactgtcaaagaaaaacacaagcagattaaaaacagatatgcaatagtaagcaaaaagccccaatgtgttgccgccgaacccctttgtaaaagaatataaaaattccgacggactgctgttttttaaaaagcccaaaaaatgtgtgtactggccgtaaaggtctatacacaatattgatttatcaccgaatggatatattccgcctctgtaaagggctaaaaaccacacccgcaaaacagccagggcaaccgttatgccgccccgaatactttttcttttttctgtcatttttactccttaaccgcaaaaggttcgtatcctgcggctacaagctctttgttaaatatctctctcactccttttaaagcgtcctccattgtgccctcaaaaacggtaaattccgaaaacatcaaattcaacggccggttaaaatcctctatgctccgtccgtccttgtcggtaacggtgccgtcctctcttgtctttttgacgcctttgaatctttccatccgaggtcttgcgtcatccaaaaaagcaaagcatctaagccccaagccgtatgcaatgccgcactccacagccgtgccgctgtccggttcttctcctctgtaagggtttaagtttgcaatgattatatcgcttctgcgaatgtgatttgcatcgtgtataaaacattggagttccttttcgtggggagaatcgtcctttgccacatagtctttaaattcgtcccgtggaggcggatctgacggataatagccgattataccgtacttttcgcacaatttatgatatttttcctgtgtttcaagggtgttggggtaaaaaatttccatgccggcaagataggccttaggcattcttacaacgccgtttttatctataaacatcttttattctccctgttccaaatctttttttatcatttgcaaagcctgttccaaacccccttgggctattttggccgggccgcttatcataaggttcacacagccggattcaaaaaatgcaccgttgtcatctctccaaaagccctcgtccttatgtatgcttccgatgtatttttcataacaggggcgcatatcatctataaaagcgtaaagttttttccccttggaataagcatatccgatttcaaaacaggtgccgctgtccggctcccaacctctgaaattatttatattcgcaaccaaaatatcgcatttatcaataaaaccgatattatttttaaatattttctttgcagtctgctcctttgtcaaagaagaaaaatcctcattgttgccgtcccccaaaacaggtgataaaatttcaaagccatattcttcacacagctccattgcatgtgtcgcaagccggtatccgtttggcaaaaaacactcgtagccggcaacataaatttttaatttttcgctcatacttaccctcttatttttttcttgcaaatttattgtattccctttgggaaaagtcatagcctaccggcacaatttgcacagcttcggctatgccgtccctcgtccacatttccggggttgtttgcaccgtaaaaccacagccgttatcgcaagtccactcaggtgtgggctttctcggaaaagcgataagtgtcatcagcattgcgataacgccgccgtgggtgattacgcttgcctcatagataccgtttttcatcatatccataaaaatatcgtttaaagcgagaacgcacctttgggcaaaatccgcactggactctccgccgacaggtttatagccgctttttgggtcaagccattttgcaaaattcgggtctttttcggtaagttccgcaaaagttttgccctcaaattcgccgaaattgcactccatcatatctgcaacaatcttgtagtccatatccggatatataatttccgccgtttccacggttcttttcatagggcttacatacaatttgtcaactttcggatagacaaatttttctcgcagttccacaagcctgtcaacgccctcttggcaaaggggggaatctgtgccggagcccaaatactgccccaacaggttgccttcggtaaggccatgacgaattaaattaagacgataatttctcattttatatatatcctccaaatattttataatttttagtcgatttttgctatttacaatcagttttttttggtttataatttacgaacagtaattgaaaaggaaaagacagatgaacagtttcgctcgtgtgataacactgctaaggaaagaaaaaggaataacgcaaaaacaagccgcccgggatttgggcataagccaagcgcttttaagccactacgaaaagggcttgcgtgagtgcggcttggactttttggttaaactttgcgattactacaatgtttccagcgattacgtccttggcagaagtgcagacagaaacggcacaatgcttaatatagatgcccttgacggtgcggaagtaagcaaagatatccgctataacggcagcgttttgcctgccatgaacaaaagattgatttcttcttcccttaacattatctatgatttgctgtcaaaagccggcagcaaagaacttaccacaaaggtgagcgaatatttgatgatgtctgtttacagggtttttcgcaagctgtacagctttgacaaaaagaacagccaaagccttttcaatgttcccgaagatgtatttgaaggttacacctgcggcaccatggaaagagagagcgcagagataaacattttacttgcggacaaaaatgttgccaagcaagtaggctccgcttttgaaatgacaagccaaagtcttgcgcaggagtatccaaagcacgcaaccggccttacaaacacaataaaaacagcagaagaaattataaaataaacttttacggtccccgattattcgggggctttttattttcaatcacttaataaaccttcggtataattatatcaaataccggtaaaaaaatctacatacggatggcaaaaacaacaatatgttaagataatttgcagcctttttaaaattatataccataaaacacaccttgcccgatttaagcaaggtgtgttttgttgcaaaatatttttatttgttttcgctgtctgccgcaggtgtaatttcaacgctgtcaagcaaagtgtcggcaagtaaacccacataggtttttcctgtgttaataggcaacagattgccgttttcgtctttaatcacaatgggattttccggccggcccttttcccatgttattgcttgccatgcgcctttggtaaagtagtaacctctgccccgtgaaaaatcaaacttgggcaaaatgccgttttcttcctctacggaaacagctgcgccgataacaataacattatcgaaagcgagctgtgagccgtcggttgcgtctgtgtgaggcacaccgaaagcactctttaaatatttgccgctgttttcgtcgtaatcaaaggccacatctgcataatccgagtaggcataagccactcttatggcagaaccgtcggcaggcaaggtggcttcctcaccctgttttacaaattcaaaagctgggtaaaatccgccggtggtggcgataccgttccgtgatataccggcatttataaggttggagtcggtaaaccaacagtgttccgacgcctttgtctttgccaattcgctgtcatatgaaaatgattgaaagcctaaatagatgccgtcaatatcctgataggaatagaagtttaacattctctttgcggaatttgaactgcctatatgcacataaacggcatttaaaggcaacatcatctccacaaactgagttctggcacttctcacaggtcccacataaggcacttttgacaggttggagtacaaagccataagtcttgtaacgccgccctcggtaactgcctcgtagattatatccgcctgtgaaataccgctttgcggcatagccacttttgcattgtttaccattaccgcaacaggtcttgtgccggctttttcgccctctgccaaaggctcaccggtaagtgggttatagtttttctcttctgttgttgtttggctttccccggcaacagtgccgccggcattgccgccgtcctttgcggaacaggcaccaaatgccatgcagacaaacattgccgaaagaattattgaaattatttttttgataataaacacctcttttgattttccgctttgttctataccgtgattatatcttaaaaacggtctgttgtaaacagaatatgtttattatttgcggaaagttattcctccgttgcctcctggccttcttcagcctctatttcctcaacaggcgtataatcccctgatgagtccacaacctgtccgtcaaaggaatatgtgccgaagtagtcaaggcttactattgccacatagctcttgcccgggttgatctttatatctgtctctgtgccgtcaagacttactattctgagaggttcgttcgcctcgcctttcagccagcgcactttttcaaccttgccgccgttaaagtaatagccgataccgccccaggacaaatttacattagaaagaatgccgtccgggtatctttcaatagttgtccaaagaacaaatgcgttgtcaaattcaacaggccgattgtccttattgccgtcaaccattgggtgtgaaaagttgctcataaggtttatgtgttcttttgtatatgtgttgttttcccggttgtatgtaagttttgcggcgtaactctttgaaaaattccagtaaacctcatttacatcaatgccggacaaagttcttgcaggttcgtcataaggcacccaatcaaatacatttgcaggttccgtatagtttgtgcttataccgttgctctcgtcttccactgcccgggtgataagctcgccggatgtaaattccgtgtgttccctggctcttgtcgcaagcagtgaagaatcacggaaagagatacctaaagccggtatcaagtccttgtcggagtagttatatctttccagcatttttttggcatatgttgatgcgccgtcatgaacataaaggcagttcataggtatcataagctgaacaaactgatccctggcggagcgaatagggcccacaacaggtatttttccccagtcacggtaaaccgccatatatcttgttatgccgccctcggtttccatttcgtaaaccaagtccgcatcggaaaggcctttctggggccatgcgttctcggtgctgtcgccactcataatattgtttaccattatggcaacagggcgctgtccggatttgtagtcggaaccctgttcaaaaccggtaagggggttttgatgatattcttttttcgggattatggaaaaacctccgttcccgtctccgttttcgctgccctttacacagccggttgcaataccgcaaacaagcagtgcccggagcaaagcagataaaatttttttcatttttccctccgttatataaaattttacttcactgaaattatattatatttttatggctaattcaatgaataatttattaaatttttaggctatgggtttctttttctttttggatatgttacaatatcccggtgcataaaattaaacggaggtaattatgttcaagaattttaaaacctatctttgggtgtttttaatatcaatgattcctatcatagagttaagaggagccgtgccacggggtgttgcccgggggctgccattttggcctacatattttgtttgcgttttgggcaatatggtgccggtgccttttattctgtttttggtaaagccgattttacaggcaatgcaaaagataaacataaaatttataaataaaatcgcaacattttttcttgaaaaaggccataaggccggtgcaaaattcggcgacgccaaatatcttgccttgtacgcctttgtagccgtacctatgccgggtacaggtgcttggacaggcacattggccgccagtttgctggatttggacaagggcaaatctatgattgccgtcttgctgggggttatgaccgccggcgttattatgggcattgtatcctttggcgttttgggcgcatttaatttgtttgcttaaaatttgatatttatttcagtaaaaagccgcaatatttgcggctttttgttttgtgttatataaacagtcaaacgcaaaatccccgccttttggcggggataactttatttctttgatatattcttttttcgccatgttttcgggtacagcataaccaaaacaggtaaaatttcaagtctgccggctatcatatcaaatgcaaacaccaactttgaaagataagaaaaagagctgaaattgccggtagggcctaccacattaaaacccggacctatgttgtttatcgtagcggccacagcgctgaatgtggttaaaaagtcaaaatcatccaaagagataatcaacatggaaagtatatacaccgcaatgtagcccaaaagataaccgtgaatagaacttataaccgacttttccacaggttttgagtccatatgcacattcataaccgtcctcgggtgaatggtcttttcgatttccacttttatatttttaagcatgatggcaattcttgaaacctttaagccgccaccggtactgccggcgcaggcacctataaacataagcaataccaaaatggactttgacaactgaggaaagtcattgtaatcacccaccgcaaaaccggttgtggttataatggacgccacatggaagaatgcgcctctgaacgcaggttccaatctctcgaagaaattgcgagagtttacggttaacatcagcaccgacaatgcgataattgtaaagtaccaacgagactcctcgtttttcattgcctgtttaaattgctttttggccataagataataaacgctgaaattcacaccaaaaagtatcataaatacagccaccgtgtactgaattgccacggaatatccgccgatactgtcatttttaatgccaaacccacctgtgccggctgtgccgaagctgattgcaagagcgtcgtaaaggggtgctccctcaaccaacaggaagattatttccacagctgtcagtcctgcataaagcacatagagtatctttgacgtttcccttaccttaggtacgatttttgaaacctgaggccccgggctttccgccttcataaggttcatggttgagccgccggtaatgggcaaaaccgtgagaataaacacaagaatacccataccgcctatccagtgtgaaaaacaacgccagaagttagtccggtaggaagcggcctcaacatcgattaaaatcgttgaaccggtggttgtaaagccggataccatttcaaaaaaggcgtctataaagttaggtatgtcaccgcttatcacaaaaggcaaagcgccgaaaacgcttagcaacacccatgtggcaggcacggaaacataggcctctcttgcatagaatgtttgatttttaggctttttataggacatggccgtgccgacggcaaatgccaaagcagcgccccgcaaaaatgcaaaagccgctttttccttgtatataaagccgactatagcaggcaaaatcataagcccggcttcgattttcaaagcgtagcccaatatgtagagaataataccgtagttcatactaattcaatatatctcctacatcattgagatttttttgccccgttaccacaaccattctgtcgccgggccgcaaaacactgttgccgtccgggattataaacttgccccggtgcaaaatgccgcagataataacattgggcttaaatttaagccggcgcaagggcttgccgataatccgtgatttttcgccgattttaaactccaaagcctctacttcgtcacctatcaatttataaattttttccacattgctgccctttgtgttgtttttggagcgaacatactgcaaaatatattcgtccgtaagcacataggggtacacaacactgtcaagatttaactttgctatcaaatccgtaaaggcaaccctgtcgatttttgtgataaccttatttcccgttaaatccttaaccgagagggagagcataatattttcttcgtcaaagccggtgagagccacaaaagcgtcataatcgtaaacgccctcttccgccaaaatctgcttgtcggaagcgtctccgtgaataataagggcctttggcaaaagttccgcaagttcgttgcatctgtcctcgtcaatttccactacacaaacatttatgcccatctctataagctgttttgccacatagaaaccggttgtgccgccgccggcaatcataacactgcgtatcggtttttggcttacgccgatttttgtaaaaaattccgtggcttttgccgggtttattatgattgaagccttatccccgccggccaatgtaaaatcacctgacggaattatggactccccgtttctttgcacggtacaaaagagcacatcttgttcgatattgtttctcacatagctcaaattttgtccgtccaaaatagaacctgccccgactttaaatgtaagcatatccatcataccgtcaaaaaaagtgttcatctcaacggcggatggcactcttacaattctcgcaatggattttgcggattcgtactccgggttaataatcattgaaaggcctaccgactgtttgataaaatcggtttccgccacatacaaagggttgcgaactcttgctatggtatcacattctgcgtttttctttgcaaaaaggcaacacagcagattgtcttcgtcaccggccgtaaccgcaataagcaaatccgccgattctatgccggcctggcttaaagcgtcattgtcaaggccgctgcccacaatacccataatatcgttgtcatcgcaaagttcctgcaatctatccgcccttttttcaataaccgttacatcatggttttcaccggacagggaacgtgccagggcgctgcctgtttttcccccgccgactattataatcttcatcgaatgtatctcctgcgttttatggtaattatatgctaccattataccccactttaatttttgttgcaagtaccaatagagggctcaaaccccttaatttatgcgaaaaatgggttttaattttcccaatataaaacctgccttgtcaattaacaaggcaggtagctttttatgaaatttatgtaattataccttttttattctgtcccaataggccttggccgcttgttcgattttattttctccgtatttgtaatatatatcaccctgaatttcaacagggagatagcgctgttctacccaatggtttgggtaatcatggggatacttgtatctttcctccgttgacaatcccctttgcgcagggttcgccttgtcttttaagtaatccggcacatctccgtaaccgcctgtttgcactctgtcaaaggcggcgtttattgccagctctccgctgttgctttttggggctgtggcaaggagaataaccccatcggcaaggggaattctcgcctccggcaagccggtttgcaaggcaatatcacagcaggcttttacgataggtatggcctgaggataggcaaggcctatatcttcacaggcaataataagcagtcggcgtattgcaggcaacatgccgtcggcatccaaaagtcttgccagataatgcagtgcagcgttttcgtcggagcctcttatggatttttgcaatgcggacaaaagattgtaatgtacatctccgccgttgtcaaatctgttgctgctgcgctgtgccacctgttttgccatatccccggttataaccggtatatctccgtagcttgcggcggaaataagcagctccaaagcgtttaacgcctttctcatatccccggaacagctgtgggatattatgtcctccgcctgtgggtcaagggatacttcgctgtgattttcccgattgtatttttttataaccctgtttatcccccgggctatatcctccggcgtaaggggcttaaactcaaatatggtactgcgtgacaatattgcgttaaacacggaaaaatacggattttccgttgtggaggcaatgagagtaaccgagccgtcctctataacctccaaaagtgattgctgctgttttttgtttagatattgtatttcgtctaagtacaataatattccgttttccgcacctatggtatcaatttgagatattatgtcctttatgtcgcctacggagctttgtgtgccgttgagcttaaacagttttttgttgctcattttggcaactattgtggcaacggtggtttttcccaccccggaggggccgtaaaatatcatattaggcagagtaccgctttccacagccatacgaaaaacgctgtttttgccaagcagatgtttttgcccccgcacatcctctaaactttggggtctgaatgtggccgccaaaggtttgctcatagtgtagcctctgttgtccaaaggccgatttgttttttgtcgtaatcattctgcaagaagtaggaaatagtatgtaaaattgctctgtcccagaaggtgtaatcgtgtacgccgtcccaagccatatacttaaattctcttaaatcaaggcctttcatatattcgcccaaggcctttgcctgatcgtggaggaagaaaagatcatcctgcttgcctgtcataagagcaatacgaggttgtttttccttaggcatctccgcaactttctttgcgagatagtacaaatcctgctcatctttaatatcacaatcttcgccgaaagccggaataaaactctttgtatccccttctaacaccggcatttttttaacggtttcagccatcattcttatgtcacaggcgcctgaaagacttgccacaccggcaaacatctccggctttgaaagaccgattctgaatgcgccgtatccgcccattgaaagtccggcaataaatgttttttctctcggaaaatcaatgttataaagagatttcaataactgtgggagctcctcggttatatatgtgtaatacggcaaaccgtatttcatatcgttgtaaaagctctgtggtgcgcttacatagaccatagccaaatcattatctgccgcatatctgttaaccgccgtatattctctgaaacgcttttcgcttgagcccaagccgtgaaggaagtatattaccccctgaggttcgataatgccccgatccggtttgtcgtttggcaaaaacagatccagcgctacctcctgccttaaaacatttgagtaaatagttgaattgatataagccatatttgcctcctttaaaaattgttatttgtgtgatattataagaaacaaatacgataaaaaggtgataaacagatatgaaaacaaaaaaacaggcagcggaaataacccggctactggaacaggcatacccgattgcccagtgcacccttgacacttcaaatgcatggcagctgcttgtaagcgtccgtcttgcggcacaatgcaccgatgcaagagtaaacatgataaccccaatactctttgcaaaatatcccacaataaacgcccttgcagacgccccgttagaggacataaccgaaatcgtaaaaccctgcggtctcggcaacagcaaggcaagagacattaagcggtgtatgaccatgctacgtgacaaatacaatggcattgtgccggacacaatggaggagcttttaaaattacccggtgtaggcagaaaaagtgccaaccttattttaggcgatatttacggccagcctgcggtggttgcggacactcattgcataagaatttccaaccgattgggatttatgaaaaagagcgacaaaaacagcaaagacccggttcatgtggaaatgcagttgagaaaagttttgcctatggacaagcggaacgacacctgccacagatttgtgcttcatggcagagaggtttgcactcggcgcagccctcactgcgaaaactgcattttaaattctgtttgcgactatcggaaaagccttgaaaaagccgctaaaggggaaaaataaattttaatccgcaaattttccaaaccgcccttaatcgggcggttattttaattgtttcttgaacatttttccgcatccatagccagcacaaaagccaaaacatcaatggcgtcatttatgtttttcacatcaatataatatgtatctgtccagttcaattcacggctgacagcggcaaccaattcaccgttatcggcatatatgccataatcccattcaaacaaatccccttgcacataccaacctttgtattctacaataaatttcggtttaaaaagggtcaattctttttttatacaacctaaatatgtatctcccacataaatttcaaacgccggcaaaaatgtaaatattctctgctttatataggcctgttcataacccatagcatcatatatgtgcatactgtggctaagggcaaaatcgctttttacggtgtatgccttttggccgttttcgtcgtaaatatcatagctgtccagcaaagaaaacatcttttgtttaagcaataatctcataataactctctccttttgtttttattatactctgccacagggcaaatggcaacggtaatcggatattgacaatttaccgccatggtgctattatatttgcgaacataaaaacaggggagctttctgctgagattagccttaccggcttaaaccctttacctgacacggataataccggcgtagggagttttacataaagtaatcctgtatgtgtgtttgcgttgcaagccgtgtacggggattttttgtttattctccttgttggtgtaatgtcaacaaggtttttgtttttatgctccgaatttattaagtgaccttaatacaaggtcgggaggaatttttatgcaacaaaacaaaacaaaaacattggtaacctgcggtatgcttatcgctttggcatctattctttcgatttttccgaaaattgacggcatttggccaaacggcggctcaattacattttgcagtatgttgcctataatcattatttcttatctttacggcttaaagtggggctttatgtcttcatttgcttttgcccttattcagctttttacagggattaaaggtattgccggtatggacgcacttaccacatttttggtaatacttatcgactacataatagcctttacaattttgggcataggcggtattttcagaggcaaatttaacaacccggcaaaagaacttgccgccggcagtgctttggcaatctttttaagatttgtttcacactttgtttccggctatttgctctattcaagctatgcggaatggttctttacgcaggaaggcttcgcccttggcaacaacatttttgcatcattgggtgacggcacagctttgtatgttttgtacagcgttatgtacaacggctcttacctgttgccggaacttattataacaaccattgttgcttatataatcggcaagcagaagttctttaaagatttgatgaaataatccatacgccattggaatttataagagaaatgcagggttcgccctgcattttttattttagcgaactgtggaataattttgaaaaatattgcgtgatgataaaagcgatgttataattatataaaatatatactattattttaatcaaataacttcattttgtagtaattatttgcaataggaggtaatgttatgaaacaaaacattttaatcaaagcggagcaacaaagtgacaacatttttttgacttttattttttgccttattgcattggtttcccttttgattgccatctatttgggagtcacaactgtgcattcatttaccggattttatagttggtgcgtattttatgtatcaagatatacaattatagagcccatgtacctgctgaaagaaccggaatttatagaactaataaattgcgacagagaagttgtggacaaaagagggcgtatataccggataattgaaacaatattatttttctctgttcttaaatttttccccggcgaaagtttacccggaaaaataatatacactgtaatattttttataatccacatggttttattgctttcctacctgaaattttttaacaaaatttgccccaaggaaatctatacaaaagttcaatcggataataacattatcatgtgcagagaagcagcggcactgaaagagataaaggaaggtctttattgcatgccgatgcttgccgccgcaatacttgtatccatattgacagaggataactattatttcattttaaatgttataaatatgtggacggtggcactcggcatttactccacagttgttatcccaaacagacttttaaaagaaaatctttttgtgcaaaaaatcggaacaaatgcggtaaatatgcgtaaaagaatgacgatacacttaatatcggaaacaatattacttttaacttcttttataattttcgcaaatatcaaagcgaaaattaaaattcggtatgctactgtatctttggcaacacaaaccattttacttttctctttcttaaaattttttgaaaaaacttgtcccgaagaaaaaagcgaaatcgggcaataaaatcaccttaaaaccgtaacccgataaagcaacggcggcaggcaaaaggcctgccgccgtttttaaacaaagctatacaaaaccgccgactttaaaacaaagccggcggaaattttattttaatcggtataaatcagtcctgtgcgccgattttcaaagcgtagcaagcgctgcacaaaacaggtctgtcctctctgggtttaaaaggcactcttgcctctttgccgcagttggcgcaagttgtaacatagtactctcttgctggctttgcctcgccgtttgatgtgcgtgcctttctccgtgcacggcattctttgcagcgtgtaggttcgttttcaaaaccctttgatgcgtaaaattcctgttcaccccgtgtgaatgtgaattcctttccgcagtctttgcagactaaaattttgtcctgatacattggtatgttctccttaaaaaatgtattttaccccggataggatttgaaacctaaaccctatcttcttataagcgtaccctacgcctattgcctaagttttttgtgaattcgttgaatagcattattgacggatttttcgcttttgtttacaatttttgcaatttcccgataggaatactgcatagtgtaaaggctgaacaccaaaaattcaaactcggacaatttctgccttgcgctttcaataaattctctgttttgctcccgagcgataaggtcgaattcaaaactttgcaaaagaatactttcgtccaatggcaaggcgttgttcaaaacccgatttttattcgagtatgcactttttcttgccgataacatattgtttaaaatacattttttagcataggtgggaaaagaagcgtttctgtcttcacgatagcctaaaatagccttaaataaacctatattaccttcctgaactgcgtcgtcaaaatcaaaaaattccgtgcgcagtttagcggcacaagacgccacagaccctttaaaccgtgcaaaaatatactcaatatccgccgaagagccttttttagctctttcaataacatcatttgtaatttcctgcatatagtctgtaccgtttcgtattattttacaatctatattatacacaagaaaaaatatactgtcaaacaatatttatgtaaattttgtaagaatattttctgtttttgttgcaataacagaaattttactttatacttataaagtaaaaagaaaatatcccttaacacatttgaaaggaacacttaatggaatacacacttatcgccccttgctatttcggcacagagagcgttttaaactatgaaataaaaaaaataggcggccgtgacatagatgtaagcgacggcagaattgtttttaaaggcgacgaaaacaccatagccgccgcaaatataaatttgcgcacagccgaaagagttttgattttgcttaaagaatttaaagccacggattttgaccggctttttgacggcgtattttcaatagattggaagagtattcttccccttgacgcagaatttcctgtaaagggttcatccctttcctccaccctttccagcgtgcctgcctgccaaaaaataatcaaaaaatccattgtggaaaaaatgagaaagcagtacagagaatcaattttgcccgaaaacggcgacctgtataaaataagattttcaatccgcaaggatattgtaagcatcatgctggacacatccggcgacggcttgcacaaaagaggctaccgcagaaacagcggtgaggcacctataaaagaaacccttgcggcggccattgtggacttggcaaggataagggatgacagccttgtacaggacccattttgcggctccggcacactgcttatagaggcagctcaaaaggctctgaacatcgcccccgggcttaaaaggcactttgccgccgagaagtacagctttatccccaaaagtgtttgggaagaagaaagacaaaagcggaaagacgccgttaaaaccgacgccgaatttacggcatacggttttgacattgacccccttgttttggaaaccgcaaaaaagaatgccgacaaagccggcgtaggcaagtatataaagtttttcagggcagatgtgaagaaatttgaacctcgggaaaattctaccgttataacaaaccctccttacggcgaacgccttggagatttgcaacaggcggtaacccttgaaaaagttttggctaaaagattggaacttaaccctgttaagtcctattatgtaatcacatccgacggagaatttgaaaacaacttcggcaaaaagcggaataagagaagaaaactttacaacggtatgataccgtgccagctttatatgtacttcggcgaaagaaaataaaataaatttgtccgctgcggcttaaatcggtataatccgatagtatcccggcggatatttttatgtcactaacttgttaccgacctgtcactatcaaacagaattttaagcacttttacagacttttgcagaagcggcaaaaaaagaaaacccttgaaaaacagccgttttccaagggtttttgaatttgtgtaatttcgccgagattatctctttgagaactgtggagcacgacgagcagctttcaagccgtacttctttctttccttcattcttgggtctcttgtcaagaaacctgcttttttaagctgaggacgaaggttttcgtcatactggagcaaagctcttgaaagaccgtgtctgatagcgccggcctgacctgaaacaccgccgcctgttacattaacaacgatgtcgaacttgtcctgtgtgcctgtaagtgtaaccggctgacgaacgataagcttcaatgtttcaagaccgaagtaatcgtcaatgtctctgccgttgattgtgattttgccgtcaccgctgtaaactctaactcttgcaacggaagatttacgacggcctgtgccgtaaaaatatgcttttgtttcgtacattattttatccctccgtaaaattaaagttcaactgtctcaggtttctgagcccggttgttgtgagcagcgcccttgtatgttctaagtcttgtcaaagccttgtcgccgagcttgttgtttggcaacatgcccttaacagccaattccatagccttgtctgactttgtagccatcaaagttttgtaattaacgctcttcaaaccgccgatccagcctgtgtggtggtggtagaatttctgttccaatttcttacctgtgagaacagctttgtcacagttgatgataacaacgtggtcgccgcagtcaacattaggtgtgtaagttactttgtttttacctctgagaaggttagcggcaacaacggcaacacggccaagcggtttgccggcagcgtcgataacataccatttgcgttctactgtctcaggttttaaaagtgtagtactcataatttcctcctgataaattttatctcaatattttacaaaattaaaggcactttcaaagtgcttaaacaatatatcatttatcccggcaaaagtcaatgatttttctcaaaaattttaatcaaattttgattatctcttgttttctcttgtttttatgcgtttttctcttgttttctcaattcgcaattttaaatggctgtaaaaacctcttgttttatcggtgcaaatgtcttatactttattataattaagttaaagcaatgtaaagaggtatgtttatgccacgatattttcaacgcctttgcggccttgttcgcaagggcataacacaatacaatatgatacaggacggagataagattgccataggtgtttccggcggcaaggacagcgttatgctcacacttgcccttgcgcaactgcgcaagtatatggatgttaaatttgacattgtagccgtaaccttggattgccaattttccggcaaggaaacggattattcggctcttgaaaaactttttgccgatcggggcgttgagtacatcataaagcgcacggatatcggcccgattatatttgatgtgcgcaaggaagaaaacccttgttccctctgcgctcgtatgcgccgtggggcattacatgacctgacaaaggagttgggctgtaataaaattgccttggggcatcatcttgacgatgcaatagagacattttatatgaacctttggaacgagggcagaataggtacattctcccctgtcacatatctttcaagaaaagatattacaatgttaaggccgatgtgccttgcctgggaaagtgatgtaataaatgcgatgcgagaaaccaaagcaccgattgttaaatcaacctgccctatggacggggttacaaacaggcaaaatatgaagaattttatatccgaaaggtgtaaaaccgacccttctttcagacaaaagagccttaatgccttccagaaaaaagatttggacggatggggcattaaaaacacaaaccggcgcaataaaggataaattatcatggaacttacagaaaagcactgctgggcagagatagacataaacgcccttaaacataactacaatttaataaaggacacattcgacaggcctttttacaccgttataaaggctgacgcttatggccacggtgcaaaatatgtggctaagctttacagcgagttaggttgtttcggcttttgtgtgtcatctttcggcgaggccatggaactgcgtaaaagcggcataacaaaaccgattttgattttgggatacacagagcctacaaaggctcacgagctttttaaaaacaatttgacccaaacggttttcagccttgaatacgccacaaaactaaatgacaacgcactgtatcctatcgactgccacataaagatagataccggtatgggcaggctgggttttgatatggtaaataacaaagagcaggccgttgcggatatgaagtctttaagaaacttacctaacctgcgctttacgggtttgtttacccattttgccgtggcagacagcgtagacgaagaaagccttatatacacccaaaggcggcttgatttgtacgccgaggcaaaaaccgcccttgaaaaccggggctttaacataaaatactttcacggacaaaattccgcaggaattgcaagaaaattagacgcaggttttaaccttatgcgtgcaggtatagttttgtacggtcggcaaccgtcagaccgggtaattttgcccgaaattaaacctgccatgaagttaaaaaccgttgtgacccatgttaaaaccataaaggacggcgcaaaagtaggttatggtataaaatatacagcccaaggggaaagaaaaattgccactgccgccgcaggatatgccgatggcataccgagacttttgactgcggtaggccataatgttgaaataaacggcaggctatatccgattataggcaatatatgtatggatcaatttatgattgacattaccggtgccgatgttaaagccggggacgaaataacgattttcggcggcgacggcgaaatatcttacacggaaacagccaaaaaaattatgaccattccccatgaacttatgtgtgccgttgcaaagcgtgtgccgaaagtttacacggataacggcaaaatcacatatattcggtacggaatataaacaaccggcaaatatcaaatatatttatataacaaaaagaagaaagttcaatcgaactttcttcttttttatttgagttatttaatcaatactgacctaaatccggcataaagtccggagctgtcggacagatgtaaccctccgggcagtccttgtggtattctgccttggctttctcaataatttcaggattttcaatgcacttcaaagcagtgagagccattactttggcggctgtaattacgcccttgtggcaatagcttgttgcgccttgacctgtcatctgccatgagtgacccggtgtaccgattacaactgtggcaacatgacactgagcagtaggtgcacagtagcttacatcccctacatccgttgagcccgggctgtggaagtcaggattatgtacatatggggcaatcgtatcgtcaatgtcaatcttttcgtagtgttcaacatcaacccctgtctttttgcttatgtcagccttggcatttgccatatcttcccgaggaattgtccgtgcataggccttggcaagtttcttttcatcttcggtgtattccggcaaaccgacttctttaaagctgtccgccattacctgtgacaaaaccttgtttggcacatagtccgcaaggccgtccatgtgaataatttccacggttgtgccggtaatcattgcggcaccttttgctatgttatcaactctttccaaaatttcaagagcctgttttaccttaggtgcacgaacaaaatagtatgtgcaagcatagctttgtacaacattcggtgccgttccgcctgcatcaagatatgaataatgcactcttgcttcagggattatgtgttcacggagatagtttacacccacattcataatttcacaggcgtcaagggcgcttctgccaaggtaaggcacagcagccgcatggctccgcacaccgtggaacttgtacttaacgcttatgcaggcaagggagcttacacctacaacttcgtttgccgtacccggatgccatgtgatacagatgtccatatcgttaaagtagccgtcacgagccatgaacaccttgccgctgccgttttcttccgcagggcaaccgaagaaataaatctgtgcgtcaacaccgttttcttcgcagtattttttaaggccgatagaagccgccaaagcaccggagcctaagctgttgtgtccgcagccgtgacccggatccccttcggtgtggccgtcgctggcctgcttaaccgcaacgccgcacttttgatttaaagcgtcaagggcgtcatattctgccaaaaagccgattttaggtccctttgtaccccatttgctgtaaaatgcggtaggtatgcctgcgatacccgccttgctttcaaagccgaatttttccgctactctcataagagccgcagcggacttggtttcctgaaaatagacctcggcatattcccatacttcgtcgtttacggcggatataatatcttctattccgtcaatggcgccgaataattttttgtaatctgacataattacctcccggcatatagcctgtaatttttgaaacggcattttacgccgttttataaatatctttgattgttacaagtatatacctcttttacctatatatcaagtgtaattatgtataattataaatcttatttcttttctttcattgctcttttgcacatatatttgtactttgtggcaagaccgccccttaaatgtcgctcgcttttgtttttatccagtactttttgcacccgggcatacagttcggcgttttcgcttttcaatctcacagttaaatctttgtgagccgtgcttttcgatatgccgaaaatctttgccgcctgccttaccgttgccccggtttccgccacatatctgcccacagcctgccgccttgctacccctaaatcaataaacagattatccataactcacccacatcaccttcggcttgtgccttttttaaatagatatgagcttgtcgcaggctttattacataaaaaatacacccggtttaaaaccgggtgtaagatttatcatccgtaaacatacacatttaccgttattctgccgttaagcaggctttcggtgtatgtttcgtagaaaagatcaatgttatttggattttccataaggcttgaaccggtgtccgtggctattgcccagccgtagacaaacttcccgtcggggctggcaatatacatttttgtgccgtaaggtataagatttggatttacggcaactgtgccgcagtaaagccccagtcttgatgcacctttgccggattttgccgtatatcccgttgcggacatggtgtacattcttgaatatccccccggaacaccccggctgccgctttcgccgttagggccggttaaatccgacaccggcgcaccggcaccgtaaacaagcacctctgcattcgttggtttttcaagaacctcaaccttgctgataagggcgtactcctgctctccgtcaacatatctttcacgatatgtcacaagatttgtgccgtttttgccatcctgcatgatgtagcttttattttttctcctatataacaaactgcttttgcgataaaccgtttcgtatggtatagtttcttcataagatgtatcacggtattccacacggtaaactcttatggagtctccttcctttacaatccggttgaggcttggatcggtaaaatcgtgttcccccaaagtgacccctgctgccgcaaggcaatcttccactgtgccctcaacaattcttgcttctacggtttctccgtctgccgtaataggcacggtaaaacttcgtctgaccgtaatatccctaaaattgtccgccatatcggtggcgtataccttgtcgccctcctctacactgacatttgcaagccgcaataacttatcacggtcgtcaaatgtggtaaggataacccggctttcgccgtctgccgatactcgaacgatatttacgaggaagaacaaagcagtcgcagaagctgttaaaagtgcaaaatatccgagagagaacaaaattctcatctttgcgcctttcagccgctgccaaaagttctgtttttcttttcgcatataatctcctttttattaaatgtatgcccgcattttgatttccctataacaggattttggtcaaaatcggttctcggtaaacaaaaattccgcctgccccttggggcaaaatactttattttccaaaacggaatcgtaatattataacatttaatttttttcatgtcaaaaaaatcggcgattttgtaacagaaaacaaggatattccctaattttttgcaatatttttatattcggctttctgtcttacaccatatcggcggaacaaatttgcaccggaatatgtaaaattcggcgataaattttcggtggatttcacccggtttttcaatctttttcgttgacaaatcggtctgtctttgttagaataatagcatttaaaagggagtagctgacaccgcaaggcgtacgcagactgcgtcatcccggtggcgacacccgcactgcgtttaaaaagcaagacttttactgcaaaggctgtaagcgtcttgcttatttttatgctaaattcagagaggttaaatatgaaaactattgttatcacactgtttattttaacttatgtcataatgcttaccctgccgaaataccgccaatatgcggcggccgccgtagcggttgtaatggtaattttaggggttgtcaccccattggaagccgtaaacgccattgactggaatgtaattatgatgcttgccggcacaatgggcaccgtttatttgtgtatagaatcaaaaatgcctgccatggtgcgggatatgctggtaaacaaacttaaaagcgtaaaattgatttttgttgcattggctttgttttcgggtttagtttccgcctttatagacaatgttgccactgtgcttatggtggcgccgatcgccttggcaatagccaaaaaatttaatgtttcccctgtaaatacggtgcttaccgtggcggtttcatcaaatctgcaaggtgccgccacattggtgggggatacgaccagtattttgcttgccggttatgcaggtatggactttatggacttttttgttaccgacggtaagccgggtatgttttgggttgtgcaggccggcgcagttgcaacaatacctattttgttttggattttccgaaatgagaaaaaccgtattgaaaccaccgagataacaaaagtaaccgactttatgccaacctacgcactgctggcaacggttatttgccttgtgattgcatcatttataccgaataaaccggctttgacaaacggattgatatgtgtatttttctttattgccgttttgagatatgaagtaggcaaagacgaacctgttgccacaggccatgacgctgttttagctattgattttgatacacttttacttttatcaggtttgtttgtgattattcaggctgttacaaatgtaggtttaatagacgatataagcaatgcctttgttaacatagcaggcgataatctatttaagatatacacgattttggtttggttctctgtgttggtttctgcgttcattgacaacattccctatgttgccacaatgctgccggttgtaagcggaatttccgcccagctgggtcttgaacctacgttgctttacttcggccttttggcaggagctacccttgggggcaacataaccccggtaggcgccagcgcaaacatagccgcagggggcatattgaaaaaagagggttatgaaatttccgccggtcaatttatgcgcatcggcgtgccatttacccttgttgcggttgttgcaggctatgtgcttatttggttgatttacgcataaaataattaaacatataattttcgggagttatgtaaaaataactcccgaatttttgtgtactattttttcaaatgttaatataaatttcacacattttgttgcgtatatgttatcatataattacaaaagcaatagtttcatttttcacttacggtaaatgcctatgaagaaaagaattatactgttatttacattattattatttttatttaccgctttgactgtgtttgccacaaacacaaaaagcgatgccacattaactatgaatttacggtacggcaacggtgatacggcggttgttccccttgttttagaagaaaattcttcggataaacaaagttccggtgttgtcgccaaaacctatgtgggatttattcccggcagtataggtcaaagcagtatatgcaaaaacggccccgacgataccggttttgcagaggttattttaactgtaaattacacagatgacaaaacccagtacccgtataaatacaaaattaaatcggtagaggggtcatacagaataataaatgacactgtcacggatttttctgcggatttacgcattttcagccggggctggcttggagatgagggtgttttatctgcccgggataaaacgataaaaagcatacccattgaatttgaagaaaccgtggaatttacggattttatgtcccaagaccttttattttcacaaactatgggtgccgaaatatcttttgaattcaccgtaaataaccagccggttaaaggaggttttaatgtatgtatatgagcgacaaaagggataaaataaaatttggtctgttctgcttaacgaccgcaataagcattatcactcttattatttatattgtatatataagcaaagttccgccctacacatcggattatgacagtttttacttttcggtgctgtcctgttacagcctgtggcctttgggtacattttgcgccgcttatgcggttacatacctgttaaagcccaccgttggctttgggggcaaaaatattttgctgattttgtcattaggtatttttgttgcatacgcaatatgcgtaatattgtttattataagcaattttacctctatgcgaacatttgcaaacgatataatgggcaactactttatacgcacccacctgcaatttaatgccaaaacatacgcaatgtttttgggatttataaccggcttggttgcgaattctaaataataaagggtataacatattatgattaaaaaaattataaactgccttttgtgtgctttggttttgacaagcttgacttcttgttctttaaaaagctcaaaaacggctacaaacacaactgatttaaggcctttaaaagtagaaattgacggaggctgcggagcaggcggcgaatacggatattacgaactccgtgccccgttgagccttcctaatggtttcaacatcttttatattgactacgccacaaaaacacagcttgttctgtgttcctcctcatcctgccagcacaacaccgaaagctgtacaggctattttgacggctacggcaaggatatttatgtaataggcgaaaagattgttttgttggtttacacttataccgccgacggacaaatgcttttaaatgttgtcactgcggacttaaacggcgaaaaccgcaaaaccatatacacattcaacgccaatgaaaccataaattcttcttgttataccgacggtgaaagcatctattttgtcgccaacagagcttttaaaaacggtgacgctattgattatcagtgtgttttagtgaagataaatatatatacggatgttgcaacggatattttgaatttaagtgaaaaatacggaacaaactctgtaaacctgttcggcgtttgcaaagatgaatttgttttgtctgtaaacaccgataaaacccaattaaaatccgtaaccacagacggaaatgactgtaaatatgtaaacgatactttgaattatagcgactccgacaaacattttgacggcgaatatgagtatataatttcatataccgacaaaaaatttgtcagaaaaaacttgatctccggggagaccataactcttgatatgcccggcgatgtatccttcactgctgaaaattccggcatttcgcaaattgttgacggaactgccatttgttcctaccgtgaatacaaggtaaccggcaattcggaaacaagaaccgaaagaacatttgcggcagattttgaagaaaacagagtatatgagttaccgttgcaatgccaaagaaacggcataacaaaaccagttccggttgttgcagaaacagaaaatcaatttttagttatcaacggcgaaaacagggttttagaatattatccgccaaacgacaaaggcttgataagcgattattctacaattctcaattacgccctaatagacaaatcagacttttggcagggtgtgccaaattatgaaaatatagactatatcgggtgaaatttaaaggagaaacactatgtctttaatattttacgcaggtaaaaccccatcaaccaaaaaggagttatataaacttgcttggattgcgcttatatattcccttgttttcaacgctcttgtggttgccaaccggatcggcggtactttcggcataattaagccatttttgggggtaaaaatttctgttttgtcaataaccttccaattttcagctcttataattccgttgacaatcgtggctattatctgtttaattgtg

SEQ ID NO: 673 - DNA, 10043 bp, Unknown
  16S sequences of unknown bacteria
acgcaccggacaaatgttggaaaccgtcaacgcttaaaaatatatgcaaaagccagtgaaagcgaaatcgctttcactggcttttgccttttatcaaaataaactcattctatttctgtgcggcaacaaatactttaaaagatcattccacactgataataaaatagtaaaccggttggccgccatccaaaacggtcaattccacgtcttccggcaggcgctgacgaattgcatcttctgcctgcgctgccatttcgggagttacatcctccccataatacaccgttacaaaggaactgtcgcgagagatcatttgtttgaccaacttggaacaagtccgggacaaatctgtatcggtaaaggccagttttccattatccaatgccagtaattccccttcgtgaatcgcgtggccatcataatccgaatcacgggcagcaaaagtgaccgatccggtcgaaactgtctccagtgcgttggacatattcacctgattttgttccaagtccgcgtccggatcaaacgccaacatcgcggcaatgccctgaggaacggtacgcgaaggcagtacgcaaaccttacggtcagccagtttaatagcctgttctgctgccatgatgatatttttattattaggtaaaacaaaaacagtctgtgccggagttgcatggattgccttgaggatatcctcggtggatgggttcatcgtctgccctccgctgaccacctggccggctcccagatcatgaaacaagccctgcagcccctcgcccgctgccacagccacaatgccataggggacttccggatctaccggtacataagccattggctcttcttttggattttcctttgcggcctgggatttccgagcagcaaattgctcctccatattttcaattttcattttataaagcatcccgtaccgaatcgcttcttccagcgcctgaccgggattattggtatgcacatggcacttaataatatcctcatcatccactactacaacgctgtccccgatggattccagataagcgcgcagtttcaaagaatcagcatccgcttcttttttctgtacgatgaattccgtacagtaggtaaaagtaatatccgcatcgtaccgggcgatggcgtcctgaaactcatctgtttctgtttttccatcgtcttgcggctgggtgtcttccatcataaccccgtcacgcaaaacactgatcattccttcaaatacaagcagaaggccttttccgccggcatcaaccacgcccgcctttttgaggacaggaagcatttccggcgtctgttccaaagcgtttcccgcttctttgacaatctcctcccaaacagcaataggatctgtattggttttggctatcaccctcgcccgttccgccgccatgcgggaaacggtcagaatcgttccttccgttggcttcattacagctttgtaggcggcctctacccccattgtcaaagcctgtgcaaaatcggcaccgtccgcttcttttttacccgccaaacctttggaaaatccgcggaacagcaaggataaaataacacccgaatttccgcgggcgccccgtaacaaagcggaagctgctgtttttgccaccgccgctacggtaggattctccatcagtttcaattcaggaaccgctgcactgatggtcatagacatattggtacccgtatcgccatccggcactgggaaaacattcagcgcgtccacttcctgtcggcgggccacaatatgattagccgctgagatatatgcatcgcgcagttgactaccgtttatcactttcttataacctcccgtaatcgctgtctgaaaagcgcagcttcaaggactcccccaaaacgggaagctattccgcccgcataccgtccacatacacgttgaccttcgccacctccataccggtagcgtcctccactgtgtaacgaaccttgtggataatgctttgcacaatggcggaaatatttacgccataagtcaccacaatgtgaagatccagcacaagccgccctcctgtgatgtgcactttaacccctttatccggcacgtcgcctttgccgatcatggtacgaaatccctgataaggggtcgtgctgacaagacccgcaacgccaaagcattctgatgccgcgcgtccaaccagattggcgaagtactcttccgaaatatgagtggctcctaaatgattctccagtttaatcacgcaagtccctcctaactgatgctgccggcaccgctaaccgcaccggctgtttgtatctggtgccccgcgctgggggcgaaatctttatttttacgctaccaatcctgaatgttgtaaaacacatcctggacagtcgcgctcaaatcataataaatttcccggttgtaatagatcgcgccattacgggttccaaccggaatcaacggcaccgacgtctgaaacagctccaaaaagctttgaagcgttgccgtgccttggcgccattgacgataagcctccagcacccgcaaattctcctcagctgtttgctgggtcaataccgtaaaaagcgcggtcagatccaaattatttttaagctttacctcgccaatatacaagtcatactgccgctctgttactctggtttggtattcagcaaacggaactccggttactgtcacatccagccctactgaccgcagcatttcccgcagagtttcggcaatctgcattttggcctcgttttcattgttaaccaaaatatctaccgatactctccgaatacccattataatgtacccctcatcgtctcggttgtcaagaccgagctgggccaacaaagactgtacctgctcaaaatcctgatcggattccaccgtcaaaggtgccaactgctcccaggaagcaggaaacggcaccgctgtttcttgtgccctgtcgtaataagctgtctccaataggccatcacggtctgtagccgctgcaagcatctgcctaaatcgcacatcggaaagcagggtacgactgtcattgatgccaatataaatcagattcggcatcgatacataatggatgctgccgccggtttcggcaatggtttcatccccatccacaaaaagatagtccaaagacccagttttcatgctgtaaaagctggtttcccgatccggttgttctaccaactggatcgctttgatttttcctgtatcccctccataccaatgaggattgggttccaacagattttcccccgccaaatggtatcgtccgctccccactggatttgatgctgatccgtttttgataatcgggaagataagcagattcgggaacagcacatcagcctctgccagtgtaaaacggatttgatcatccgacaaaatactgactcctgtcacattggaaagctgcgcggcatatgccgtttctccgctgattgcctgacggtaggaatactggatatctaccgcagtcaaagctgtcccatcggaaaacagcacatctttgcgcagtgtaaccacacaggacgtgccctgcatttccacagacgaggcgatgcacaaatcatatccgtaataaagattcaactttgtcagggaatcatacaaaagcggcacaatccgaaggctggtgtcagtggtcatctgataagggttcagcgtactttccccaactgcgacctgaagttcactcacgtcctgataggcatattctgaagtctgcgcagtgttttgtgtttgcaccgtcatccaaagatcatccgacatcatattttcgaatgaacagcctcccattaaaagagagagcgccgttatgcataaaatccaaatttttttcattttgccaccctttgccggtcatcttccgcagatatccctgcgtacacgtccttcgtacagtaagcgagccataccgccgcctgcctgatcttccgggcattgctataacaacctttgttgtccgtccttgaaaagtatctgccatttcctgcagccacacagcctccaatcctgctgtgtcttgtaacaggaatagtataccacacagaactgcccgtaggtatgaacatttttttaatcctggtttatcagttaccggacaataaaaaacggcgggaacgcccgccgcctgtccaacttttatttgcgttcgacgatcagccgaattgccgtcctctcttcatcattgatgacgatatttccaaaggttgggacacaaaccagatccattcccgccggtgccaaataccctctggcgattgcgattgccttaaccgcctgattggtagcgcctgctccgaccgcctgcacctctacggaaccggactcccgtatcacgccggcaatcgcaccggccaccgaatttgggaccgattttgcggaaacctttaatacttccatgttgaaacctcctgatgggtttggcgattagtctgcgactattttataacaatatagaaaaaaaatcaagccaaatagacaagttatgcctctttggatgaaacaacgaaaatccgctggatcgatgtcgtttttcccgttgccaaatcgatatccgccacaattccgctcaaagagcaaggcccagaggcgttttcaaagcgggttggcaaatgggtacgcatccgccgaatcgccaattccggcgtcacgcccaacaccgaatgagacggaccgcacataccgatatccgtaatgtatcccgtgccgccaggcagaatcttttcatctgccgtctgaacatgggtatgggtaccaaataccagcgatacttttccatctaaaaagtaccccattcccagtttctcgctggtagcctcggcgtgaaaatccacaagaataatatccgcctttatctgagagagaaggcgctccatacatccaaacggattttcataagtttcgagaaaaacgtctccctgtagattgacaacgccaatttgataggatagcgcgtcgtacaaatacacgcctgcaccatgtgcatccggatgatagttggccggacgaatcaggccgatctgttcatccatcatctcattgatctcccgtcggcgcagtccatggttgccagtggtaatgacatctgcgccgcagtcaaaaatctgtttggcggaaaagggaagaataccattgccctctgcagaattttcaccgttgaccaatataaagtccggccggtactgttctttcagctgtggcatcttctgccgcaaaaagtcgcagccagcctgtccaaccacatctcctaccgctaaaacccgcatcttcacacctctttccaccgccacgatttatccggacagggaaagagcctgccttaggcaggctcccaaacacctcatccggcaattattttgcgtattcgatggcacggctctcccgcaccacatgaactttcacctgaccgggataatccaattccgattcaatctttttagcaatctcccgggcgaccagaacagtctgatcgtctttgaccacttccggttttaccagaatacgaatttcacgcccagcctggattgcataacatttttctacgccgtcaaaggaattagcgatttcctccagcttttgcagccttttgatgtaattttccacattttcacgacgtgcaccggggcgcgctgcagaaatagcatctgccgcctgcaccaagcaagctataatcgtccggggctccacatcgccatgatgtgcctcaatggcgtgcaaaatattctgattttctttgtattttctcgctacatcaacgccgatattgacatgagatccttcaatctcatgagtcagcgcttttccaatatcatgtaacaagcctgcccgtttggctccatttacatccgcacccagctctgccgccatcatgccggcaatatgggccacctccagcgaatgatccagtacgttctgaccatagctggtgcggtaacgcaagcgtcccaacagtttgaccaattccggatggatcgaatggattccggtttccaacacggcacgttcgccatcctgtttgattttggcttccacttcttttcgggctttctccaccgtttcctcaatgcgtgcaggatggatacggccatcctgaatcaggcgttccagggagatacgggcgatttcccgtcggaccgggtcataagaagacaaagtaatggcctcaggtgtatcatcaataatcaaatccacccctgtcatggtctcgagagtacggatattgcgaccctcccggccaataatacggcctttcatttcatcattgggcaacggtactaccgatacggtagcctccgccacgtgatcagcggcacagcgctggatagcggtcgagataatctctctcgcctttgcgtctgactcttccttggtctgctgctcaaactgcgagaccatcaacgctttttcatgggtcaattcttcttccagatttcttaacagatattccttcgcttgatcaatagtcagaccggaaatccgttccaacatctcaaactgccgctttttgatttcctccgcttcggctaattttccttccgcctctttaattttgttttgcagggtttcatcctttttttccagattttccagtttgcggtctaaagactcttctttttgaaccagcctgcgttcttgacgcgttacttcggaacgacgttcctttacgtccttttccgcttccgtacgcattttatagatctcatccttggcttccaccagcgcttcttttttgcggctttcagcggatttaatggcgtcgctcaaaatgcgcttcgcttcctcttccgcagaacccagctctgcctccgccactttacgccggtactgcacgcccacaaaaaaacacagaacgccgccgacgagaaaagcaatcacacccgtaataatacaggcaattatcgttgattgatccattacagctgcttcaacctccttcttttgcaaattttgtaatagcaatatcgaaatgaatgacactttcaatatggttgcatatcattcatattttaaagcctgaccgtgttcctgtcaagaaaattatagaataaactgcaaaatccgcccttttatctagcaaaaatccgtgcgtttttcccaatactttttgttgacaaggccgctttggggtgatatagtaactgtatcaatacgatgaacacgttgaaagagaagccgtgaaccggtgcttccccagagaggctgccccctagtgctgaaaggctgccgttgcaaggttctgacggtaccgcctcttgagtgcgggcaaaacccgccgcgtcaggtgcgttaacccctcgtccaaaagagtggcggattttccgcaagcagggtggaaccgtggagcagactaatcatcgcttcacccctatcaaaacataggggtgaagcttttttgttgcctattttaactaggcagcaaataactgccgaaacgtttaatcgcaaagcgaatgagaaaggatgaaaaatatgattcatattacgttaaaagacggcgttgtcaaagattttgaagcgcctgttactccaatgcaaattgcaaaatccattggagagggattattcaaagctgtttgcgtcgctaaaatagacggcgttgtccgcgatctgcgcaccccgattgagcaggacgcacaggtggaattgctgacctttgatgaggatgagggaaagcgtgcattttggcacaccgcttctcacgtgatggcacaggcagttttgcacctgttccccaacgtcaaatgtgccatcggtcctgcaatcaaggacggtttctactacgattttgatgtagaaaagcccttcactcccgaggatttggagaaaattgaggcagaaatgaaaaaaatcgtcaagcagggtattccgctagagcggtttgaactacctgctgaccaggcgctgaaattgatgaaagacgatccgtataaagtcgagcttatccaggaacattccggcaagggcgagacaatcagcttttttaaacagggcgatttcaccgacttatgcgctggccctcacctgcctgacacctcacgcatcaaagcgtttaagctgacctctaccactggcgcttactggaggggtgactcaagcaaacagatgctttgccgggtttacggcaccgcattccccaaagcttccatgctggaagcgcatctgtctgccattgaagaagcaaaacgccgcgaccatcgcaaactgggtaaagaactcggtctcttcaccattctggacgaaggtcccggctttcctttcttcctgccaaagggtatgatccttaaaaatacattgatcgactactggcgtgaaatccataccaaggccggctacaaagaaatctctactcccattatgctcaatcaggatctatggcaccgcagtggccactgggatcactataaagataatatgtataccacagttatcgatgaaacagattttgccttgaagccaatgaactgccccggcggcatgctggtctataaaaccgagccccattcttaccgggatctgccgctgcgcatgggcgagttgggtctggtacaccggcatgagctgtccggtgcgctgcatggtctgatgcgggtacgctgctttacgcaggacgatgcccacatctttatgaccaaagagcagattaaagatgagattgttggtgtagcaaaactgatcgatgacgtttattccatgtttggcttcaaataccatgtggaattgtccaccatgccggaagatcatatcggcagcgacgaagattgggaaatcgccaccaacgggctcattgctgctttgcaggagctgggcaaaaaatatgtggttaatgaaggtgatggtgctttctacggtccaaaaatcgacttccatctggaagactgcatcggccgtacctggcagtgcggcaccatccagctggatatgcagatgccagagcggttcgagttggagtacactggtgcagatggtgaaaaacatcgtcctgtcatgatccatcgcgtcgtgttcggcagtatcgaacggtttatcggcattttgaccgagcactttgccggcgcatttcctgtttggctcagcccagtgcaggccattgtcctaccgattaccgaccggcaacatgaagccgcagccaaaatcaaagatcagctggcagcggcaggtattcgcgtagagctggatggccgtagtgagaagattggttataaaatccgtgaagcacagcttcagaaaattccttacatgctggttgttggcgataaggagttagaaaacggcaccgtttcggttcgcagccgcaaaggagtagatttaggtaccatgcctttggatgcatttatggccagaataaaagagcaaatttcctgccggaccaatgactaaaaggatctccttgtttggaaaccaaagagccccgtacagaccaaaggcctgtacggggctctcgtgctgaagcgggtaatttgccagtaggtgatactatctcaatcgtctttcctgatatttcgttcgctttactcccaaatcacttttcccggtacgatgtttctttcctgcattcatcagctgaaacgctattgttttgcgggccatacctcatgcccttcataatacagtgggtatctcagatttggacgatcatccatgctggttgttgcaagaggctgtaatctgtacgggcctcttgtgtcaaacttttcgtctttgtatttgtaatatttgaggatattatcatctggcggaagttcgatttttcctactgtcgaaatattctttgcaaagcacagcacatactcatgcaagtgaacgacgtaattgctcttagctccaccaccgtagttgttttgcctaacgaatgtatctatccggttagcagagccaaagatttcatccatgacgagttccagataacgatgctcaatctcatcaatgctgatgaaaataacaccatcatccgccaacagcttttgcagcagcttcaaccgcgggtacatcatgaaggacaagcgcgtctccgaagctatatgctgtgaaagggggataagaaatcgcccatagaaaggagagt

SEQ ID NO: 674 - DNA, 8462 bp, Unknown
  16S sequences of unknown bacteria
gaagattttctgcaaaagctggagcaacagctttgaacacccatgcacgctttatgtcaaggacggggtgggaacggtccgtctgcgctcggtttcgctgtcggccaagtcccgcctgagcggaaacctcatcagcggcacggttaaaaacatacgatatttcgattcggggcgatttgtcagcgccgagtcaaacggagggattttttcctttcccgccgacgcgctgcagtttgtgggcgtgggctcgggcgtgggacaaattctccacggcagtctctgccttcaaatggaatgctctgccgggcccatccacatgcccgcctccgaggcaattttcacaattctcatataaaaagatgcaatcaaaaaagttgttgcagtaccgcaacacccgcaaaacgacgttttttcaagggattttgaccttttccttttgaaaaaacgtcttttttgttgcacccgtgcaaccaaaagacatcttcacaaccgaaaaagcgatgatataataaagccataagttagcttgtgctaactaagaatttaattccctttagggaagagatcaggaggaagaaatgacagtaacaaaatcgaaactcgtcaaacgcgttctttcggtcgcccttgcggccgctttgctgctgacttcggggcttgcaagtgcatttgccgcaggcgaagtcaccagagaagcagtctatgtgggcgtacccaccgatgttgccgacggcgtatattatgccgacatcaacatgaaaaacgcaagcaaccccaagaattattctatgggtaacgccgccctcagaggcagcgaaagctacaaagcaaaacagaccgaggacaccgagtaccgtcccatcgtgattgtggagaacggcaaggccacggctctgcttgaattcatgcccatgggctatctcggaatgtacggcttcatgatggagcttgagggaatatatcccggcagcttctcccagtacggaatgcccaacaccaacgacgcaaaaaccgtgttttatcccaccgggactctcacctatcagaaaacggttgacggcgaaatagtctacgacggatataacaatcccgattcgcagtataaattcgacggcaacaagctccgtcccgcaggcttcggcaaggaagagagctatctcaacattgtggatcagccttattcccaccttttgtcccttgacgtgacccccgtcatggtaaaggacgaggacgaacccgttcccaccaaggccgaggattacaccttcgagcaggccgccttctgccacgtttttgtgcctgtcatgtttgacatttcggcttcttcgggtgaccagtatgcccgcatggaggtcaattggaaaactctcgagaaaatcgacaatcccaacgaaaacgtcgagtatatgtactataaggcaaccaacacctccaccgacggctacaccgccgcaagcgtttcggcctttgagtcggccaagaccgaggttcacgacgccctcgaaaacgtttgggcaaagcgtattctcgatttgaacggaacgggattcaccgcacagccggtgcttgaccttaaaaaatattccgacgacgagaaaaaggaaatggccaaaaagctcgacgacgccataaagggacttaccaccgtcgacacaaacgagctttgcgagcttatcgaaagcataaccgaaatcgactccaccctctacaccgccgaaagctataaaaagctcaccgaggctcttgacgccgccgaggccgtgcttgcaaacgcgaacgcaacacagcaggacgttgacaatgcggtaaacgcaatcaagaacgccgtaaacggacttgaaaaggtcggaaccgaggaaggctgggacggcgtcaccgtcaagcagcccgaggttctcggaacaagcgtggacataagctcggccgaagagcttgcctggcttgcacagcaggtaaattcgggcgagaaattcgacagcgtattccttaaaaacgacatcgaccttaacggcaaggcctggaccgccatcggcacctcctcaaaccccttcaccggagcattttacggaaacggccacacggtctccaatcttgttgtcaagggaaccgacaactatcagggacttttcggttacataaagggaagcgacgaccaaaaggcttcggttaagagccttacggttcagggtgtcatccgcacaaccgccacaaacgtcggcggcgtaatcggaggcgctctttacaccaacatcgaaaacattcattcaaacgtcggcattacaattgaccgcgtaaacaacaacgactatgtcgcggcggcaggcggcgttgcgggagaagccatctactccgacatcaacagctgcacaaacatcgccgacataaccgcaacgcttcaggaaaaggtaggcggcatcgcaggctatgcctcgggctgctacatccgcaacagcagcaacaccggaaacatcaacgcaggcggctccgccggcggaatcgtgggcaactattttgtacgctccggctccaagggtgttatcagctgctttaacaaaggtaccgtttacggaaacggctcggccatcggcggaattatcggaaccgcaacctccaccggcaccgacgttcagggcgtttacggcaatctctacaaccgcggagacgtcaccgctcagcacaccgtcggcggaattatcggaagctactcgggcggagatctttccatgctcaccgcatcctactccaccggcaaaatcaccggaacgataacttcaatcgagagctccggcggtcttgtgggtaaaatgtacagcggtatgatcttctacagctatgctctcgaaggcaccgccgacgagctttgcactctcggcataagctccgcttcaagacttgtaagccccagcgcattccacgacgagcagtggttcaaatccgacgatttcttcaccgctctcggctcggccgcctcttcctacggtaaggaccccgaaaacatcaacgacggctatcccgttctcgcctttgagcttgaggaaattctcaacggcaaaaaggccgacgccgtcgccgagctcattgcctataaaaacgccgacgactacaagggtcttgccaaaaaggccgttgaacaggctttgtccgacggagtagcggccattaccgccgccgaggacgaagatgccgtcaaagaggctctcgcaaatgcaaagaccgcccttgacgccattccaaacgaccccaactacggactttcccttgacgttataaaggaaaagcttgcaaaagccaaagagcttgaagccgcgggcggagacctttacaccaccgaaagctggaacagctttaccgccaccatagcaggtatcgactatctgctggagaacggctttgaaacccaggaaaaggttgagctttacataggataccttgacaccaacaccgcggggctgacctacatcgacgccgactataccgcagttgacgaggccattgcctccattcccgccgatctttccatttacaccgaggagtcggtagcggcgcttaacgccgcaaaggacgccgttgtccgcggtaagaacatcaccgaacaggccgaggtcgacgccatggccaaagccattaacgacgccgttgccgcccttgttcagctcctcgccgactacgccaaagttgacgaagccatcgcctccattcccaccgatctttcggtttacaccgagcagtcggtagcggcgcttaacgccgcaaaggacgccgttgtccgcggcaagaccgtcaccgaacaggccgaagtcgacgccatggccaaagccattaacgatgcagtcgccgctcttgtttatcttgacgccgactacaccgaggttgacaaggctctcgcctccattcccgccgatctttcgggttataccgagcagtcggtggcggcgcttaacgccgcaaaggacgccgttgtccgcggcaagaacatcaccgaacaggccgaggtcgacgccatggcaaaggctgttaacgacgccgttgccgctcttgagaaaatcgacgattcaaagcttgattttgccaagcttcccgacggtgtttattcaatcgagttcaccatggtaaaaatgaaccgcatcgatctctccatgtccaacgacgcggtaaatcacaccgcaaagctcaccgtcaaggacggaaactacaccctcaccgttaacttcaagggacttcattacctcaaccgtttcggctatcttgccaagctctcctactatgaagacggttacaccttcggcaaatacggcaccgttgaaggcgtgctcaaggccgccgaggtcatcaccgttcagaaaaatgccgacggaaccgatgtcaccgatgaatttaacgttcccggaggaagtgccgaaggagttaaatatcccgaaaccgtttccttccccgttgtttcggccgcaaaggcagacagcgacggatttattccccttcacgtctttgtccccgtaatggaggacatcgcggcaggcaacggagaccaggatgttctcatgaagcttgaccgctccaccctcaaaaagaccgatgacaaggatccctcctttaagccggacgatcccgaagagctctcccccgccgtcgactataccgacccgtcaaccggagtcagagtcaccaccgaaaagggcgttcttcccgagggagttaaggtgagtgtaaccaaaatcacctcgggcgatttcttcgacaaggctgtttcggctttggaaggcatcggcaaattcaagctctacaaaatcagctttaccgacaaggacggcaacgaagtcgttcccaccggcaccgtaaccgtcacttatccctctgcggacagttcctcggacaacctctcgctttacagaataaacgacgacggcagcaagacccttgttaagggcactctgtcaaaggacggttataccgccgtgaccaaaaccgccggagtttacgccctcgcagagacagcggcaagctccgataccgaaacccccgatgacggttcctccgttgtaaacggcggttcctctgcggacgactcctcagcaaacggttcttccgacgcagactcccccgtctcgggcaactcagttcccaaaacgggagacagcggcatgagcgttctgctcgttctcgccctgcttctttcggcttgcgctttggtttactgccttaaaagccgtaaatcccaaaaaggagaataataaatgaaaattaccgcagcaaaagcttttcgggcgctgtgcggtatgatggtaatgctcgtccttgcggcgggcattacttctctgccggtgttagcagcatctaacggaatatacatcgcaacggcctctccccactataagcatcccgtgaccggaaaggtggaggattcgggcggagagggctcggccgtgctcggccagtccatgaccgacagcgccacctataacaaggctctcgtggaggtcgacccaagcggcaacacctttataaccgtccgcttaaagcttatggacaatattcaggacccgaaatttcaggttgacggcaaggcggtttcctccgagcttatgcaggaggactacaccgcaaataccgccgattttcgcatgaaagtcaacagcgaaaactcgattatccgctgtaatatgtacgtcatccccatggggcgcgaggttatattcttcataaccgtttccgatcttcacgcaggctccgaggactttatatccaaggtcaaggtaaatgccagaacaacctcctccgggaataagaccgactctccctccggcgcaaacgctaagacccccaccgaaagcagcgcgacagcagaaagcgctcccgccgacacggccgaggcggtttcaaatgtcgaaagctccgtgtccgccgaaaactcctttgcagaaagcctttcggacgaagtttcggccgcggggcttgaggaattcgacgcgtcgggcaaccttttgcagagcgacgccgaagccccgaaacaaaacgcaaaaaaaagctcggcaatttggtgggtgctcggcggcgctgcccttttggcagcggcaggccttgtatggtatttttgctttttccgcaaaaaaagataaggggtgcataaagtgaaattcaaatcttttatttcggcagccgtttgcgcggccatgcttttttgcctttgcgggtgcgttgatcagcaccccgacgaagcatcggcggcgcaggacgtttccgaggagacacggcttatcgccacctccccggccgttgcgcagatatgcagcaggctcgatcttgaccttgtgggggtctgtcagacaaacagcacccttcccgaaaaatatcaggatctcacaaaggtcggcatggccatgaaccccgaccttgaaatcctcaaatcattaaatcccgactatgttctctctccgagctcccttgagtcggaccttcagcccaaatatgcctctatcggcgtcaaatcgatttttcttaatttaaaaagtgtggagggtatgtattcctcaatcgaaggactgggtaaaaaattcggcagagagcagcaggccgcggccatgcttgaagaattcgacagctttatgaaggaatacaaggacaaaaacggggacaaggaaagtcccaaggttcttgtgctcatgggactccccggttcctatatcgtggccaccgacggcagctatgtgggaagtctcgtaaagcttgcgggcggaaccaacatctacggagacggcggcggcgaggagtttctgaccgccaacaccgaggatatgcagcaaaaggatcccgacataattctccgcgcggctcacgcgctgcccgatcaggtaaagcagatgtttgccgacgaattcaacacaaacgacatctggaagcatttccgcgccgtacaaaacggcagggtttatgaccttgaccccgctcttttcaacatgagcgccaacttcagttacggcgacgctttgcaggcgcttcagcccatgctttacggcgaataaggccgaagccgcgaaattcggtcaaaacacgggcgtcggactgctccggcgctcgtaaaaactacggaggtatcgaattttgatttcgacaagaaaaaaaatactgtcctttgtcataacctcggccgctctttttgcgctgtttcttgtttcggtcaacaccggcagccttaaggtcagccccggcgagctgttcaaaggactttttgtggaattcgattcaaatgtttccaccatttacgacctgcgctttccccgcattttcatcgcaatgctcggcggggcggcgacggcggtttccggcgtgctgcttcaggcggtcataaaaaacccccttgccgacccgggtataatcggcgtaagctcgggcgccagccttgcggcggtgctcataacggcatttttcccgtctctttatttctttacgccgctttttgcctttgccggcggtatgctcgccttcatacttgtctacgggctttcctatcaaaacggcctttcccccttgaggataattcttgtgggcgttgcggtaaacgctatgttttcggggcttatgagcgcattcaactcggggacgggttccaatctttcgggcgtggcaagcattgtaaacgccaacataaccatgaaaacctgggacgacttttccacccttgcggtatataccgtcatcggacttattctttcgctttttgcctcggctcgctgcaatctgcttgccctcgaggacaaaaccgcccgctctctcggccttaacgtcaacaaaagccgtgtcgtcatttcggttatagccgtgcttcttgccggcatttccaccgccgttatcggccccataagctttctcgggcttatagtcccccacattgcaagacttctcatcggcagcgaccaccgagtgcttattccctattccatggtgctcggagctttcaccctgctgcttgccgacacggtgggacgaaccgtcgccgcaccttatgaaatcagcgcgtcggtcattatgtcggttgtgggcggacccttcttcattctgcttttaaggaggtcaaaaaatgcatacggacggtaacatcacatacagcgttagggatctccgcttttcctacggtaaaaacgaggttcttaaaggggcgtcctttgacatccgcagcggaattatcacaacccttatcggagcaaacggctgcggaaagaccaccctttttaatcttttgacaaaaaatctcgttccgggcggcggcaaaatttccttttgcaaccggccgctttcggaaatacgtttaaaggactttgccaaaaaggcggccatcgttcaccagtacaacaccgccccttcggatttgaccgtggaaaagcttgtttcctacggccgcacccctcatcacaccttcggcctttccaaaaacgccgaggaggaccgggaaataattacccgcgctatgg

SEQ ID NO: 675 - DNA, 1753 bp, Unknown
  16S sequences of unknown bacteria
tccccctgtttatttatttttttgaaaagatatgtttgataaaaacatacattactatggcaaatgccatcagatatccaaacgcaccgattgccggaatcccccacaaccttggctgcatattggttgtacagataatactggaactgatcagaagtgccatcacccacagccccattacaatattccgcaccagcctcctgagcagtctggaaagctcatccgaagtatgaagatccaggttgactctggtctgtcctttcatgtgaccctgcaggatgtctgctgcaagggaaggaatatccactgccttgtgaagagaacgatacagtctttttgcatcattcttcatctcttttttccactgctccttcgtcagaaagttctccttcatccgtgccgccgcaatctcaaccatgttgatctgcggactgatctcggcaagcacaccttccatattggtaagtcctcttgcaagcatagtaagtccatgaggcatggaaattttattttccttcatcacttccatcaaatcctgcataacttccgcaatatcgatatcacccatatcaaccgtgccatattttgccatcagattattgatatcttcatacagcttgctctgatccggctttccgcggaactcgccaagtgccatcaccgcttcctggatcaggccgatgtcattctctgccacacctttgactgcattgctgatctgctcccggtcacgctcggtcagtcttcccatcattcccatatcgatccagacaatcttgccgtcacggatgcgcacattgcccggatgcggatcagcatgaaaaaagccatcctccataacctggcgaatataattatctacaagctttgttccaatctcattcagatcataaccatttgccagcagattttctttatcgttgatcgcaaatccgtcaatatattccatcaccagcacatggttggtcgtatattcgcgatagagccggggcgttgcaacaaaagccacatcctgattgcgctgggcaaattcttccatactggcagcctccagaaggaaattcatctcctgctgggtgacagtccagagctcgtccagaaccatgttaatatccaccatgtccttgatcgtacctggcggaaccagctttgccgctttgtggagtaagctgatatctctggacattaccttatagatgccctgcctctgaactttgacgacaacgtcttccccagtcttcagaaccgcccggtggacctgtgcgatcgacgccgatcccagtggatgcacatcaatgctctggaatacttcgttccactcatagccgtaggacttgcggatcacttctgctacctgttcaaatggcatcggtgtcacctcggaatgaagccgcatcagttcttcacaatagcttttcggaagaatgtcggaatgcagtgacatgatctgaccaagcttaatataagtcggtcccagatcctccaggatcagccgtagcttttccggggtaagtccaccggtaatcccatgttttctgaggactgccgtcatctcccgcagtctggaactgtatttatttgactcttttggctggtttttgttactcattcatgccctcgtcgccagattcgattgcttcgacttcttttgctgcttcctctgccgtctctgtttcaacagtttcaaccgtctctcctgcctgttctacagcttcttctacttcttttgtttcttcttctgaaactgctgctt

SEQ ID NO: 676 - DNA, 2680 bp, Unknown
  16S sequences of unknown bacteria
aagacggaagctcatcatacaagcccaaagaaaaccggtaagccggaactcgcagaggggtggcgtctgaacctctctgcgtgccctctgcaaagagctccccacgagcagtggaataatgaaatcgaaagagcgaagctctttctacttccttttctcacttaaagcctaagtgaaacttcatcaggtgaagtctcttagaaggctcaagtagtctaaggtagaaaggagcttcgctcttttcgtcagaagcgcatctccttcacgtctgtcgcggaggagttgtagaacttcatcgactttatcatcttgttgatcgcttcaaagcgtaccacaatgctcttcccgtccttctcaagacgcgcatagtacgactccggcgacttcaggcttcctcgacattcgagtatcctgtccgcattctcccacttctcgcggtgcgcctcgtccatcggtcctatcgagctgaattccgacagaagattctcgaataccacttcctcgcgcttcggtccgtatacctccgttatccgcagcttcgcgttcactacctcgtagcggtgctctatcttcacaaagcggttccatgtgaaatacctcaccaccatcaccgtcatcggtatgaaaggtacggtcagtatcgccacaagcacgccgtagttgctcagctttaccataagccctatgtacgcgaaaattatcagcccgtataccgcaagccagaatatcttccgcttcagaaattttccctcggctttctgcgtaaccgtgtattccgcgtagtttattgacccgtccattgcagtctccttagtgtttttctatattttttctattagtttaccataattttgccgcgattgcaagagagttgtcacatttcttcatcccccgcaaaattatgcataattcgggtaaaaaattcactcctgccacgcataaatgcataaatgctattgacttcctgcaaaacacgtgctataatatatccgtaaacgatttttggtatactgaaagcgaaagcaagcaggtgactttatgcaaaacgatgattcaaagagaatgaataacgtagtgtacgagcgcgagatgagcgtaggttattccgaaaacacccaccttatcgagcagtccgcgtacaaatactccctccaggagagagccgacccgaacctctaccgcccgctgttcgactacgactccgtgccgaaggtctcgttcaaccaccgcttcgtgcccgtgaatatgccggagaagattcgtatcaccgacaccacgttccgcgacggtcagcaggctatgaatccgttcacagtgaagcagatcgtcgacctgtacaaaatgctgcatcgtctcggcggggagcagggaatcatcagccagtcggagttcttcgtctacacggaaaaggacaggcgcgcgcttgaggaatgcatggctctgggctacgaattccccgagataacgacttggattcgcgcgtcgaagaaggactttgagcttgtgaaatccctcggaatacgcgagacgggcatacttgtctcctgctccgactatcatatttacaacaaaatgggactgacccgcaagagcgcgatggaaaagtacctctcggtcatcggcgaagtgcttgacatgggaatctcaccccgctgtcacttcgaggacatcacgcgcgcggacttctacggctttgttctcccgcttgccgaggcgattgaggagctttgcgagagctacggcattcccgtcaagataagagcgtgcgacacgatgggctatggcgtatcatatccgggcgcggctctaccccgttccgttccgggaatctgctacggtctgaaccactacggcggattcaagtcggagctgctggagtggcacggacacaacgatttctacaaggcggtgaacaactcgtcgacggcatggctgtacggctgttccgcggtcaactgcgccctgctcggaatcggcgagagatgcggcaacacccctcttgaggcaatggtaatggaatacgcctccctgcgcggcacgacggacggaatggatctgacggtgataacggagatagcggattatttcaagaacgagataggctacgacattcccccgaagacgccgtttgtgggacgggacttcaacgtaacgaaagccggaatccacgcggacgggctgctgaaggatgaggagatatacaacatcttcaacacggagaagctgctcggcaggagtcctcaggtagcgatagacgcacacagcggagcggcgggaatagcgcactggctgacccacagatgcggcgaggcatacgacaagcgagatcctgtggtaacgaagatgaaagaaatgatcgaccgcgaatacgaaggcggaaggacgacgacgatgtcagacgatgagctgatgaagattttcgccgcggcgaaggaataaagcgaaaaaaagcctgagatgatgcgaaattatgcaaaatcttgcaggctttttttcttctttgcatcttcttttttcttatcaaatttagtttttcctcacttcgagtgagagagatagaagaaagagcttcgccctttcagattaattattccacttcgcgtggggcgcccttttcagggggaacacagagatgctcaaacgccgcacctctgtgagttccggctcgcggtggagttcg

SEQ ID NO: 677 - DNA, 2945 bp, Unknown
  16S sequences of unknown bacteria
cgagccgtggcacctgtcgtgccacggcggtaaaaccccggacaaccagctttccctcgaacagccccgcgccctatgggcgcggtgtggggtacagggcattagccctgctgcctgccgccgtagcggcggtcgcgggactggaattggaggatgcattcgtgcaggtctggaacgtggaagtctggccagagcttctccgggaagagaaactccgcataggagcattggaaaagaagaaagttgctcagacgcatctcgccgctggtgcggatcagtaagtccacatccggcagaccggcggtgtaaagatgatccgcaaaggcctgctcgtcgatctgatccacggtcagcaccccggactggacttccgccgccagctggcgcgccgcccgaaccagctccgcccggccgccgtagttcacggcaatattcagccgcagaccggacagaccgcaggtgcggcgctccgcgtcctccagcgcttctcgctggggcgcgggcagaccggccttgtcccccagaatggtgatgcggacgttgttgcgcaccagctcgtcgatctcgctggcaaaaaagtccagaatcagctgcatcaaggcgtccacttcggttttggaacgcttccagttttcggtggaaaaggcgtacaggctcaacgcctgaatgccgatgtcgctgcagttgcggatgatctcccgcaggttttccgtcccggcacggtgccccagcgcgattttcaccttgtgctgctgggcccagcggccgttgccgtccatgatgatgccgatgtgcttcggcagacgggccgggtcgatcgtgggggggaggggatatttgatcgccatgtgcgcaaacctccttcaaaagggcattgtccgctttcactatgccacagccgggaaaaaaagtaaagcgtccgttgacagaaggaaaaagaatgctatactgaactttgctgaaaacagcagatgatttggaattttggaatacagaaaggatttttcatgagcaaaatcgaacttcggcgcattgacgaaaacaacttcatcgactgcttcaacctgaaactgaaaaaagaacaggagcgcttcgtttcccatcccatccgcagtctggcgcaggcgtacgtgtattacaagcagtgcacgcccttcggcgtggtggctgacggcgaaatggtgggctacggcatggtgatctacgattacgacgaggaggagtacgacctctggcacgtgatgatcgacgcggagcagcagggcaaggggtacggcaaagcggcggtaggactgtttctggactacatccgccagaagcccttcggggattctgatctggtgaagctgacctgccacaaggaaaaccttccggcgctgcgcctgtacgaaagctatggctttgcgcccaccggcgcggaggacgaggacggcgagatcgagatggccctgcgggtgtagggtgtatttttcctgtacttgtggtttcgccccttgacaaacaaaaattgtggggtacaataggcataacttccggccaagctggaagggaatagaggcgcggactgcatcagtaccgcgcgggagcccctcaccgggctgtgaccgcgcgcgaaagggctggccgccgaaacgggcgttcgggtgtgagcgcgtccgttgggcgacggaataagatttcgtcgactgtcacagccaaaagtggctgtggggcgctattcgaccgtttttctgctgtgatcaaagcaggaatggcgttgcgccgttcctgcttttttcattccccattttttgaaggaggaaaccacgatgagaaagatccttgccctgttccttgccgccatgatgatgctgtgctgcgccagcgcctttgccgaaggcaccttccgcgtaggcatggagtgcaactatgccccctacaactggacgcaggccaatgccagcgagtatgccgttgaaattgaaggcggcggcggatacgccgacggctacgatgtgcagatcgctcggaagatcgccgaaggtctgggcaaggaactggtgatcgtcaagaccgaatgggacggtctgcccatgggcgtgatgaccggcgcgttcgacgcgatcatcgccggcatgagccccaccgaagaacggaaggccaccattgactttaccgacgcgtactacaatgtgcagcccgttgtggtcgttcgcaaggacggcccctatgccaatgccaagacgctggctgatctgagcggggccagcatcaccggccagctgaacaccttccactacggcctgatcgaccagatccccggcgtgaacaaggctatggccatggagaccttcccggccatgatcgtggcgctgaaggcgggcgcggtggacggctacattgccgaaggccccggagccatggcggacactatggccaatccggaactgacctatctgtcctttgacgagggcgaaggcttcaccgtggcggaaggcgaaacgtccatcgcggtcggtctggccaagggcagccccctgatggattccatcaacgaaattctggccggcatcagcgacgatgaacgcaagcagatcatggaagacaccatcgcccgccagcccctcaaccagtaaggggcagtgccccttaaccccggactgcgcgccgtgggcgcgcagggcgctcgggagacatgcagcttgaccgtgaagctaccgccgctcggcgacaggcctcacggctcgcgggtctggtgcggctccctgccgcttggccgatggcatttcgaaatccccccgcaaggggtaagtctgaccgccatccactgcgacggaagcggaatccctgcaagggctgcgtatgccccacgccaactgcgggggagcagagcggcgataggcagcggagggaaaaaggcccgcccattttgacggcggaaaaaggcgagctccgagcgcgcacga

SEQ ID NO: 678 - DNA, 5052 bp, Unknown
  16S sequences of unknown bacteria
atgaagaaaaggcaaaagagtatttgaaaaagctccagtcttccggtaatctgctgatgctgatcattgatcaggtgctggagatggcgcgtattgaaagtggtacggcatcattgaaactggaagcagaagatctgagcgagctgtttcattcggtttatgcggttttcgaatcagatatgaaaaagaaaggaatacatttttgtgcacatacgagcgtagagcataagtacgccatctgtgataaaacaaaaatacaggaaatatatctgaatattgtgagcaatgcaattaaatatacaccggatggtcattcgattcatgtgacaatcagggaagttgcatcagatgatgtccgaaaggcaaagtatgttttcatttgtgaggataccggaatcggaatgagtaaggagtacctcccgcatatttttgaagagttctcaagagagaagacaacaacagaaaacaagattgttggcacagggcttggtctgcctattgtgaaatctatgattgaacttatggggggaagcatccaggtggaaagtacgcagggaacagggacaaaatttacagtgacggtttctcttacaattgcttcgaaagaagatgtgtataaagagccggagccgaagcttatatctgacagagacaggaaaaaagacatacgaattctcctggcagaggataatgagctgaacgcggaaattgccatagagcttttaacggaagccggcttctttgtcgaccgtgtggcagacgggcaggaatgctgcgagcagatgaaagagatgccagaaggatattatgatctgatacttatggatattcagatgccgaatttaaacggctatgaggcgacaaagaagatcagacagatggacagtcagaaaaaggcatcgataccgatcattgccatgacagcaaatgcttttgcggaggataaggaaatgacacggaaaatgggaatgaacgcacatattgcaaagccgatcgatgtagaattactgatatcaacaatagaaaaatatacataaagttgggggcatttgcccccaacttttgttatctgactatggtatcgtatatccgttttacccgagcttgccggccaggaatattgcggtcggagaatctgcgccaccgataacggaagcgtttactgcgctgctgccatccaggatatcagaagcttctgattcaggttcactttcaggctccggagcgtacagctgactccaggtctcggcgtttgcagagcattccataaataaggacataagtgcattctgatccatctccagcagatagcggcaatcagtcggtgtgacgatgtcgcccggttcggcatcgacagaaagggaggcagtgattcccagggactccatatcttcagctgtagctgtgatattatttaatgagaggtcatcaatgtcgagccggaagcattttcccttttcaatatcggagaaggtgccggagaagaacaatgcgatggtttcatttgtgtcggagtccgtgatggaaaactgtgcggcgagctcgtttgatgcggaatcaaactgcatgacatatggtgtagccgagtagacggattcaccgtcggcgtcaatgctaagcgacagggctgccgattccgtaccagcttcctgctgctggctataattgagcgatacagccatgagggcagacggagcttcgtcgtatccaaggttcatgaagaagttgtagccttcactcaggttttccgggtttgcaaatgagagttcgtaagagcaggagatcgtatcaatgtcctccggaagctctgagacggattcatttacatggatgccgaaggcggctcctgtgtgatcggaatcgtaaaggtcatccgtgccattatagtcgtaatcatcatcatacgaatcatcatacgcatcatcatagtcgtaatcatcatacgaatcatcatagtcgtagtcatcatcatatgcatcgtcatagtcgtagtcatcatcatacgaatcatcgtattcatcagccagtgcttccagcgcatttacatccagatccagctcgtagtggatgcgctgcaggcgctgatcggatacctcaaactgcaccgggatttcttccggcagtacagattggaacatggtaagcatttcttccagctgtgcttcgagatattctgcatcatctgcagaaaaatcgtcaagcgcctgcatcggggcaagaagctgccggaacagtgtgcgatagaaatcggtgagctgatccgcgcgaagggtagccgtgtaaatgtcgacaccttcatcggttgcttttgtgacagcgacagagtcctgcagcccggtgatggttgactgcagctccgatatgagagaatcatcggatgcggcagtctgaggataaaaatgcagatccagatccgggatgtcatccgatgcgtcatttccgagcagttcagatagaccggacttcaggtattgctgtcggaaatttccggagcgcagcgcaaggctgccggaataaaactgcgggatagcgactgccagcaaatcttcatcgccgtacagggaaacgtccagcaggtcatcggaggcatgctgcagtccggcctcaaacagatattttttcagttttgggtcgatccgggcctgaagtgagcaggtggtatcgctccagccatccgggatgcccagaagctctgcggtttccggcagaagcccgcctgtgaaatgccactgcaggccattttcagacgcagcttttgcaagctgtgaaaggccgagtgtctcttccagcagggagtcagtagactgctcctgctgtgccgttaaaatagccttcaattcttcggcagcgttttggtcattagaagtagcgaatgatacggaaggtatcagcatggcagcggataaaacggctgcgaatgttctccttgctggaatcgtgcttttgcgtaaattcataggacctcctgtctggcggatattgggaatccgctgcattgttagctcataaaatgatgcgttactgttttctttattcctcaataaaccggataaagcgctttacattttccatcgaaaagaaatacggatctgcgtgttcctttccttccttcagctcgaagaaaaacgggacatccggacactcccggcgcattttttcggcgagctccacagactggtgcggggtcacgagtctgtctgcggtgccgtgctgcagccagaggcgcggcatacccggatggatccagtgcgccgggctggcgagatcgagtgtctgcggatcatttaagccggaagaaaggaaaatccccataacagagtccggtcgcagatggcggtctttttccgtttcggcatagcggtcgatcgtatcgcagtcagtagtcgggtagaagatgacaaggttctttacttcggtattcaggccggtaaggccgagcctttcgttcgggagcagagcggtctccagtgcaaggtgacctccggcagattccccccagagcgtcaggttatcggtatccagcaaaagctcctgtgcatgcgtatgcagataattgaccgcttttttcagatcaatgaccgggcgcggaaacgtatcgtccagagaaagtgtgtactgcgctactgcgcaggcatagcccatctgcagcggcttgagcatgtattcgacaaatctggaacggcggaaaccgctgatccagccaccgccaaatacgatcagaaataccgggtaagtgtcctttttttcttccggataatatatgtccataagaagctccggatcgtcgcaatagggaatatcggtgcgtttattgggaaaagcgtcttccttcatatgtccaagatcaaaggcaagaaagcttttcagttcttcggtcataaaaatgtcggttcgtttcatgacagatcctcctgtaataatcgacagaataattgtactataaataaagaatacagcatcattttgaaacagtcaaacagaattgttttcaaaataatgctgtattttatcgaagcagaaaagcggattgcgaagctctgccgggcattaaaaaaatggaagtctttcaggtgagatataacaaaatgtgtcattgcaaatacaaactataacattgctatatggacataatacgagtataatataaaaaacaatttgcaaatgcaaaggtatcagctgcaaagctgatgcttgaagcggataaagtcaccggcttccttttgcttttcctcactgagcgtcaaaaatgtctgaatggtagtagcctgataggaggtcagctgcggtggctccggcgacagtactggagtgccatcccgtactaatgcgtctaccgaaagtttgtagagatcagcaagtgcgatgatgatttccaatggtggcatgcgcgtaccgttctcatagttgcagtaggtctgacgctgaatattcagctttcggctgacatcttcctgcgtatagccggcttcctttcgcagcttgcggatattatcaataaaaaaggtatattccatacagtacctccctgtcaaatagtgataatagctgacttcggattgtggagagtatcccggacaatcgcctgtctggactgattataacaagttctgaatggaatatctggaaaagaaacaatttgaatacaaaaaatacaaatagcaacaaaaagttgcacatatcagaaaggagcaacgatatgggattactggactttgcgacagagaatgaaaaaaagggacagaagattcatggattttcggccaggctcgtgcgcggctggctgaagctgcgtgcagatcatctggagagacagctgaaccgcaggcagataccggttccggaggatcacggagaaatgtggcggcggatcaaagaagagatcacgaaagtgaaggattgaaccgtgtatcataggggtcaaaataccttttgaccccaactgatgcctacgaattgctccgctgcgaagcagctcccgcaattctgcaaacattcgaaatccgctgatttactacgtaaatcgctactttctcatgtttggcgggtcccaag

SEQ ID NO: 679 - DNA, 21717 bp, Unknown
  16S sequences of unknown bacteria
aagagccgctgctgtttggggctacttatatgaccatgaacaacccgttttatgaagtgatcgacgaagaattgcgcaatcaggtggaagcgggcggagatgtgatgatcacgatggatccacagctttccatagagagacagatcgaacagatcaagacgatgatggcagaaggtatcgatgtgctgatcgtcaatcctgtcgattcccgcggcttggtcgatgtgctcagggaagccagtcagaagggcatcatcgtcatcgctatcgataccaatgtctatgatggagaagactttgtcgatcatacggtcgtctcagacaattaccaggccggacagctgtgtgcccgctatatgatggagcatcgcgaaagtgctgatatcgtgctgctttcccatggggcggcctattcagcgcaagagcggctgcagggctttcgagatgctatcgcagatgaaccaggctatcatatcgtgagtgaactggattgtgaagggcagctggaaaaaagcatgccgctgatcgaggggctgttggaacaaggtactgccttcgatgtcgtgatggcattgaatgatccttctgcgctgggcgccgtggctgcgctgcaagatcaaaagatcgatgaggatgcggtgatggtgcttggcgtggatggtgcgccagaggccaaggtgctgatcaaagagggatatatggatgccactgtggcgcaatatccaaagaagatggcgcagaaggccatatccgcggcttatgcgataaaggcgggcgatcatgagctgcaagaggaagaaatcgctgtcagtctgatcgatggcagcaatatcgatgaatacttattggagggatggcagtgatcaaagcgttgatatcggacagcggctttcggctgcgcgtttcctacgcgctgttatgcgggatctgctttttgcagctgctgtttctggctgtgttcatcttttttacgacggatctcatccagcagcgttttgaagcggcggacttcttgaggcaggcagaggtgatcccgctgcctgcaacgctgatcctgggcggtacgcttttgctgtatccgatgctgttgggcgtgatgcagctgcgcggacatgtgcgggaaaagccatggagcgctctggcgttcttgcttttggaaagcgtcatatgtatggcactgctgcggctgacgagctttgccggcaatcagatattcttgcttgtggcagccaatatgctgacgctgaccagagatcggaaaaaccgcggcatcggcctgatcatcttggtcatcctctttttgttcaccaatgatcatgtcgtaagcgcttttgtgccgatcacttcatttgaacgttatctatatccgtacacggcgcagtctgcttcgctctttcaggggacagcttccgcgctctctacgtgggtgcttatcttgtttctggtgtatatcctgtttttgatccaggatcagatgctggaaagtgcacagatgcgccggatcaatgatgagcttcgcacgctgaatcatcagttggaggagatggcggatgtcagggagaagatgggagagacaagagaacgtaatcgcttggccagggagatacatgatacgcttggacatacgctgaccggattgtccaccggcatcgatgcggccaagacactgttgcagcgcgatccagacatggcgataaagcagctggatatcttgtctgctacggcccgagaaggattgaaggatgtacggcgttccgtgcgcaagctgcgtccagatgcgttggaaaatcacacgctcaagggggcgctggaaacgatgatcgaagagttcatgcgctcgagcggggtcaaggtcagctatgtctgtcatttggattcgctggactttcagccggatgaagaagatacgatctatcggatcgtgcaggagtgcatgaccaacagtgtccggcatgggcatgccagccgcatttacatttcctttggcaaagaccaagattctctcatcctgatcattgaagatgatggcaaggggtgcgtggatattcaggagggctttggactgcatcatatgaaagagcgcatcgcattgcttaatggcaatgtacgtttttatggcagagacggttttgaagtgctggtcgagctgccgctgagaaaggaggatgaacggatatgatcaaggtgatgatcgcggatgatcaggaactgctcagagagagcttgaagatcctgcttagttcacaagatgatattgagatcgctggtctggcggcggatggggaagaggtgctgaacctgatcccatcctgtcgtccggatgtgatcttgatggatgtgcgcatgccgcagatgaacggtgtgcagtgtacaaaagaggtcaaagaacgctatccggatatccaggtcatcgtgctgaccacattcgatgacgatgattacatttatgacgcattgaaatatggcgcgagcagctatctgctgaagggggtttcgctggatgagctgcatcaggcgatcgtgacggtcgtttctggcggcggggtcatccatcctgatatcgccatcaaggcgatgcgcatgttttccgacatggcgaaaaaccaggtggaaagtgagaccgcggccgatgagctgcagcatctttcacgcacggaatggcgcatcatcgcaaaggtaggcaacggtctctccaaccgcgagattgccgcagagctggcatttaccgaaggaacggtgcgtaattatatcagtgtgatcttggataagctttcactgcgcgaccgcactcagctggccatatgggcgcttcagaatcagcggctggtacgccggggatcacagacatgagaaggcgttggctgatcatcgcgcttaccgctgcgactgtcttgagcatgctttatttcggttcgcggacaccggtgttgcgaatcgcagtgttttccggcagcaactgggatgtgccggaagcagacagttacagcttgctggatgaagcaatcgccgcctttgctgaaacgcatcctggcgttcagatcgaatatgagagcggtattccgaaggatgagtatgaggaatggatcgcgcagtgtatcctgcgtgatgatctgccggacattttgttcgtgcccagtgaatatttttccacactggcttccactcatgccttacagccgttggatgactttgctcgggctgatgcggcatttcaggaagaggcgtattacccggcatcgctgcagacatgccgccaagatggaacgttgtatgcgcttccttatttatcggtgcctgaactcatctttgtgaacaagacgctgctgcagcaagaaggaatagcgattcctgaccaagattggacctgggatgattttttgcggatcgtggaaaaggtgacgaaagatacggacggagacggtgtggtcgatcagtatggaacatgcggctttagctggcagcaggcagcctacagcaacggtgcgctcttctatgatgaacagacggatacggccagcttttccgatgtatcgatgatcgaagcgataacgttcttgcgtgaactgtatggtgtctgtgatcaagatcaggtcagcacccagcagttcgatgaaggacaggtggcgtttcagccgatgaattacagcgattatcgggcatatatgccttatccatggcgagtgaagaagttttctggctttgagtgggaatgcctgcctttccccagcggagagcagggagtgaatgcttcggctatcgacacgctgatggtcgcgatgtctgcgcgcagcacgcagaaaaagctagcatgggagttcatgcggaatctgagcggcgatgcagagcatcagaagcaagctgcgatcgtttcgcaaggcgtttcggtgcttccttcgatcatgcaggatgaagaagtcaacgcggcgctgcaagcggatatccctggaaccagcgttttcgatatggacgtgctcgatacggtcatgcgccagggcgtatcggtgcgcatgacacaagaacgagagcagatcatccagagcgcagatgggacgctttctgcattggtgcataatcagcaggatatcgagaatgagctgatcaggttggagcggcggatcaacgcttatttaaaaaaatgagcagagagcaggagaaagcggaaagtgcgaaatatgtcaaagcatgcaagcgcatacaaaagttcgtgaaactgctttaaaacgctggaattttcacgtgaaagtagtatactaaaagtatgaaacctaaagagggggtttaatatgaaacagaacaagatgctggcaatgatacttgccggaggtcgagggacacgtctgctggacctgaccaagaaaaacgccaagcctgcagtgtatttcggcgggaaatatcgaatcatcgatttcccgttaagcaactgcgccaactcgaacatcgatgttgtcggagtactgacacagtacgaatccgtgatcttgaactcttatgctgcagccggtcagcgttggggcctcgatacgagagacagcggtgtgtatgtgctgccgccgcgcgagaaagacggcacagctttcggagtataccgcggaactgccgatgcgatctctcagaatatcgactttatcgacagcaatgatccggactatgttctgattttgtccggtgaccatatttacaagatggattatgccaagatgctctcacaccacattgagtgcaatgccgatgtgaccattgctgtgcgtccggtgccgatgaaggaagcaagccgtttcggcatcatgaacacggatgaggaagagcggatcatcgaatttgaggaaaagccggcgcagccgaagagcaacctggcttcgatgggcatctacatcttcaattggaagctgctcaggaagatgctgacggccgacatggtgaatccagattccaaccatgacttcggaaaggacatcatcccgacgatgctcaatgacggcaagcggctgttcgcctggcagttcaagggctactggaaggatgtcggcacgatcgactccctgtgggaagccaatatggacctgctcgacaagaacaatgacctggatctcagcgatccgtcatggaagatctataccgaagatgtgccgaccatgccgcattatgtgagcgagaccggttcggtgcacaacgcatatatcaatcagggctgcatcatcgaaggaagcgtggaggattccgtgctctttaccaacgtgaagatcagggaaaacgcggaagttaaggaagcggtcctgatgccgaacgccgaagtcggcgaaggggcgaaggtctatcgcgcgatcgtggctgacggcgtgaagatcgatgccggcgcgatcgtcggtgatcccaacagcgagaagatcgagctgatcagcaagagagtgaggggtgaatagttatgtgtgaagcattcggaatcgtaaactatgaaggaccaaatgtcctggtcaagggcatgcaggattatcgtccggtctccgcattctcctttttgggccgttaccgcatgatcgacttcccgatctcgaacctgagcaacagcggcgtggaccgcatccaggtctatgtcaaggccaacccgcgttcgctgatcgagcatctgggcacaggacgtcattacaacatcaattccaaacgcgggaagctgcatatcctgaccgcggaggacatgagcgcgaacagcgcctataacagcgacatctgcacgtatatgttcaacatgcagtccatcgaggaagcgcctgatccgtatgtgatcatcacggcgagcaacatgatcttccgcgcggattatgcggagctgctcgaccagcacatcaagagcggggcggatatctccatcctgtataagaatgtggacaatgccaaggagagcttcatcaactgtgatgtgctcaatctcaatcgtcagaagggcgtgctttccatcgatcagaaccacggcaattacaagaaccgtgccgtttcctgcggaacatacatcttgtccaaggagctgttcatctcgctggtcaagaaagcagcgaatacaagctctatgtattggttcaaggacatcatcaatgatgaatgtccggaattggatatccgcggcatctcgctgcgcggcttcttcgcctgcgtgagcgacttcaagagctactatgacgcgaatatctcgctgctggattttgataaggccaaggatctgtttaattcagagtggccgatctatacgcggaccaatgactctgcaccgacgcagtattccaacggcggagccgtggtgcattccatggtgtccaacggctgtgagatcgaaggtacggtgcgcaattctgtcatcggccgaggcgtggtcatcaagaagggcgccgtcgtggaggacagcgtcatccttccgggcgtgatcatcggcgaggacgtctgcatcagatgtgcggtcgtggataagaaggtcaaagcgatccgcaagaaggaactgatcggcgaaccggatcatccgttgtatatcaagagaggagaccgaatctaatggctactatcttaatggcagccggagagggacttccgttcatcaagagcggcggtctggccgatgtgatcggctccctggctccggaactcgtaaagaaggggcatgaagtccgcgtcgtcatgccgctgtataaaaagatcgcggaaaagtatcatcaggacttctattttgaaaaggaatactcggtatccatcaactatcatgaagtgccggtgagactgttctccatcatcaagaacaatgtcgtgttctatttcatcgagcaccagggatattttgaacgagattccatgtatggatatgacgatgacggcgagcgctttgcgtatttccagaaggcggtcatcgagatgctcaaccagctcaattactggccgcagatcatccactgccacgactggcataccggcatgatcccatgcatgtgcaaggaagggcacagcttcgatgagcgttaccgcaacatccgtcatgtctacacgatccataacatggcttatcagggcaacttcggcgtagagatgctggacagctgcctgggtttgggatattacttgtttgacaatggcaatgtgcgttatgacggcggcatcagcttcatgaaatccggtatcctgtatgccgacaaggtgacgaccgtatcgccgagctattctcaggagatcctgacgccgcagtatggcgagcatctggaaatggtgctgaacatgcgcaagtatgatctgtggggcatcgtgaacggcatcgatatcgagatgtggaatccgatggatgacccggagatcccttatcactacaacaaggtcaatgtcgagaaacagaagaaggaaaacaagatggcgctgcagaaggagcttggactgcaggtcgatccgaatgtcatgctcatcggcgtggtttcccgcctgacctggcagaagggcttctatctattgatggaaaagctgaacgagctgtgcgcagcaccgatccagctggctgtattgggcagcggagaaccgctgatcgaagagaagatggcgcagctggaaaacggcaacaagggcaagatcgtattctatcgcggttacaatgagtcattggcacaccgcatctatgcggcgagcgacttgttcctgatgccttcgctctttgagccatgcggcatctcgcagctgatctcgatgcgctacggcacgctgccgctggtgcgggagaccggcggactgcgcgatacggtgcagccgttcaatgagtatgagaagaccggaaacggcttcagctttgcgaactacagctctgatgagctgatcaatacgctgtattttgcgattgatgtctactacaaccgcaaggaagattggacaacattgattcgtcatgcgatgaacacggatgtcagctgggaaaagagcgctgtcacctatggcttgctgtatgacgaactgttgaaatattaacccccttgaaaaagatggctgcggccgtctttttctatgccgccgcgatgtggtatcatggagacgagaggaggagcatatggcgagcattcatgtgaacgggatcgacctgtattatgaggtgcatggcagcggcatgccgctggtcatgcttcatgggaacggagaggatcatacgaccttttccacgctgtgcgccgcgctgcaggaccgcttccagatctttctgtttgatacgcggggacatgggaaaagtaccccggtaagcgaatatcattacagcgatatggcgcaggacatgaccgaggcgctcattcagctgtttgatgggccgatcgatctgcttggcttcagcgacggcggcatcatcgcattgtttctggccatctggtatccgcagctggtgaggcgcatgatcctgtgcggggccaattaccatccctatggcatcaaggaggagggccggcgggacatgcgtgcggaatatgcgcgaagcggcgatccgcgcatggcgctgatgctggaggaaccgctgctgacgaaggcggatctctcacgtgtgcagtgtccgacctgtgtgctggccgggcagaacgacatcatcgaagaggcgcatacccgggagatcgccgcctgcatcgcagacagccgcctgttcatcctggaacacgaggatcacgccagctatgtcgaaggcggcgatatgttagctgggctgtgcgatgaattcttccgggagggacgatgaaggtcgcagtgagccgctgcctgctgggcgaaaactgtaaatacagtggcggaaacaactatgatgaagcactgtgcggatggctgcggggccatgaggtcatccccgtttgtccagaagtgagcgggggtctgccgatcccgcgagagccctgtgagatcgtcgctggcacggtgcagaccgcaggcggaatcagctgtgatgcgcaataccggcatggggcaaaggtcgaactggaaaagttaaagtctgccggggcacagctcgccgtcctacaggcgcgcagtccgagctgcggctgccggcatatctatgatgggaccttcagcgggaggctgatccgcgggtccgggatctttgcacagctgcttcatgcggaggggatcacggctgtcgatacggaagaacgggacaagttggaaaacgttctggctggaaaatgttgaaaaacaacaaaaaaaagagaaaagccattgtaagtgttatcaaaatggagtaaaatactaattaggtagaaggacaataggaggaattgaaaatgaaacaaattacagtatctgtagttgatccggtcggattacatgcgcgtcctgccactgtggcggtcaatgctgccagcaagttcaaatgcgaagttaacgtgtctttcaagggccgtgaagtaaacatgaagtccatcatgggcgtaatgtctctcggtatcccgacgcagtccgaaatcacgatttcctgcaacggtgaggacgaggacgctgctatcgccgcaatcgaagatgtgctgcgcgcgcagaagattattgcataaatcaatctgaaatgaagctgttatcatcttgataatggcttttttcttggatgcacgcataggtgaaagcgttcacttttatttgctttatgcacattttttgtacggtttatgatataatggtcttaccagaactgaatgaggagaggttgatgaaacatggtcaatgaagcttatgaacgatggctgaaccatccgaacctggatccttcctacaagaaggtcctcgaaacgatgagtgagcaggagaagaacgatgcgttctacacgacgatcgaatttggtacggcgggcatgagaggcctgctgggaccgggaacgaacaggatcaatctgcatacgatccgcaaggcaaatgaaggctttgccgcatatatcgaggcgcatggggaagaagcgaaggcgcgcggcgtggcgatcggctatgacaaccgtcacatgtcgccggaattcgccatggattccgccaaggtgctggctaagcacggcatccgctcctatgtgtttgaatcactgcgtccgacgccggagctttcctttgcggtgcgtcatctgaactgcttcggcggcatcatggtgacggcttctcataacccgaaggagtataacggttataagctgtatgatgagaagggctgccagctggtgcctgcgctggcccagcaggtgatcgaccgggtcaatgcggtgcaggatgagctggcgatcacggcagacgtaacgccggaggaagaaaagctgatcacggtcatcggcagagaagtcgatgaagaatactatcagaacgtgctgagcatccagctgaatccggatgtgaacaaggacgatatcaagatcatcttcacgccggaacatggcacggccaacgtcccggtgaaggagatctaccgccgcgccggataccatttcgtcgctgtggaagagcagtgcacgccggatccggatttctccaacacaccgacgccgaatccggaagagccgggttcatatgcgctggcgctggactatgcgaagcgcgaagacgcggacatcatcctcgtctgcgatccggacgctgaccgtatgggcgtcggcgtcaagcacgatggagaatataagctgttaacgggcaaccagagcggttccgtgctgatcgaatacatcatgtcgcagctgcaggccaaggggcagatgccggatcatccggtcatgttcaatacggtcgtgaccagcgatctcggtgaaaagatcgccgccaaatatggcgtggaatgcgagaagacactgaccggattcaaattcatcggcgaaaaagtcgccaagtatgaggtcagccacgaaaagaactatgtgttcggctatgaagagagctacggttcactgatcaagccgttcgtccgtgacaaagatgcgccgcaggcgtgcctgatgctggcagaagccgcatgctattacaaggcgcagggaaagacgctggtcgatgtgctgtatgatctgtatgcggagctgggctattatgaagagagccagacctcgctgaagctcgccggacaggaaggtgcgatgcgcatcaagcagatcctctccgacctgcgcaacagcgaggtaagcgagatcgccggcacgaaggtcatccgctttgaggactataacgaatgtgtcatcaaggagaacggcgcggtgagcgagctgaagggcttcacgaaatcagatgtgctgaagtattatctggaggatggcagctggatcgcgatccgcccgagcggtacggagccgaagtgcaaattctatttctgcatcaagggcgattccctggaaaacgcgcatgagaagaccgtttcctatcagaaggcgatcgcagagatgaccgcatgaaccataaggactgaagagagagcactgctttccttcagttctttttttgcgcaaaaaaaccggggcggatcagatcgccccggcagcattcagcgtgctaagttgaatttcttcaggaagtgctcgatgcgagccagcgcttcccggatgtggtcgatgctgtaagcgtaggatacgcggatgaagccttctccggcctcgccgaacgcggtgcccggcacgcaggccactttctcttctttcagcagcagctcacagaacgcatcgctgctcagcccggtcttccggatgtccgggaagacatagaacgcgccgtgcggcagatggcactgcaggccgatccggttgaatccggaaacgatgaagttgcggcgggcgcggtaagagtccaccatctcctgcacatgcggaaggccctttctgagcccctcgatggcgccgtactgcgccgccgtgggcgcagacatgatgacatactgatggatcttgttcatcgcctggatgagcgtaggattggccaggatgtatcccagccgccatccggtcatggcgaaggccttggaaaagccgttgatgacgatgacctgatccttgatctcatcgaactgggcgagcgaagcgaacttgccgtcataggtcagttcggcatagatctcgtcgctgatgacgatcaggtgatggtcgcggatgatcggcaccagcttggcatagtcctcatggctcatcactccgccggtcggattgctcgggaagttgatgagcagcacttttgtcttttcgctgatggcggcttccagcgcctcgggcagcagcttgaagtcatcttcatgcttcagctccactgggacgcatacgcctccggccagcgtgatgccgggggtataggcgacgtaggacgggttcatcgtgatgacctcgtctccgggatcgatcagtgcgcgcagcgcgatatcgatgccttcgcttccgccgaccgtaacgatgacattatcgtttggatcatagtccatctgaaagcgtcgcttatggtaattgcagatctcccggcgcagttcgaacaggccctgattggccgtatagtgggtctttccgttctcgatggaataaatggctgcgtcgcagatgtgccagggcgtgctgaaatcaggctctcccacaccgagcgagatcaccccttcgatctcgctggcaagatcgaagaagcggcggatgccgctgggcgcgatcgttctgacacgctcagacaggatctcttcataattcatggcgtcaccaccagccgttctccgttgtgcttgcgctcatcctccaggatgatgccgctttccttatactgcttcaggacgaacagcgtgaccgtcgatttcaccgagtcgatgcaggcgatcttgtcggcgacgaagctggccacatcgtacatgctcttgccatagaccatgcacatgaattcgctttttccgctcagcagatacatcgtgtccacttccggataacgggcgatggtcctggcaatcttatcgtagccataatcccgctgcggcgtgacgccgacttcgatgatggccatgaccttgcgtccgcggctggccttgtcccagttgatgacggtatgatagccgcagatgatctttcttttttccaggctgtccatgcgctggatgatgttttcttcctcttccagaaggatgtccgacaaatctctgacagagagccgggcattggtttccagaaggctcagcaattcgatatctttcataatgtcctcctttattccctgtatattcactgcacagaggagtttagttctattttaccttcaatcatgcacagtgtaaacctatattcagaaaacgttcacattgattccatcataattccataattgtttcgtaggataatagcgaagtcgatgaagacttcagcaatagctttttcattcttttcccatccccgagaggcagccgatttcccacggctgcctttcactttttcaacgcatcaggcgctttgatgaaaaggaacagcttcagccagcgttcactttcgtaacatcattatcccataaagatctggtaggatgatctcgaagccgaggaaggcttcaagcaatagctttttcattcttttcccatccctgagaaggcagctggttcccgcagctgccttttcgccgtcatgagaaaaatagtgcaaaaaaagcgcaaatgatgctaaattatcatgatttagttgaaaaaatactaagaggggattataatacttacatagtataatgaaagcgtttaccatatctttctgaaaacagaatggataattgggggaatgaggagggcatgtgatatggcaatttatgatatcctgacaacgcacaaggatcaaagagacggcggcgatatctgttcattcaacggatatctggaagactacttggggatgatcgaagaagatgagacgaagacaagggaggctgaggcattccggttcctgcacggactggatgagaatctcaggatctgcacggatcttcatctgaatatcaaccgcgatgcgatcgccaatcagatcatccgctataaggatgcgttcaagatgcccgatggtgagatctgcgtgccgtatatcgtatatggaaaggatgatggcggacagcgcgccagcatcatcctgttcggcggccgtgaggactatgtcttcgccaaggcatattattatgtgatcagcgaaccggacaacatgtacgaggggacgagaaatgagatcgtgtccatggtgtgcggggaagacgtggacgacgtgttccgtgacgcgatggaacgctatttcggacgtaaggagaaggctggcatcgtgcagcgttttgcggaccgccgcctgttcaagaactatgatgagatgatcgagctggcgaaggaacgcggcgagcgtttgcaggaagaggcaagggaggagctcccgaagctgcaggaggacgcgcagccggcgatctattcctatatcatgagatggttcctgctgaagaagttctgctatgtgcagtacatgatggacaagcgcaagctgcaggaggaatacgagggcaacgtgaagaaacagcgtcacggagcaaaggaccgcagcgatgccatcagcttcatctcctatcgggagatgtggcagatcgcaaagagccagccggaataaaccgtatcggcaatgagggatcctataagggaaagccctcttttcttttcgggcgcgctgaaaccggaaaacccgttaaaaaaccgacgggcggcgccattcttaattgacaagaaataagcaagtacttataatatatattgtcaaaaggaggactttgaaaatgacagtaaaagttgcgatcaatggattcggacgtatcggacgtcttgcattccgccagatgtttggggcagagggctatgatgtcgttgccatcaacgacctgacttctcctgaaatgctggctcacttattaaaatacgactccactcagggccgttatgcgctggctgacacggtttctgccggtgaaagctccattactgttgatggtaaggaaattacgatctacaaggaagcagatgcaaagaacctgccttggggcgaactgggtgttgacgttgttctggagtgcactggcttctatacatccaaagcaaaggcaagcgcacatatcgaggctggcgctcgtaaggtcgttatctccgctcctgctggaaacgacctgccgaccatcgtttacaatgttaaccatgagacactgaagccggaagatacggttatttctgccgcttcctgcaccacgaactgcctcgcgccgatggctaaggcactgaatgatctggctccgatcaagagcggtatcatgactacggttcatgcgtacactggtgatcagatgacgctggacggaccgcagagaaagggcgacaagcgtcgttctcgtgcagctgcatgcaacatcgtgccgaactctacgggtgctgcaaaggcaatcggtctggttattccggaactgaacggaaagctgatcggttctgcacagcgtgtaccgacgcctacaggatctacgactatcctggtcgctgttgttgacggcaaggtaactaaggaagagatcaacgctgccatgaaggctgctcagactgagtcctatggttatacggaagaagaactcgtatccagcgatatcgtcggaatgcgttatggttctctgttcgatgctacacagacaatggctcacgacatgggcgatggaacgactcatgtacaggtcgttgcttggtacgacaacgaaaacagctacaccagccagatggttcgtacgatcaagtacttctctgaactgaaataattcaggaaattcatcaagcatctcttcggaggtgcttttttttcgggtgagacacaaaacgagtgcagttgttcagcgaatatgatataatgatttcacgtaatctgaaacggagatgaaaaaaatgccgctgaaggaaagactagctgaagggaacgaagatgccctggaggatgtggatgagctggatctggcttatctgcagcgaatgaagaaaagcgggatggacgaggatctgctgaagcagtttcagtcaatcacctcagagatgaacggggaagaaaaggagaaagtgcagaatggataatatatgggtttgggtattggtcggcgtggtcgtcctcgtcgtcatcctcatcagaaactatctgttgcgtaagacgtacacgaagaagatcatgaaggcgatgtcagaagaggactatgaccggttttatcatatcctcgattcgttctggtgcaagtttgcgctgcatccggctgatcgtgagatgatgcgtctgagcgcggtgctttcacagggcgatacggcaaagatcgaggatcagatcaatttgatgctgcatatgcgcatgaagaagaagcgcaaggcagctgtggcgatgcagggattctacttctatgtggagatgaagaaccggcgtaaggcggataagatgatttccatcgttcaggaaaatgccggtccgcagtccgccaaggagctgaagatgatcgccagcgtgctcctgcgcaaggaagcgaagtatatccatgagatgcaggcgtactatgacaacgcggtcgctgatgagcagaagggcatgttcgcctatctgctcggtcttgagtataaatataagaatgatacgagaaagagcaagaagtatctgaaggaagcgctgcagaagctgaaggggaccccttatgaagaggagatccgcggccttttgagcgaatcggctgagtaataacggaagacacggtgtatgcactcttctgcataggcaggagcgcgcacgcgcgtgaacaatggaaagcatctttcaggcgaggcgtcagggacggccgcatgaagagctttttttgtatcaggatcatcggaaaggagcatgaagatgaagatctataacagcatgagcatgaaggtggagaccttccggcctctgcaggaaggcaaagtgagcatgtatgtgtgcggaccgacggtatataattacccgcacatcgggaacgcccggcccatcgtggtgttcgacacgttaaaacgaaccttgcaggcacttggctacgaagtgaagatggtgagcaactataccgatgtggatgacaagatcatcaacgtggcaaaggaactgggagtcagtgaaaaggaagtaacggataagttcataaaagcatataacgacgaccgtctttcgcttcatgccatgatgccggatgaagcgccgcgcgtgacggaaacgatggatgcgatcatcgccttcatcgatctgctggtacagaaaggctatgcctaccaggtgggcggagacgtctatttccgggtcggcgaagtcaaggaatatggggcattgtcccaccagaagacagaagatctggtggtcggcgcccgtatcgacgaaaatgaacgaaaggagaacccgctggatttcacgctgtggaaacagacggatgaaggcatccaatgggattcgccgtggtcgaagggacgcccgggatggcataccgaatgtgtcgtgatgatccatgacgtattcgaacagccgctcatcgacatccatggcggcggcatggatctgaagttcccgcatcatgagaacgagatcgctcaggcccgcgccgcctatggcactccgctggctaattactggatccacaacggcatgatcgacatcaatggtgtgaagatgtccaagtcgctgggcaatgtgcgttgggcaaaggatctgatcgcggaacatggcggaaacgtgatccgctggatgatgctttccgcgcattaccgcgcgccgctgaacatgagcgatgagtcgctggagacgagccataaggaatatgagcgggcagccaattcgatgaagcagggctacgtcaagctggcgctggcgcatgcgcctcgcgcacaggaggcggacgaggagctgtatcgcgccttcctcgatgcgatggaggatgacctgaatacgccgaatgcgtttgcggccgtgtttgaagcatgcaagcagctgaatacggcagtgcgtcagcgtgagccggatctggagcggatcgcggtcctcgtgcggacgatggaaaagatgatggaagtgcttggcatcgatatcccttgcctgaatgtcagcgatgaagactgtgcattgtatggcagatggagagaagcggtgaaggcgaagaactttgaacaggcggacgtttaccgtgcgcagctgatggagaagggcatcctctaagatggagatcgtcaattacaatggcacttcgctggcgttcatcggggatgcctggatgagcctgaaggtgcggatgcatgtcctggaacaaggttatcagcgtccgcgggagctgcagcgccgctgcagcagctgggaatgtgcccatgcgcaggcgaggatgttgcgtcagctggaagaggaagcgttcttcgatgaggatgagcaggagatcatccgccgcggacgcaatgcgaccatccacaccaaggcgaaaaacgccgatatcatgacctatcgtcacgcgaccgcattggaagcggtgatcggatacttgtatctttatcacaagagcgagcggctggagctgctgtggcaggcgatggtcagaataggagagacagtatgacacagttcgtatatggaaagaatgtcgtcgcgcagctgctggatgacggacggaagatccatgaggtctggctgatgcaggggttccgcgatcagaagctggtgcgccgcgtgcaggaggcgaggatcccggtgaaatgggtgaaccgggcccagctggatgccaaggtgaagacgaaccggcatcagggcgtcgcagcctgcatcgacgcttaccgcacatacagcgtggatgagatcctggaggcgatcccggaagggaagaacgggctcatcatcatgctggatgagctggaggatccccataatctgggcgcgatcttgcgcagtgcagacgccgtgggcgcggacggcatcatcatcggccgtcaccgcagcgtttcgctgacgccggcagtggccaaggtgagcaccggggcgatcgattccgtccgggtatgcgccgccgccaacatggcacagacgctgcagtatctgaagcagaaaggatactgggtggtcggcgccgatatggacaatgcccgggattaccgggagggagactatcaggtcccgctggtgctcgtcatcggctctgaagggttcggccttcgcccgctggtgaagaagcagtgcgattatctgatccgtctgcccatgtgcgggaaggtcaattccctgaatgcttcagtggcatgcgcggtgctgctgtataagatttatgaacagcgttgccccctttgatcactctcctcgatggagggaatatgagggaatcagagcgttataatgagtatgaactcgtctatatgatcttgcagggcgatgaacacagcctgcagctgctgcttcatcagtatcagccgaagatcaacgcgatcatcaagcaaaactgcacttatcaggtcatgatccggcatcatgagggagacctgcatcaggttgcggccgcggccttgatgcgggcggtgctggaataccgggaagagaaaggaatctccttttctaccttcagcggcaaggtgatcagaaacgcggtcatcgactatcagcgttcgctgtaccgcaaggatttctcgctgacgcatgaggtcctgcacctggatgccgctattcacgcggaagggacgatcgtgctgctcgatctgatcgaaagtcagcgagtcgaagaaaacggcgcgttttcgatctatcgcgtcacgatggagatgcaggaggaagagctgcgcaagagcatcagcgagctggaatatcagatattctgtctcaggcgtgagggatacagctatcgcgagatcgcacagcgcgtgaacgtcaccgagaaaaaggtggagaacacgctgatgaaactgagaaggatgctcagggggatgtgaaggaaaagcttttcctttacttttcccctgcaggattatataataaaatagattgacgggaatcttgactatgggaagcctttatgataaagtaggtaagcaattgcgaaatgaggtggaacgtatgaaagataaagtgatcctgacatgcagtgaatgtctttcaagaataagaaaacgcacacggaacgcatagagctgcgcaaatattgcaggaaatgcggcagacatacactacataaggaaaccaagtaaggagtgagtttttatgttgaaatggttcagtatttccggaattctgaaggaagtgaagcgtatccgctggccgcacgggaagaccctggccaccaacagcctgacggtcatcgtctttaccgtcttcttcggtatcttcttcctgctgtgtgaggtcgttgccagcggcttcctgagcctgatcggaatgtagtaggaggaagatgaatgagcgagccgaaaaaagaatggtatgtggtcaatacatatgccggccatgagaaccgtgtaaaggaaaatctggaacggcgtattgagacgatgggcctgcaggactttctttttcagatcgtcgttgcagaagaaaaggaaatcgaatataaaaacggaaaagaagtcgagaagacgaagaatctgttcagcggctatcttttcgtgcagatgatcatgacggatgaagcgtggtatatcgtccgtaacacaccgggcgtgaccggatttatcggatccagcggcggcggtgcaaagccgttcccagtggcggaagaagagatggagaacatcctgcgccggcttggacgggcacagaaggatgtacagatcgactttgatgtcaaggaccgcgtaaagatcctcggcggggcgttcaaaggctcagagggaacggtcgaagcgctggaccctgctcgccaggttgcaacggtgctcctcgtgctgtttgggcgcgagacgccgacagagattccctacagcgatctggaaaaaatcgaattatgatcgaaaacagctttgtacagctgttttttcgcgtattatgacaaaactcatgaaggaaaaccgctatcctgaagacaggaagtggtgaatatgcgtcagcgggcaggaatgatctgctgcgtggcgggactggtgctgctgttgagaccggatatgagcggcagagagatgctggaacaagcatatgcgctgctcaggcagaactggccgctgctgctggtgctgctcgggctgatcctgctttggcccagggggaaacggcgccgcggctgagcatccttgatgagagaaaggatggatgacatgaacaagacctgcctgatcgaccttgacggaacgatgtattgcggcgatacgctgatcgaaggcgcaaagcgctttattgactggatgctggaacaccagcacccgtttctgttcttgaccaataacgcgacccgcacgagagcggaaaatgtcgcgcatatggagaagctgggctaccgcgggatcaagccgtcgcatttcttcaccagcgccatggccagcgccgcttatgtggccaagcagagccataaacgccgcgcgtatgtcatcggcatggccgggctggaagaggcgctgttggaacaagggttcgagctggtgcaggatcaggcggactatgtcttcgtcggcctggataagacggcagattaccgccgttacagcgatgcgctgaagcagctgctggccggggcaaagctgatcgggacgaatactgaccggctgatcgcgacgagccaggggttcgatatcggcaacggctc

SEQ ID NO: 680 - DNA, 7273 bp, Unknown
  16S sequences of unknown bacteria
gcgcgtcgaacgcagctctcgctgctgcgacggcttccttgttctccagcgtgatatccgctgctgcgggcagggcgttaatggtctcctcgaccttcgcagccgcagccttgtcggcttccgcggcttccagcttagccagcgcgtcttctgcggccgtcagcttctccagcgcatccttggagaccagcgcctgctgggtctcggtcaaggcatcgaaggcagctctcgctgcaacgattgcatccttgctttccagcgtgacatcttccgcggcgggcagcttcacgagctctgccgcgaccttatccgctgcggcctgatcggctgctgcggcctgggctgtcttgacgaagcggacggcgtcatagagggcgtagtattcttcgccgtagtcggcaaccttggcattcaggcgctcttcgctaatgcccttgacgacttccatcgcgtcctcaatggccttaacggagtcggcagtgtagagggtcttgttcgcaaggatctcgtttgccttggcgatctgcgcatccagccgggccttgctcaccgcgcaggagagccagccgacctgggtgccgccgtaaatggcgttgtacgcgtcgcacatgtacatcggaatctgggcgccaatggagtcggaaccgaagctgttcttcatgctgttgtacaggacggcgacggcgtcatgcccgtcatcctggttgatccacggggtgtccttggccacgttcaggccggagacacctgcgatgccggagcaatcatactgcgccgcatgcagcgcggacaggcccaggacaacgcagcccttggagatcgctgaggaagtgcccgcaccggacaggcccttggccatatcctccgcgacatttgtcacgaagatgtttgccgtgttggaatacttatccagatggttggcaacgatcgtcgctgcccagccgccgatatcggggcccatggagaagctcgtcgcccagccgacagccgggtccatcggagccgtgacgccgctgacgccagcagcttcaatgcccagcgtgttgaacaccggcacggaccacataccggacacgcccgcttccttcatcttggcgacatagttgacgccctgataatcgtaggggttctcgcccagctgcacgatggcaagaatgtgggcgcccggctgaccggcagagttgttggaggtatcgtaggtgtaatcgaagtcccggatctggtcgcccagtgcggcatacgcgccccagacatcccaatagccattcaggactgtcttacgcatgtaagatgcgcgggtctgataataggcttccttgaccatgccttccgttgttgcggtatcgacattggcccagaccttgacgttgaacgtacgggtctcgacagactcgccgctctggacgctggctgtcagggtgacatttgcatcaggctggccaatggccgggcgggtcagggtgccgtctgctgcgatgacctccggcatggaggacgtccaggtgatggccgagccgtgcgcgccctcttccgccaggggcaggttcgtcaagtactccggcagcagggacagggcttcggcatcctgataggcattgtcgccacccgcgccgcgttctgccgcgaccttgacggcgaattccttctccagcttctcctcgccgatctgagccgtgatagtcagcacaacggtcgtatccacggcagggcgggtcaccttgccgtcgttcgtgatgacatcctggttggagctgaccatggacagcgcagcgccgttggcgcccttggcaggaatggagaagtcctccaggaccgtcgccgggatctcaatggcgttcaagtctgcctgcagcaggtcctgcacattgtaatcaaacgtgaacgtcgcgaggatcgcacggtcgtttgcgtaatcggaaatggccatcagggccgccgcctgatattgggcggagtcataaagatcatacttgttgcgcttggacagcagctcttcgtagactgtgtcagcgcgctttgcaaagtctgccttcttgctgttgctggtcgccagatgcttggcctcgaccagagcggagaggtaggccgacttcgtttccaggttcgagcccatcgcgccgccgtcatagcccgcattcaggacggtcataacatcgaagaaggcgctggtggcttccttgcccagcttttcatccccagtaaagcgggccatcaacagggcaaagttggcattatccagcatcgcataggctgcgtttctggagccgccggtgccgtcgaccttcgtgcggtaattcgtcttgctggcaaaataccggccgctggtggcatcgtcatcatgcagcagggagagcatgaagttgaacgcagcctcccggccagcgccgttttccagatcctcattgttccaatcgctgccgccgaagaacatgtccagtgccataatatactggatgttgctgctcaggtaatagctgttgttatatttcgcgttggggtagaagccgccggtggcagctgcggtctgctggttctgatagcgcacgatcaggttcgtgatctcctccgggacatagccggtggtgggatacagaatcgggttgatgccccgggccatggcatccatggctgcccaggcgatctggccgttcatatctttgaacttgctctcatacgtgtagcgccaggtcgtggtggtctgcagctgggagatatccttctggtagctgcgcgccgccatggccgcatgcgtgacggtcatgccgtttttcgcatagtccgcgtacaggatcgctgcaacgtcctttgccgtgacatccgcgtcgtagacccgcagatttgccgtccgggtgtacaccttcgtcccgacggtgtcggtgacctcgcagcgcagcaaagcgccgtcatagcgcagggatgcggcaaagtccagcttagtgtctgtctggccggagagattcttccagctctcgccgttatcgcggctgatctgccactggtaggtcagatcgcccatgccgccggccgctgctgcgtaagcaactgcgttctggtccgcaaaggcaacggcgtcctttgggttttccatgatctcgatggggtagtccatctttgtgcccttgaggaccgggcgctgtgcgttcgtatcccaggtccatgcaccattctcgccgaagtcaaagccaacgccttcccaagtggcctgctgctgcagctccgccttcgtcttagcgatgcccatgtagttatcggcgccgccggtgagggccatgtttatgacatacatgctgtccagcgcatagttgccctggatagtaatggccgaattctcgccgttggacgtgccgatgccgaccacacggcccgccgtcacgccgtctttcagaacgccggtgatcttttcgcccatggcgacgttgcccgtcacctgcagggcggagggattggactgctctgcgccgtagcccagcagaccgccgacctggcggccattgtccgttacggtgacattgccggatgcgtagcagttatgaatctcgccttccttgacattggcgccccagccgatgagaccgccgacatactgctgcccggtgacatcgccggtggcatagcagttgcggacgatgactgcgcccatgtacttatccgtgccgccgtaggtggagcggtcggagatacagcccgccaggccgccgacctgccatcccgtggtgctgacggacgcttcggaggaggagttgatcagataacgcgtccaggcgccatcggtgccgttggcgctgggcatgaagttgccgaccaggccgcctgccacgatacctatcccgccgttgcactcgattgcgccggacaggacatggcagttgcggatatcgccgcgggaggtctgccccgccaagccgccgacattcacgttgaggctggtgggcacttccatatggatctggacattttccaggttgatattcgccagccgggcgctggtgcgctccgcgccggagtagctgacaaggccgaacaggcccgcatagctccactgaccgtcgatggtcatattcgtgatcttaaaattatcgccgttgtagttgccgctgaaggccttggttgcgccgatgggctcccaggcaagcttcgcgccattgccgacgaccttggattccgtcaggtcaatatccgcggtctggataaagaatttgcccgcgtatttcgttccggcattgaccgtcttggcaaggtaggccagttgctctgccgtggcgatctgatagggatttgccgcagagccgtcaccgcctgcaaaggcgtctgcggcgtaatccgtccacagggtgctggtgggcaggttcatctgggccgtgaccgcagcgttgtctgcgtagacagcagagaaggtgacggtgctgtccttaaatttaccgtggatgggggtgaagtgataagtaaaggtcgtcgccgtgcccgcttcgttctggcccagggcgctgccggtgatgttcagctccagcggcgcggccgcttcgcccacggtctggatcgtcgcggtgaaggtgaaagcgctgccgtccagcggcgtgtagctcagtaggcggttcagggtgaggactgcgctgccgttggtcacatccaggctggcaatggccaggcccttgagctccgcatcgtagccatatttcccttccgcatccttgatctgccaggcaagctggggatagctgcccgcgttatcggcataagcgccgcccagggtagctgctgccgccttgagctctgcgtcgttcttcgcgccgttgcccgcgcggttcgtcttctcattgccggcaatgaaaaggccagcgttgatcgcatccgtctgcagaccccagcagttggtcagcgtcacaggcacggggctccaggagctgccgttgttgccattgccgatgatcaggccgacctcttttgtattgccgttcagcgtcgtgatcttgcccgcgttatagcagttgcggaggatatttttcgtatcggagctctgatagcccgtggagacaccggcaatgccgccgacgcggagggtaccgctgttgtcccactcgctccggacatcgcccaggttgtagcagttatacaggtcatgcgccacaccggcaatgccgccgatgacataccgggatgcggtgaccgtgccggtattatagcagttccaagcggaggagcccgtctgcatttcgccgacgatgccgccggtattccaggaattcgacgtgacactggcgctgttggcgcagttgagcagcatactgccgtttctcataatgccaacgatctagcctgtcccgctcgtgccggtcgtattgaccgcgccggagacgatccgcaggttcttgacgatggccgtcttatccagatagccgaacagaccggcgcaggagcccatctgcacgttcaaataatagttggaaatggcatgaccattgccgttgaacaggcccatgaagctgttgttatagctattgccgatgggcgtccatgcctggccgctccaggttccgtccgaaccctggacgccgccaagatcgaggtctgccgtcagcgtgacggtcttgcctgcaaagttatccgccgtgatcccgtcggccttgccattgacaatagcagccaggcccgccagttgggcaggcgtcgagatctcaaacgtttttgcttctgcgctgtaccagctggtatccacactgccgtcccacgccgcggaattatccgccgacgccggaagggccagtgcagtgaccagaagcaccaggcacaaaagcaaggctaatttctttttcatctgtttctgtcctttcttcttttcaaaaatttctaaacctgccaaagcaggattagttcaaccatattccctgcactgctctccacattcaagcgccaactatttatcatgcttttccggtgggaaaagcatggcgcaccagtgcgccgcgattcacacatgatgcaaaacggccgtggcagaatctagttctgccacggccgttgtttccgtgcgcaatttgcgctcaaaaggcgcccacgcatcaccaagtattctggctcatgcagctgggcgcggctggggacctgccaaaacgccccgcgcggcttcctgccttctcatgggctcccgcccacacgccccacaatggccgtctttcggcgcaaagccgcgcagctgcaaatacagctacggggtaagccccggactctcaccgggttccttttatcccccgccacgcagcgcagcggcgcaagggacgatgatacgatgtatgcttttatatgtacaaaataccacgccgggctccaattgtcaatgcctttttccctccctgccgctttttcgcgatgtccacccaaaaatccgcatagagaggaaccccctccggcgtcaggcgccgaaggggggtgggtgcgggttttggcccgcacccggttagaaaggaaataaagaatgaagaagctgtcaattttatgtgggggggggagcgattcacgcttccctgcttttgcctcgcagtttacttgacgatcttcgtcgcgaaccgctgcaggatggcagctgcctgggcacgcgttgcgttggccgtcggctgcagctggttatggttgttgccgtacagaagctcggaggcaacggcccacttcatatcgtcgctcgcccagctgctgaccgtcgcggcatcagtgtaaccagacagatccgtcgtcgcagtgacgtcgagcttcttgaagcttgcgtagcggcgcatcatggctgccatctgctcccgggtaatcttcgcgtcggggctgaaggccgtctcgctggtgccgtagaccacgccgttggcgctggcccaggcgacggcgtctgcatagtacgcgccttcgggaacatccgtaaagcttgccgcgtccttgacctcgggcttgccctccatacggtagagcatcgtgacgaacatggcccgcgtcagcgcatcatccgggctgaacgtcgtgtccgtcgtgccatacatcaggccgtgggtgaagacgtagtccaccgcgtcgtggtaccacagcgtctggtccacatccgcaaactggcggctcgggcaatacacgccgccctcgcaggcgggcagcttggcaatctcttccgttctcgtctcaccgcagttttcgcaggtgtaggtcatggtgcccgtctcccaaatcgtcggctggacggtcacttcaccgtcgttccaggcgtggcccgtgggctgggtgaaggcgttcacgtagctgtagt

SEQ ID NO: 681 - DNA, 1925 bp, Unknown
  16S sequences of unknown bacteria
aataaacagacgcggtcattctaactacactactaaggcttatgcttcatcgcgccccaaaactcaccgcgcgtacattttaagctccactactacggattacgcaaaaccgcgcgactaatcggtaaaaatgtgcggggacggaagttaatcatatcagcctaactccaccgtgaagccggtactcgcagagggatggcgtctgaatccctctgtgcgccctccgcgtaggagcatataatgaaatcgaaaagacgtaagtcttttcttctattctctcacttgaatcttaagtgaatcttcactggggaagtctcttagaaggctttagtcgtctaaggtagaaaaattcgctgcgctcttatttcaagttctccctcgccgccgcaagcataagcttcagtctgttctcctggttgaccgcggacgcaccggcatcgtagtctatcgctacaatgttcgcgtccggtatggcctccttgatgggcttcatcatgccctttccgcatatgtggttcggcaggcatccgaagggctgtgtgcatacaatgttgggcacgcccgagtccgcaagctccagcatctccgctacgagaagccatccctcgcccatctttgtgccgtagccgatgaagccctttgcaagctctacagtatgcttaaacggcgtcattgcgcggaacgtgccttcctttttgatagccttaatctgatccgcctgttttccgcagaggaagttaaagcctatcttgtttaagacgtgcgcgacctttccgtgtccgtagagcttatagtccattactccgttatacaggcagtagttgaagaagtcggcaagtccgggcattacgacctccgcgccctctcctacgagaaactcctcgagcttattattgccgagcggcgagaattttacgtagatctccccgacgataccgaccttcactgccttacgctgttccctttcgacggcggcgaagtcctttattattgcgtcgtagttctttttgaccttggaatacgacaggcgtttgtgtgcaagctcatcgacgagcttatcggtccattttttacacagggcgtccgcagagcctttttttatctcatacgggcgcgtctggttagcgagggtcatcatgaggtcgccgtatagcacgccgtaagccattttatagtacagcgggatggaatttttgaatccggggtgtttttctattccggcaaggctgagggggacgacggggacgtactccatacctgcggcgatgagagctttacgcatgagggagacgtagtttgacgctctgcatcctccgcctgtctggaaaagcatgacggcgcacttatgcggatcgtacttaccggagagcagtgcgtcgagcatttgacctatgacgaggatagcggggtagcaggtatcgttatggacgtatttcagtccggtttcggcgatttgcgggcctgaggtttgaagcagctccattttatagccttttgtctcgaaaatctgcttaatgagggtgaagtgtatcggcagcatattcgggatgaggatagtatgggttttcttcatttcctcggtgaatttggtgtagttattattcatgtgttattctttaagattatcaaattttcctttttttgggtttggatttattcttttaatctatcaaaattttgtgtggcttaatcttttagaaagatttaggcagaaaggacttcgccctttcgatttcattatattctcctacgcggagggcgcacaaggagcttcaaacgccagctccttgtgaatctacgctcgcggtggagtatggcgtatatgataaacttcatcatcgcccatttgaacagattagtcgcgcgggattgcataagccttagtagtggcattagcatgttcgcgcggtggaggtagacgcggg

SEQ ID NO: 682 - DNA, 32759 bp, Unknown
  16S sequences of unknown bacteria
ggactttccgcggggcgaagcttggggtgggcttccgtgagaaaattattggtgtcgatgctcgccgtcaaaagcgtggcgatcttgcgaacggaaggctccggctcgatggcggctgccagaacgacgagatcggagggaatggtcacctgctcgttgtcgatgagattggagccctgcaccatcagttttccgttttcgttatagaccttgccgaccatgcccttgatatagtccacaccgtactgctccaccgcgcggcggtaaaattcgtcgtaatttttgcccggcgtgcggacgtcgatatagaagacgtgcacctgcgtatcgggatatttttcgcggatcagcatggcgtgcttcgccgtatacatacagcagatcttcgaacagtacggtttgccgcagccggacgtgtcgcgcgaccccacgcactgaataaacgtgatcaccttggggtgcgtgccgtcggagggacggagcaaaacgccgttcgtcggtcccgcggcgttcatcagccgttcgagttcgagggaggtgataacgtccttattgtcgctgtaaccgtattcgttgaacgcgtcgagagaaatgggcttgaagcccgtggcgacgacgatcgcgccgtactgccgctcgataaattcatccttcatctcgtaattgatcgcgcccgcgccgcagaatttctgacagattccgcatttgcccgttttgagcttgatacactgttcgggatcgatcaccgccacattgggaatcgcctgcgcaaagggaatgtagatcgctgtgcggttgttgagattcatgttgaactcgttgagtccctttttggacgggcatttctccatgcagactttacagcccgtgcatttcgtttcgtccacgtatctcgcctttttgcggatcttgaccgtgaaattgccgacaaagcccttgacgtcctccacctccgaataggagagaatgtcgattttatcgctctgcgcgcagtccaccattttcggcgttaaaatacacgccgaacagtcgagcgtggggaacgtcttatcgagctgcgccatgcgtccgccgatcgtggcgttcttttccacgatgtccacttcgaatcccgcgtccgcgatgtcgagagccgcctgaatccccgcgatgccgccgccgatgacgagggcgcgcttgacgacggggctttctcccgcctgcaacggcgcgtcgagattgaccttcgcgatcgccgtgcgcacgagcacgacggctttttgcgtagcctcctctctgtccttatgaatccaggaacaatgctcgcggatattggcgatctccaccatatagggattgagtcccgccgcttccgcggtcttgcggaaggtcgcctcgtgcattctcggcgaacaggagcctacgacgatccccgtgagattgtgttccttgattgcgtttttgatgagctgctgaccgttttcggaacacatatactgatagtttgcggaaaacactacgcccggctcggactttacgacttccgccactttctctacgtctaccgttgccgcgatattgctgccgcaccaacaaataaaaacaccgattctttgcattttatataactctctttaaattagattcgctttttcgattggtaacacattccgctttttccgtgggcgcggggacccggaaatttcccgcgcatcaagcgcgacgggattatttattgtattttctgtacgcgctgacgagaagctgctgcgggatgagttcgtccacgatgggcggaatgtcctccgccctgatgccgttgccgttctgcattctcacgacggtgtcccgcaccgcctccaccaccgccgcgggcgccacgccgcgcggacagcgctccacgcaagccatacaggaaagacaattccaaatcgcgtcgctttcgagcaatacctcgatcctgcctttggcgagcagggaaacgaactgatggggcttgatgtccatttccttaaacgcgggacagcgccccgaacacttgccgcacttcatgcactttctcacgtccgtgccgcttaatcggaggatattttctatctgttcgtttttcgtcattctttcacccccagcgcttccgcgagaagttccgtaaagtatttcacgggcaggagatcgccgccgtttacctgcaaattataaaggcaaagcgggcaggcggtgacgacttcctccgcgcccttttctttggcgctttggagcaccttctcgctctttttcctgggcagttcgctgtttttcaaagatacgtaagcgccgcagcattcgttgcggaaaggatagacgacgggggtgccgccgatcgcgcggataaagtcctcgatgatcgtgggattttcgggattgtcgaacgccatcacgccgctcggacgcagcaaaagacacccgtaataggcgcccaccttccgattcaacggcttgaccgttttctttctgatcgtgtcgaagcccaccacctctttgagcatttccagataatgcagcacgtgcgtttcgcctttatacggctcgtcgagcccaagataattattcgccctcgacgagatgtccgcgtcgatgcgcatatcttcgttggtgcgcttgatgacgttgtgacacgcggaacagagcgtgagaagcctgccgccgtgacgcttcgcgtaatcgagcgcgcggacggcggaaagcttgggcgcgatctcgtctttcgccatgggatacaccgcgccgcagcactgccaattttctatttctaccatatccacgccgagcgccgcggcggaaagacgggcgtaaacgtccagatccttcgccttggttttcagcgtacagccgggataataacaaatttccatatcgctaccttttcggatactcagcggacaaggagccttaccatttttcagactcttttcccgctcacttttggggatgcgccatctcttcgggacggaacacttcgtcgaacttctccgccgtcaaaaatcccagcgctacacaggcttcttttaaagaaatattttccctgtacgcttttttcgccgtcttcgccgcgttttcatagccgatatacggattgagcgccgtgaccagcatcagagaattatagagattatgcttcatcttttcctgattggcgcggattcccgtcacgcaatttttttcgaacgatgtgatcccgtccgcaagcagacgcgccgattgcaggaaattatagatgatgacgggcatgaacacattgagttcgaaattcccctgcgaggcgcccataccgacggcgacgtcgttcgccatcacctgcacggccaccatcgtcatcgattcgcactgcgtgggattgaccttgcccggcatgatggaagagccgggttcgttttccgggatgaaaatttccccgagcccgtcgcggggtccggaagccagccagcgcacgtcgttggcgattttcatgaggttgcaggcaagcgcctttaaagcgccgtgcgcgaatacgagatcgtctttcgccgtgagcgcgtgatatttattttcagcggtgacaaagcgttttcccgtcagtccgctcacttcttccgccaccgtttcggcgaagcccttgggcgcgttgagtcccgtgcctacggcggtgccgccgagcgcaagctctttcagccccggaagcgcgagcgcgagctgcgccttcgtcttttctatcatgtttctccacccgctgatctcctgcgagaacgcgatgggaacggcgtcctgcaaatgcgttctgccgctcttgacgatcccctcgttttccgcttccaatctcttgaacgtgtcgatgatcttgtccatggcggggaagagcttatcctctatcgccacgaccgcggcgatgtgcatggcggtggggaaagtgtcgttggagctttggctcttattgatgtcgtcgttgggatgcagtacctttttccccgccagctcgttgccccgattggcgatgacttcgttggcgttcatgttcgactgcgtgccgctgcccgtctgccagacgacgagaggaaagtgctcgtcgagcctgcccgcgatcacttcgtcgcacgcggcgcagatgagcttctttttttcttcgggcaaaatcccgagcttataattagccagcgccgccgccttcttcaaaattccgaaagcgtgcgtgatttcccggggcattacctccgtgccgatctgaaaattctcgtggctgcgctgcgtctgcgccgcccaatatttatccgcggggactttcatttcccccatcgtgtctttttcgatgcgatattccatgttctttctccgtcgctgcgttattttatgtagacagacctatcagatattcagctgcgcgatcacgcccttcaagacctccgcgctgtgtctgaacttcgcgagctcgtcgtcggacatcttgggggcaagggtagtctgaatgccgttgttgccgagaacgcagagcgtgctcagacacacgtcggaaatgccgtattcgccgtccagcatggtggaaagggtcatcacggtgtccgcgcccgaatagatgctcttgatgatatggcagacggaggcggcgatgccgtaaaaagtagcccctttgccggcgatgatcttcccgcccgattttctcacgtattcctccacctcttcatgcgtatagggcgtgatgggaaggatcgtcttattcgtcaacgcgtcgtcgtaatcgttgagggggattcccgtgatatccgccgcggaccaagccacgaaggagctgtccccgtgctcgccgagaacataagcgtgcacctgcttttgattgatggaatagagttcggaaaggcgggttctcaaacgaatggtgtcgagaatggtgcccgagcctaaaacctgccccttgggaagcccggtgactttgctgaatacatacgtgagaacgtccacgggattggcgacgatgacgtagatggcgtcgggcgcgtgcttgacgatttccggcgcgatcgtcttgatgatatcgacgttagtctgcgccagatcgatgcgggactgcccgggctttctgccgatgccggacgtgacgactacgatgtcggagccagccgcgtcctcataggagccttcgtacacttttgtgggagagaggaagggcgtcgcctgcttgatgtccatcgcttcgcctcgcgccttttcccgattgatatcgataaagacgatctccgaaacagaacttgccaccaccagcgtataaccgatggtcgcgcctacagaaccggcaccgataatcgtaactttgttgttcatacttgtttattctccgtatgttaaattttttctctttaaaaggcattcctttcggattcagaccgtaaaaaaaggcggtcaaaaccgcccttcgccgacatggccgtccgggcacgcttttgcgtttactctctcgaccttttcccctcaccatgcgaaatatattatatcatatttctttttaaatcacaacaacttgaaacgcatatttctgaatttgacggaaatttttacttttttcggcgtttcccgacttttttcgcgttaacaaaagacacaatttatgaacgcaaagcacacgctttggaacatttgcacaagcgataatttttcgcgctttttttatcgattaagtgctttatagttcgcagaaaacaatcaaaaaccttacggcgccgggaaaaaatttttccgtgtaaaatccttgtaaaatatcgggtatttccttatggcaatattctccgactctgcttttactcccgattcaccaatttttattatgcctaatcaaagttctttcggctgtcccggcgagcgacttttttcccgccgcacgagtatcgaatgagtttgccctataataaaggcggggaaaaatagagccttccccgccttttggtttgccgcaacaaatttttattttcggctttttaattctttttaaatgcgtttgccagcatcaaagcgccctcgatgatggtgaagatacccgccacgataaacacccagcgaagggttgcgccctgattgaagaacaggaaaaacgcgatgacgatgcagacgatgggcgccgcgtaggcaagcacggtgtcgatgactctcgcgcccttgactttcagtttgatgcgcgcatacagctgcaaaattccgtaaatcagcaagagggcggcgacgatataaagcactgcgctgaccagtacccagccgcacaggataatcaacgcgccgacgacgatttttacgaccgcgggcatcaccatcttatcgatgagattgagtatgccgcttacgatgagcacgatgccgagaacggtcatacaaatctctacgatcctattgggaagcacgacgagcaggatccccagtacgatcgtcagcaccgcggaaacgactttttccgaagttttcatgagttttcctccgagttttgattatattttattacttaatattattatacacgaattttggcaaaatgcaacggattccgacaaatttattccacacttttcaaagattctatcatattgattcgccctatgcttttcccgaacgccagattgatggcaaacgaagtgaggagcgcgagcagcgcggaatagacgtaggaaacgggtttcaaataatagagaaagctcatgatctccaccttgttgatgctcagcaccagataagtgacgggatagccgagcgcaagcccgaacgccgtgccgatcagcgtcagcaacatgatttcatagaggagagatcgggcgatcttccccctcgtgaagcccagaactttcagcgtggcgatgtcccgcgtccgttcgtttatgttcagaagagaaaggttgtataaaacgaccacggaaagcagaatggcaaatatcatgagcgtatatttcatggcgtttatcgaggcgaccttttcctcgacgtaatcccatagctgcgcgacgctcgacgcctgcgcggtgccgctgacagcgtttattttgtccaggagtccgtccgtcaccttttccgcctttatccacgcggaaggcgtgccgtatacctccccgaattgatcggtatgcaggaaaactcccttggtaatcgcggaatcgacgatctcgtccgccgtaaactcgaaagtctgagagccgaagaccagacggaattttcctccctttttaagattcaaaaattctgcgatcgaacgggacacgaccacctttcccccgccggtatcgatagtcgtcatcttcatgttttccccgaaattatacaccttgatatctttgccggcctcgtcggtggatgcggtcatatagtgaatggtgtacgtttcaaacgcctctatctctccgtcgtccgctaatttttgcatctctttttcaaaattttccgaagaatacggcgtggaaatatcgtaagtaaactgcttataaagttccgtgcgcaggctgttgtccacggtatctccgatgccgaacgcgcacatgagaagcgcgacgcaacccgtaatgccgatgatggtcatcagcgcccgcacgggtttgatggcgatattgcgcgccgccattttcaaagacagcacatggtcctttcctcccttttttcgcctttccggattcgacgcctctgcgcgatcgggaacttccggggaggggcgcgcccgacctttatctctccgcttgctcaatttgagaaagaaattgtccttgggtacgacaggacgcatacactccgccggactttccctgacgacgccgcggcagacgaggacgctgatcagcgccgccaagagcgcgacgagtcccacggataatagactgccgagaatatcgaaggacgggagagcgggaaacggcagactgtatacgagctgatattttaccttcatgacattgggcacgatgaagggaccgatcgcggctcccgccagaccgccgataagacagagaatgccgccgaagcttgcgtaatggcgcaggatctctccgcgactgaatcccagtcctttgagagttcctatttcggtgcgctcctctaaaatcaggcgattgaccgtggtgagaatgacgaatacggaaaccaagagaaagatgacgggaaagacgtacagcatttttcggctttgggaaacttctccgtccagcatcacgggcgtttccatactgtttctgtcgtagatgaaaaggagattatcgtttcccgaaaaatgttcgcttatccgttccttgaccgcggcgggggaatccgtctttatcaacgcctgattgtaaaaatcggacgcctgtatcttcataaacgggaactccttttttgcgagttcctcgaattttgcctccgtaatatataccgccatcgccgtggagctcaccgcggtttcgggaaagttcataaatccggtgacttgcgcgggaagactcacctgataggaagaggaaccgacggggacggaaaccgcgagcatgacttcggcacctatggcgatgccgttaagctgcgcggtcttttcgtcgatgagaacgcccgcctcccctttcagcaagacgggatgggaaacggaagtgtccccgacgtaaattttcgagctcttttccccgaacgtcccttccgcgtaaatacggtattccgtcttttctccgagcgcagagaaatactctttatcctcttccgtgacgttctgcatctgcacgcagagatcgcaaagatcggtggaagcgaaataactgtccaccgcctttttcagcgtcttcgtattggagagaaagccacagaacagcgtcactgcgagcatggtgatcgctatcatggaagcgaactgcaagcgattttttttcatttcgcggcgggcgagccgccgaaggatttttcccgctttcatcaccagtctatctcctcggacgctttcggagaagaaacgcgttcgtcgctgacgatgcgcccgtccgacagacggaggacgcggtccgccacctccgcaagtttggcgttatgcgtcaccaccacgatggtcttatctttctttttggcaagggacaggagaagggatacgatatttttgcccgttcccgaatcgagcgcgcccgtcggttcgtcgcaaagcagcagcttgggatttttcaccacggcgcgcgcgatggcgacgcgctgctgttctccgcccgaaagctgagcgggaaaattgttcatccggttttccagtcccaccagccgaagcgcctccgccgcgtccatgccttcctcgccttccgagagcgccacgttctctatcgccgtcagattctgcatgagattgtaaaactgaaagacgaaaccgatatcgtttctgcgataggaaacgagttgtttttccgtaaagcgcacgatgtccctgcccgcgatttcgacgctgccttccgtggctccgtccatgccgccgagaatattcaaaagggtgctttttccgctgccggaaggccccaggacgacgacgaattcccccgtttccaaagaaaaagaaacgtcccaaagcgccgtcacatagttttgttctccgccgtacacctttttcagattttttacttcgatgttgcccatgattttcaaactccctcactttttccttttttccgcaagagcgggaaccgcccgaaaaggcggttgcccttttcgcttacgaaaaacagcgcgtaaacaatcgacctttttcgccgtttcctatgtcatcttttcacgatatacacgggatacgggtcgccgcggtgataccccagcttttccgcgagagccaaagatctctcgtcgtgcgcgtcccagctcggatacaatttccttttcaggcattcttcgatgagagccgcaccgcaggcggaagccagtccttgtttgcgatgcgcgggatgagtgtcgatttcaatttctatcccgcccgaccacgccgtgtaggacgacgcgcccgcgacgggaataccgcccagcaaaacgactatccccagccccttcgcgcgatattcctcataggaagaaaacgcgccgcataagtatttcgaccattccttgctgccaagcctctcataaatttcctcatcgataagcttcaaacagtattgcgcgggcaaagcctcgataaaaccgtttaacttctccgaatcgaaaacgtttccttccttttttacggcatagcgaaaacggcgttctccctttgcgcccaggaccttttcgagagttttgccccattcttttccccgcgggacaaaaacggatgccgaaagagagttcaacgccctttctatcagcgcttcgtcgggcttgcccgcaaagaagcaaaaatctcccgccgccgcataggcggcttgaggatcttcgtcttcgtcggcggcgagtatgcccatcgccccttccaggcagctgtaaatgatcgtttcctccgcgccgttaaacagattcgctattttttctctgttcattctttcctccgcagccatccgctatttaggcgacggcgtataacggttcccgatatttttgcggattcggaaaagaagtccgattttcagagcgatcgttcccgacaccgtttagaggcaacagttccccgatttccataaaataaccgccgccaatcccctttttaaatctctttttcaaacaaaaaagggctttttccccgaaaaaaggccgcactatcccccttctcttgaaaaaagccgaaatttcttatctgccgcgcggcggtcccgccctccgcgcttatgcgtgcccgcgcaggatcgcaatgcgtatatacccgctttgatagcggtgcgcggcgcgcgcgcagggatacgtcggctcctttttgcaacagctgcaaaactcgtatgtaccgcacatatcccgcccctctttcatgctgtcaaaccatttgatctgatcgaatttatcctgttccgttttaaaatccatgcttttaacgcctcccgatgattcttttaccgcaaaacttctctctttccgatcttcccttttccgtatgtatctattataataaatttcgacaattttttcaacacttttacgcaaaaaaaatgtaattttttttacttttccgcgcatattcttaaaatttgatttttcttccccgttttttcccgtacgccgtttttttgacgacgtttccgtcttttcggcgcgtctaaaaccaagtgtccgtatcggcacacaaaaaccgcggcagtaaagccgcggtcggatagattcggtttttcatcatattctctcagttatgcgcctttgcaaccgaagaagttgcaaagcgccattaaccaagcctatctcgcgtatttcggattttcgcggcaaagcataacctgttcggcgcctttcccgacgtccgtgcctgccgacggaaaaacgaaccgatttccctcgcgttcccctttccttgcgatttccgcttttgtaacaatattgtattatatgcggcgacggggaatttatgcgcttaaaatttccgattttttcaaaattttcagaaaaattcgctgacgcgcagattgctcaggatttcctcgtacttatccttggtgaaagagatctttccgaaggtcgtcaccgtggcggtccccgccgcgacgcccgcgcgcagaatatcgggcaggggagcgccctgctccatcagcatcgccgccgcggccaccatgccgtcgcccgcgcccaccgtcgaatttacggcgacgtttatactcttgcaatagtaatgattggagccgtccgtgattacggcgccgtccttgccgagagataaaagaacggtctttgctccgcgatccaaaagttccctgcatcccgcgagcatatcttccttatcgacgatctcccgacccagcgtattttggagttcgtcgagattgggcttcacgagatccacccccgcgttcagtgcggcaaacagccgcgcgccctccgcatccacgattttcaacgtcttggaatccacggcgcggaaaagactgccgtaatattccgcgtccacgccgcggggcagaccgccggaaatgaccgtcacgttgcttcttgccgagagcatctgcaccatattcaaaagctcgttcgtcttgccttcgccaacctcttcgccgacgtcgttgacttcggtgagcatggatttattgtcgatgaacttataattctcgcgcacccgccctttattccagacgaacgtaaacggaacgccctctttatccagcgcgttttcaaacatatagccgttttcgttatacataagccccgtggcatacggttccccgcccagcctcgccacgccgatcgcgacgtttaaagccttgcccgtaaaggaaagcgtcttgcttttgacgatattcgtcttgcctacgttgagagaatctaactctatggtaatgtccgtgcagggactcaaacaaacggttaaaatcataggaacggctccttcccgccggcgggaaaaacaatccgtccgccgaccttacctattatataataaaaagataaaaatttcaataccaaacggaaaaatttttggaaaatttttgtcgtaatttgcttttgtatccttcttatccgaatttcccttcaaaatccctcaaaaatgccgaccggcggctccctcttttcggcaaaaacgccgtcggtctttttccttaaaaaaacagcttccgaaaaagaagctgttttttccccgtgcgcttttcaaatcgcctttttacgcatcacatggaaatcatctgcaaggtttcgtaaagctcgtaattgaactcctttttcatagaaaccgcctcgatgatgtccatatcgataatttcgtttttacggatgccgaccgcgcgattgcccacgccctcgttgagaaggcggacggctttattgccgaactgcgccgccagcattctgtccgccatggaaggcgagccgccgcgctgtacgtgtccgatacacgtgggacgcacggaataggtcgtcacttcttggagctgcttggcaaattgctccgcacccatcacgccttccgccacgacgatgatattggaatgcttgccgctcgcgcgcgaacgattgattttcatgacgatatcgtccatatcgaaagtgatttcggggacgacgatgatctccgcgcccgacgcgatgccgctgtataatgcgatatcgccgcagtgacgccccattacttccacgacggaaatgcgctcgtgcgaagtcatcgtgtcgcgcagcttgttgatgatgtcgaggcaggtattcaccgcggtatcgaaaccgagggtataatctgtgtactgcaaatcgttgtcgatggtgccggggataccgatggtagggactccgaagccgtcgctcaaatcccgggcggaaagagccgtcgccgccgatgacgacaaggccttcgatccccctgtttcccaaagttctgacagccttttgctgtccttctttcgtcagcatttcaaggcatctcgccgttctcagttttgtgccgccgcgctgcacgatgtcggaaacgctgcgcatttccatgggaatcacgtcatcttccaaaagccccgcatagccccgctctattccgtatacctccatgccgtaataaatcgctgtcctgacaacggcgcggatagccgcgttcataccgggagcgtcgcccccgctcgtcaataagccgattcgtttcatagtgtgatcctccgtcagaatgtatttataaattttaaattcgttctttttttgatactgtcgaaaaattatccgtcaaatttcccacttttcattcggctcatgaacgccattccaatatattataacaaatctttttgaaaaaacaaagcctttttctatgctttttcaaaaaattttaaataagttttatacaatcctcccggaggaaagaggagagttccgccatcagcgcctttccgggatttaccctctgcgagcagagcattttttttctgtcccggacaaaatacacgggcgtatccccttgatagtaacacagcgtttccatcagttcgtccacgtcctcctgcgccatgccgctgattttcagccacagcgtcttttctttttcttccttggcggcagcttccgcggcttcgcccgttcttgcgttttccgcatgaggcggcttttcctgttcatcgatgcggaactcggacatcctgtccacgatgatcgtgggcgctttttcctcgttgatatcgatttttccgctcagcgacaccaccgcgtccacggcgaggaagctcttgattctctcgtatacattggggaagcagacgcactccaccgtgccgtataaatcctccaccgtcacgaacgccatgaacgaccccgaacgggtctgcaactttttggtggcggcgatcatgccgcccatcgtcacctgctgaccgtccgaaagctcggtgtacgtcttgacgcccgtttcctcgtcctccatatattcggtgagcatggagcagttaaagtttttgtctttgaaataggcgacgtatttttcaaaaggatgcccgctgacatagacgccgagtacggatttttccttggagagcttttccgtctgctcgtactcgggaatatcgggatagacgatttcgaggctctgttcctcgatgatgtccccgaagagggagatctgcgcgcccgccttctgtttgtccatcgcgttgacgcgagtgatgacctcgtcgtagaccgccgcaaactgcgagcgcgtatagccgaagcagtcgaacgcgcccgcatagatgaggctttcgacgatacgcttgttgacgtgcttggcgcagcgaatggcaaagtcggcaaaatccttgaattccccgttcgcgttcctctcctcgatgaccgcctcgatgggcgcctgaccgacgccgcggagcgcgccgagtccgaagcgcagcccgttgccttcgaccgaaaagatcgatttcgatttattgatatggggaggcagaacgtcgatgttcttctccttcatataggcgatatacttggaaatttcctctatcttatcgatacggtcgttcaaaatgcccgcaaggaattccttgggatagaaatatttgagataggcggtgcggtaggcgacgacggcgtaagcggcggcgtgggatttattgaaggcgtaagaggcgaagctttccatgtccgcgaatatctttgcggcgacgtcggcgggaatcccctgcgccgcgcaacccgtaatgttgcccccctgcgcgatgtcgccgaaaataaacttgtccttttgcgccatcagctcgtccttgtgctttttcgccatggcgcggcgaacgaggtccgcctgccccagcgagtagcccgcgagcttttggaaaatctgcataacctgttcctgatagatgatgacgccgtaggaatttttgagaatgggctccaagagcggcgtgtcgtaaacgatctgatcgggatgattcttgttgcggatataggtgggaatgaaatccatgggacccgggcgatagagggaaatacccgcgatcagatcttcaagacagttcggctgcaaatccttcataaaccttttcatgccgccttgttcgagttgaaacaccgcgtccgtatctccggacgagatcaactgatacgcttcgggcacgtcgtagccgatttcattgaagtcgatatcgattcccaatccctctttgatatagctgagggtattttgaatatccgtaagagtcgtgagggcgaggaagtccattttcagcattcctacggcttccacttccttcatgtcgaattgcgtcacgatgtcgtcgccgtttttggcgaggggcacgttgtcggagagcaccttgcggcagatgacgacgccggcggcgtgttcggaggtattcttgggcattccttccagctttaagcccatatcgatgacgcggcggagctcttcgttcgtttcgtacacctcgataaactcgggattctttttcttcttctgttctatcagatccttttccgtttcaatgcgcttgtcctcgggcagggagggatccgccagcttcttttcgtacttttcgatattgaggcccagcagctcgcgaatggtggattttccgtccatcagcttcgccaccttatccgtatccgaataaggcacccccatcaccctgcctacgtccttgatgacggctcgggaagcgagcgtaccgaacgtgacgatctgcgccacgttttcgggatggtatttgcggcgcacgtattcgatcgtttcatagcggcgcttcgtgcaaaagtccacgtcgaagtcgggcatggaaactcggtcgggattcaaaaaacgctcgaaaatgagttcgtagcgcaagggatcgacgtcggtgatgccgatggagtacgcgacgatactgccgacgcccgagcctctgcccggccccacgggaatgccgttcaggcgcgaccagttgatatagtcccagacgatgaggaaataatcggcaaatcccatcttgatgatgattcccagctcgtactccacccgctgcttgatggtgtccgtaatgtctttatagcgcttgggaagcccctcccacgtcaaacgggtgagatattcgggcgacgtggagccgtcgtcgggcgtatacagaggaatgagcgacgtgtcgcggatgggcgtgccgttgggttttaaatcgaaaacgggttcctctatcttatcggcgatgacgcgggtattggaaatcgcttcgggaatatagtcgaacagcgccgccatttcgtcgcccgtcttcatataaaattcgcgcgtttcgaacttcatgcgcttgggatcggcaagcgtctttttcgtctgaatgcacagcaggatatcctgcgcttcccaatcctctttgtaaatgtaatggacgtcgttcgtcgccacaagctgaatatccagctcccgcgcgatctgaatcagctgcggaatcacctgtttttcttcctgaattccatgatcctgaatttcgatatagaagtcctcgccgaagacgtccttcatctccttcgcccattccttggcgccgtcgtaatctccgttcaaaaggagctgcggcatacgccccgcaaggcaggcggaaaggcagatcaccccctcgtggtgctctttcaaaagcttatagtcgatcctcggcttgccgtaaaatccgtcgatataggacagggaatcgagctttacgatattcttatagcccgttttattcttggcgagcacgatgatgtgttccgtctttgtcccggggcgcttgtcgcgatagtcgtccgtggcgtaaagctcgcagccgataatgtatttgatccccttctttacgcactcctcggcaaaatacaaagaagcgtacatattgccgtgatcggtgaccgcgcagcagtctatgttgtttttgacgaggtgatcgacgaggtcgtccactttggcggctccgtcgagaaggctgtattccgtgtgtaaatgtaaatgtacaaaatccgtcattttatcctttccgtttccgttaattttttatccgtttcaatcccgcttaataaatccgaagaaaagaggcgttctgatcgccgctctctcccgtaaaattttaccgcaacattttccgtttcctatttccgaaaggctcttgccgagatttcctctatcttcctcatgcggtgattaagacagcttttgcttattcccaaacgctgcgcgagttcctttaaggaaagagcgggattgttcagacgcgcctcggcggtttctttaagctccgtttccagcgaatccagacccgacgtttcctcgatggcgcgaatggcgagcacctgccgtaccgcagcggtagccgatttgtccgcatttcccgaaaaacaattcgccgcgcgattggagttgttcgcttcgtcccgcttctccaccagatgcgaaaactttttcagggcgtttgccgcgccgaccacggacaaaaaatcggaaatcgtttctttgctcttgatatagacgacggcgcagccgtttctctccaccactttcgcgagcagttccgcgtcgtcgagaagtctgcgaaaatcgtccgccgcgcgcttttcgggaaagacgaattcgaggtgatatcccgtctttccgccttcctttccgggcacgatacagctcccgccccccaaaaacgctcctttgatataggcgagcgcgcattccttgtcggcgacgagctttttcaaaattccgcaggaaaattcctctccgcccctctttaaaagtcccagccgagcgagaatttcccccgaatgttcgacggggcattgcagcaccagcttgtccctgccgctcattttgtccatcgacgcccgcgcgacggagagcgtttccttaaaagcgctttcgaacaggtccataaaaaattccgccacgttttccgtttcggtgacgatggaaaaaacgggctttccctctcggaaaaacaattgtccgctcgtgcgcacgaaagcggacagagctgctttttccgctgctccgcccgatatgccgcgcgctatgatttctttttttacgtccgaagtaaaattcattatccgctcctctcagagcctcttctctcataatcaagccatagggaaacgcagcgcaaaaatgcggcgcgtttttgtatttcccctctattatctcacacttttttcaattgtccagcgttttccgccaacttttctcaaaacgacaaacgtttgtttctatttaacggcgataagttcctttaactatgacatacggatgcctgttttaaaaacaatctcgtcgcgggagcgatatgcgccgaagaaacgctcacatatgttttttaaattccgcaaagcggaaaacggctaacctgccgtcgatgttgtcgatgcgttcgggcggcacgtgcacgcgcgcgagctgttcttccaccagcttcgtatcccctaccctgtccacggaatgcgcgtccgaatcgacgacgaatctgacgcccgtttcgacgaccgcgaacaattcctcgtccgtcaaatgcacctttttggaattcagttcgatatacgtcccgtaatcggcggcacacttcgccacttccgccgcgtcggcggggcacacgtaattcaaatggctgacgatgtccacgggattttttttgatcatattgatataggcgcgcgtattgcgctccacaagcgctttgggcggtctgcgcccgaatttgtccacggtgaagttgccgccgaaatagtgccaccaatcgccgaacgtttcataggcgataaagacgtgcttgccgcagataaaaagatcgaaattttcataatccctttcggtgagatcggtcaagccgcttacgccccgtatattcgactccatgcccacgaggacgtctatgccgagtttttcggaagccgcccgacactccgcgatgagcgcgggaactctttttcttctcagcccgaacgcgatgtgcgaaaagccgtgatcggtgatgccgatctgtttgagcccgagctctttcgcgcgcgccgcattttcttccacggtgcccttcccgtgagaatagggcgtgtgcgtatgataatccgctgttaaaatcatgcgtgctccttttgttttttactttttcatcgatgtccgttaacgtttcccttatgtaccgcgaaaaagctcttatcctcagttcgcgacgtattttccaaagcgccgccttcgtaccgttttctttttgcggcgcccgcctttttaagcctctgcgcattcccgcattcgtccccgcccggtattctatgatttcataggtaaatacttttcgcctgtcacagggggcggcgactgctgccggagagaatttttgaaacgctcgtttcagcgtatgtatcttatttcttcttccaattccacgccgtattgggaaaaaacggcgtttttggcgagattgacgagcgcgtgcacgtctgcggcggtcgccccgccctcgttgaggataaaattcgcgtgtttttcggaaatgacggcgccgcccacctgcaagccttttaaccccgcgccttcgatcagtttccccgcgaattcgcccggaggatttttaaagatgcagcccatgctccgtcccttaggcagctttttcctcgcggcgacgtattctccgcggcggcgggcaaccgtttctccgtccgcctcctccaatagaaaggatgcgcccagaacgacgcttttatccttcataaagacgctctgtttataggcgtacccgcattcctctttgggcagcacgcggatccgcccctctttatagacgagcacgctttcgagaatatccgcaacgtatcttccgcccgcgcccgcgttcatgaataccgcgccgccgatggtgcaagggatacccgcgagaaattccgcgcccgtcctgccgtgcctttcgcaggcgtcgagaaaggttttggatttcacgcccgccatggcgaaaacggactccccgataccgatggatttcagctttcccataaagacgacagccccttcgaacataccgtcggagggcagaacgttcgtcatattgcccaaaacgaaaaaattgacgtcctctcttttaaaaatatcgatgaggagcaaaagttccgcaagattcgcggggtaaaacgccgcacgcgcaaagccgccgcagccgatggagcaacgagaggcaaaacaaaaaggcgcttcgtgttctattcccgaacattctttggtaagcaaacgggtccaatcgctcaaatttttctctcctttattttagcatatttttttgttttttgaaagtgtttcaaatcgctttcagaaaattttttaaaacttcggtatttcctaccgacagggaatttttcgccgcttcgttcgcttcctttaaaccgctcggagaggtaaacacattcagcgtatagcgcgcgtttatcttttccatttcgtccgcgagcgcgtcgtctgccgtataaatatcgtatatcggactgaacatcccgatctccgtcagtttcttctgatttttttcgttcaaaaggctctctacgtactcgtcgcagatgcgtttttcttccttatcttccgtcaaaacggctatgtattgatagagatccgaaaactccgccagcggtttcatatagacgttgacctcccgcgccgcgaaacggcagacgtcgcgctgcgtcccgagaaggtatttatatttgccgtttaaaaaacgcacgtaagcggtggtagactcttccgcgacgacgttgtttcccggctgtaaaaacgccgcggcgacaagaggcaaattgttgccgcccagggaaaccacggtgttttccgctttgatctcctcaaaggcatcttccaggcaaaacactgcgtatccccctttgcaccaagggatcgcgcggcattccccgcccaccgtgccgccggggaaatttctgccgttaattttcaggcacttttccgcagcctccgaaaatcccacgccgaaggaaatcatatcagggtaattgccctccgcaaaggcagcggcggctccctccgccgtataggaggacaccatgacgtaaacgcccggatgcgctttctcataggcggcggaaacgcggtttaaaaaggaggtgcgggagccttttccgccctcgaaggtatctatattccaaaggcggactatccccgcgcggggagaggaggcggaggtcttttctttgagggcgggaaaggcgtaaaacacggacagggcgcagaatacgcccgccagaagaaagcacgccgcagtttcgatgatgcgaatttttttcataacttattatatgccccgctcgttcgcctcattcccttccgcctcgccattcgtgccgataaaaaatccgttttcttttccctctcttagtgtatccatgtgcggaaaaagaaagcgccgtttttccaaaaaagaaaacggcgataaaatttctataaaaaagagagcttttcggacctaaatccgaacagctcccccttatatataaaggcggaaagacgcacgcggtgcatttccccgccgatagatacagtatttgccgccagggaacggactataccgattttataaaattccctccattttcctcttcttccgcttttatccgtctttacggataaaaagaaagcgccttttatcgcgatccgcaggcttgtgacctttctatatttttacttcttcccgtctttaaagattcggacaaactacgaaggcaaaatcggggatcgcaaaaaggcagcgcgtttccccgattttcgaaaaatctttccccatcaacgcttaaaaaaacttgtgccgaaaggtaaacggacttttaaacggcagtcgctttttttcccgcctcgctttccggcaaaaacgccgatcccgccgcgactgtccctcctgaaatcaaattgtttccgcttaaactctcaattgctgcttctctataaagccctttcgcttttgcgcgcgcccttcctctattcctccgaattttccccgtcttttttttccagttttttgccgcggatgtccaaggaggcgagccttgcgtcttcgagcatgattccccgctgcaccgtttcgtagccgtatttttcccgaagctttgccaccgccttttccgcgcgctcgctcttttcgtaatttctgcccaaagcgcgcgtttgtccttcgcttgtgcaggacaacagatccaattgctcgacgtgataatcgaagcccgacacgctgacgcccagcatatgcaccttaaaaccgggaggacaatgcaggcagaagagttcgaacgccgcttttgcgacgtccccgcaaagcgccgtcggcagcacttttttctgaaaggcggaatcctccatatactgattgcgcacgacgacgtgcaccctatccgcctttcccacgtccgcgtcccgctgccgcgccgtcacgctctccgcgagcgcgtaaaagaaccgtttgatctcctctcgatcggaaacgtcttccggcagcgtcatggaattgccgatggatttcagatcctctttgtccttgccgcatttcacgggctcgtcgtcctccccccgcgcgtatttcagcagttgtacgccccgttttccgaaaagcttatagagcaatttctcgtctgcggccgccagctcgcctatggtacgaattccgcgggcgcccagcgcttccgccgtcgccttccccacaaacaacaactctgcgacgggcaaaggaaagaccttttgacggtaattttcgcgggagaggaccgtaaccgcgtcgggctttttcatatccgacgccagttttgcgaaaaccttgttgaagctgacgccgacggaaacggtcaaacccagctcttccctgacggcgcggcggattttttccgcgatctcctccccgctcccgaacagggcgacgctggcggtcatatccagcgcgcattcgtcgatgctgcaagattcgatgcagtcggtgaaacgttcgtatatcgcgcgcaccttgcgggagaatctcttgtattccccgaaatgcgtttccgaccgcagcacgtgcggacacttcctcagcgccgaagccaccgtttccgccgttttgatgccgaatttttttgcctcttcgtttttggcgaacacgacgccccgccgctccttcggatcgccgcagacgatcagcggcttccctttaaattcgggatggagcagggtttccaccgacgcaaaaaaattattcagatcggaatataaaatcacccgttccttcactcttcgcctcaaaaaacaaacgttcgtctttttctttcgattatacatcaaccgccgcggtttgtcaatattttgcgccgaacgaaaaaaaggaaaaatgttacacttgcgggggaagtgtcatttcctgccgatacgccgttgacatcctttctttcaaggagctataataacccaaatcacacgaaaacgcggcgcttcgcccgcttttttgtcaaggagttatgaacatggaaaatgtaaaagaaaaacgtaaacttcgcctttggcagagattgctgatcattctgctcgccgtcgtcgtcactttgaccgcggcgctggcaattacggcaggatgcgtctggggcaacgagatctccaccgcggcgagctttaaacagctttgcccccgcgacgacgctcatctggacggctccgtctatcgtatggacgtaaaaggcggtttctacttcgacaaatacatagcgcagggcggcgcgaaaagcgacaaggaactcatcgatttcatcacgaaaaacatcaccaaaggtcttatcgatatgtccatcgacgaaacggagatcggctgcgcctcctttacggcgacgacggcggagggcgacaaacttttcgcccgcaactacgactttgccaaaaccaatacctgtatcgtattcacggagccgaaggacggcagacacgcctccatctcctcggtcgacctccaatttatcggcatggacgcaaatcaggacgtcgcggggctcatgaataaaatcacctgccttgccgcgccctatgcgcctttggacggcatgaacgacgcgggcgtaagctgcggcatctatatgacctatcagggcgaaacgaccactcccaccgaccaaaacaccgacaagcccgatctcacttccaccaccatgctccgcctcatcctcgactacgccgacagcgtcgaggaagcggtggaactcgtttcaaagtacgatctgcacgactccgcgcagacttcctatcactacatggtggcggattccacgggcaaaagcgcgattttggaatgggtgaacggcacggacaaaacggacaacgacggcgccgcccgcaagctcgtcgtcacctacaacgatgacgacgcgaatatcggcgtcagggaaggcagcgcggactatcaatgggtgacgaacttcatcgttcagccggattattacgatagcgaagaggagaaagcgggcctggacagatacgaccgcatttacgacaggctcagcgcaggcaacggcgtcgtcgcggacgagaaagccgcgatggcgatcctcggggaaatcggccgcaggaattggaacaacgacgacggcaacggctgtaccgtccacagcgtcgtctataacctgacgaaaaaaacggcgctttgggtgcccaacgaacattacggcgaagaagcctatacgctcactttcagtctgtaagttttcaaaaacgacaaagagctttccgaaatcctatcgggaagctcttttatatcatactccgccgttttcgccgcccgcgccctccgcatacgaaaacgccgtttaaaagcgcagagtcgttccttcctattcccggatgacgcttcttttcgccaccagatacgtcgcggaaaaatacagaacgtaaatggcggtcatcaccagggcaatacagcccgccactgccaacattttggaagccgccagcatatatccgctcgacgtcatgatctgccgacagatcatacccgaaggaatgctgagaaggataggcagggcaaaagggagaaagaaaaacgaaaaggtctgccgaaagagcgtgcggctctgttcgcccctgtccgctccgaggcggtacaagacctcgtaacggcgcttatcgtccgctatgcccgacaaagtctttaaggcgagaattgccattaccatgaacacgaacaccaccgcgatataaagagccgccacaatgaataccgccgtgcccgcgttgagatccattctcgcgtattccctgatcttataatcgcagtacagataggtgtaaccgccttcatacttatactcgtacagcagttcctctctcagtccccgcgcgtcgtattttcctttttctaaggtatatgccgccccttcgcattccaggctcagcgccgccgcggcttcatcgggaacgacggcaaagaagtaagaatatttcaaccgcggaaatcccttctccgttccccgataaaaatacgcttttccatccgcttccagaacggcggccgaaaagtcgaagttttccacgcgcgcgtcgtcggcgacgattttgaatccccctttcaaatcgatcggggcaaagccgagcgctccgtatatcttattgaaatcgctttccgtcatgaacgtatcgtaaagtccgccgtatccttcgcccgaccacttcgtgaaggaatgcagatagttgttttccgaagtatacgtggaataataaagtttttcctctatcgccgtgtatttttcgatgatcctttccgcttcgtcgaaggggaagggatgcgcttcccccctttccagcgtcgcgctgatatcgaagggataatttttatccagcgtcgcgtcgttgctgattttctgcacgaacgacacgttcgaaccgatgactgcaaaggcgatcaaaaacgccagagcgcccgccagagcggaatttgagccgagttttcccgacagctgacgcaacgtgaaggcatttgtgccgcgatttttaaaacgcttgttttttaagagcagattgacgatgctcttcgccgcgcccgcgtgaaagagaacgatcgccgcggcgagcactgccagcgcgccgaacataccgaaacccgagcctccccccttcatcgttttttctatttgcagggagaaaacgatacaactgccgacgacggcggcgagggataaaagggtgactgccagccaaaaagcgggaaagcggacgcctttttccacttttttatccccgtggatgaggttgtaaacgctcactctttttaaatacagggcggaagtcaaagaggcgagcgcgaaaacgatacaaaccagccctatcgtcaagaaaaagcccttggcggaatacgccgcaaaggcgaattcaatctccatcaaattggtgacgaccgccataagcccctgataaaacagcagtcccagcgcaagtcccgtacccagggaagcggcgcagagaatgagcgattccaggagaaagacggaaaggatatttttcctcgtcattcccagcgtcagatacgtcccgaattcccgctttctgagtttgagcatgaacgaggtggcgtaaccgagcacaagggcgacgatcagggaaataaaaacggtgagcgcgatgagtcccgcgcgcagttccgcaatcgccgaagcgcgttcgagaagctcctcgctgaaaatggcgctgttgacggcaaacatcagcgcgaccgtcaaagaaacggtgatgaagtagatgagatagtttcccacctgccgtttgacattgcgaaaggcgagcttagcgaacatccgcgtcacctcccagcgccgccgtcacggagagtatctccgcatacatctcccgcctgtcccgcgccccttttatcacctcgctccaaatctttccgtccttcaaaaagagcacccgacccgcatagctccccacgacggcgtcgtgcgtcacggtgagaatggtggagccgagagattcgttcatcagttcaaacgtcttcatcagcaatttggaatttttggaatcgagcgcgcccgtcggctcgtccgcgagcaccaaagcgggggaagcgatgattgccctcgcgcacgcggcgcgctgcctttgtccgcccgacaattcgtacggaaatttattcagctgatcggcgacgccgagcgcctgagaaacccgtttcagttctttactcgtttcgtcctcgggcaaacgcttcaaattgaggggcaaaacgatattttcgcccaccgtcagcgtatcgagaaggttgtattcctgaaacacgaagccgagcttatcccgccggaaggcggataagtcgtcctccttcatggcgcaaagatttttcccctcgacgagtatctcgcccgaactcaccctgtcaatggtggacaccacgtttaaaagagtgcttttgcccgagccggacggtcccatgatcgccacgaattcccccttgtccacggacagggaaatgccgtccagcgccttggtgactacggcgcctccgtaatatttggtaacgttattcacttcgagaatttttctcatgtcttgtgccgcgcgtctttgcggcatacctcctttctatgaacttcgattaccatcataccataaatcggaccgtttctttctaacgccgccttttccctcccttacgcttttgtaaggatgtcctttacgtattcagacagcggaagataagcgaaaaacgggtgccttttcccaatgcggaatctatctccaactcgatctccaattttttacagagctcggaaacgatataaagccccatacccgtgccctccgcgcttctgccgcccgcgcccgtaaaccctctctccgtcacgcgcggcagctcgtgcgcgggaatccccgggccgtcgtcttcgaccgagattcgcccgttttccgccgagatcctcacgcggcatccgcggcagtatttcgcgcagttgatgagcagctgttttaaaatgaagcagacggattttccgtccgtatgcacggaaaaatcccccgacgcctccacgccgatcttcgcggcgaccagcagctccctttgactctggattgcttccgcgacgagcgcggccgcgctcgtttctccgattctcctatccttttccgaacttctcagccgcgcgtaatagaggatggtttccgtcagattatcggcgcgctttaattcccgtttcagcttggaagcgtccccgccgttgtcgaggatcaaggagcaggcggtgagaggagtctttatctcgtgaatccagctttccacgtattcgcaatactcctctttttcccgtcgcgcattctccgccgcaccgatcgccgcgcgggaaacttctcccatcgcctcgaaatattccctctccacggcgtcctgaggccggggcaggagctcgcccaaaagatatttttcttccagtccgtccttgatcttttccagccttttcaagcgcttgcgggcgccaaaatagccgacggagagccacgccgcggcaaagagcacgaaaaataattcgctgccccaaaggagaacgccgcccgcgcccgcaaaaaaagaaaagatcccccaaaggatgcaggcgaccgcgcaaaggcacagccccgccgctttggaggcgagatattccttaaaactcataagcgataccccacgccgcgcacggtacggatgaattcttccgcgcccagcgattttagtttttcgcgcaggcggttgatattcacatacaacgtattttcgtccacatagaggctgttgttccaaaggtcctcgaaaatctcctccttcgtacacagctcctttttcatcagacaagccagaatcctcgtttcgtttttggttagttccgctttttgcccttcgaaagacaccgtcatatccgataaatcgagcgtcagcccccgtacggcgacgacggaaaccgtctgtcttttcaaaagacgcgcgatgcgggccaagagcacggaagagttatacggttttctgatgtaatcgtccgcgcccacgccgaaaccgagaagctcatcctccgcggaggaacgcgccgtcaaaaagatgacgggtacgctcgactgcgtccgcagtctgcggcaaagttcgaaaccgctttcgttcggcagattgacgtccagcagcgcgagttcgcacggcggctcgtccaccgttcgatatccgtttgcccgcagcagcgttttcagttcctcccgtatgctctcgtcgtcctccgccaccaagatcctgtccatgtcttttgctcccttttcacaaagcgcgccttttgcggacgcgccgaatttttgcgttcccttcaaccctgcccgcccgctttgcacgtccgttccgcgtcctctgttttttattccgaaacgcggagctcacttctttcttatcggttcccgaatgacggtctttaaattttccgccttgcatttgctcggatcgctcagataaatttcgtgatgcctgcgctgccccatatccggagtatagccttcccgctccgcatattctttcatcaggcgaatcgtttgaggctcgtcgtagggaccgaggtgcatacactgtacgcaaagtccctcgtcgtaggtgaaaaattcggctttggaaaaatccgttccttttttcctcgtcgcctccgccaccgcccaatcgaacacttctttcgtgacgaactcgggcaggcgtatcatggagatccattcgaaatccgcttttctcgaataatcgatgcccgcgactccctcctgccgccaaagtccttccagcggcggaacgacatattcgaaatagccgtcgattttgcgggagcccatgcggctcattttgatcgtaaacgaaattccgtagagaatcccgatcgccgccttatagtccccgccctcttcgttcggatttcctttcccgcgcaccgccacatagttcatcttaggaatttccagcaccgaaggcttatttttgggcagataaaattccttatattcctttttgtaatcgaacgccattttttctcctgtacttttattaataattactgactgcggcgaaaaagcctcccgcggttgcttttgtttagcgcgccgaattttcgagtcctctattctttcctctcgcagacggcgtgagcggcgacgttgccctcgcccgcggccttcgcgtactgatagggacgccccgtgcagtcccccgcggcgaaacaccccttcaaattcgtggacatatccctgtttaccttgacgtgcccgttttccatctccaatccccccaccaaaacggcgggagaaacgctctctttgagcatgaaaataccgtccacgggcaattcttcctctttaaagagtaacttctgcgcccgcagtccgcccgctattcccgtcggcatcctgacgattttttctatattctcctttctcaccgcaacatttttatagagcggaatgagatatactttcttcgccaagtccgcaagatattcgatctcgcgttcgaatctttcggacgtacacaagacggctatggtcttgcctttgtataaaaagccgtcgcaggtggcgcaatagctgacgccgcgcccgataaattccgcttcgcccgggatttgtttcaccgcttcgacgcccgtcgtcaaaatgaccgtcttgctttcaaaggcggcgcccgattccgttaaaagggaaaatttatccttcaaagcgtatacgcccgtcacgcgctcgtccgttacgggaatgtccatctctttcaattgttccttcaaagcctgacagaacgcttgtccgctgacggacgaaagcccgggataattgcggatacactccgccctgccgatcttggcgcttaaatcgggcgatcccaacaaaacgaaactttttccgttcgctttcagagtcaacgcggcggaaattcccgccacgccgcttcccacaacggcacaatcgaacatatcctgcctccctttcctttttcttgcagtatagcataaacgcgcggaaaaatcaattcttccgcgcctgttttttccttagcgaaataaaatttactttgacttttaacaaaacgaattttcaaacggataccgaaaaagaaaaaacttggggagaatcccctgaaaaagcacgcgatgcaattataaaaacacggagggcgcgcgttttttcattcgttgcggcaaagccttttcggacgctcggcagactccttttaaaatggggatttcccttcctttatagaaagtcccttcggcgcgttcttttttcacgctcggaaagcgagtaacagcgccgcccgcgttgatagaaaaccatctgtcctttgacaaacgagcgctcaaagccctctctgctccttcgaaaacttcgtggatttgcgcgctcgcctgcggcgctgtcgttcttttaacgatccccatatcttttcatttccaaacgttagattccttttttctctgtttgaatgttttttctctccgtcggaatttttgaacagcagaaaaggataacggaaaatccgttatccttttctgtttgctttgcaaagcccacactttgtttacaaagtatcgtggattatatttgtattattttataaattcatttgaccgtaaatgtgattgaagcttcaacggcaagtgtattgctgagataggaaaaaggatactctttttgtattaaatgccaaactccgtattgcggctttacttcattcagaaatcggataacggctcgcccttcgtatttaggatccaaaaggacaactcctatcaaatttttcttttcgtccaatattttgtaaccgcgcgcacctttattgccacttaaagcatccaccgtatattcgtcttttgttatagtgcatacttgcggaaatggtttggttgtcattgtcatttcaatactccatcacttctaattttagctttttctattccgaaaatatctttgactttcggaacaaccatatctataaaatctttgccaatgctataaaagactatttcacatttatttttttctaaatcatacccgattcttttacgcggcaaagcatcccaggttttttactttttttagacgcggcggcgcgtcagttttccgtccccttgttgaggaggtcgtagagcaatcgataaagatacgccacgtccaaaggttttcccgcaaaaccgttcattcccgctgccatcgccgcgtcgacgtcttctttaaacacgttcgccgtcatggcgacgatgggaacggtcgccgcgtcgggtcgcgccagcgcgcggatggcgcgagtcgcttccagaccgtt

SEQ ID NO: 683 - DNA, 3347 bp, Unknown
  16S sequences of unknown bacteria
gaggagggactttttcggagaaaaagtccctcctccccctgcacccccttctcccaaaaagcttcatacaaattttttcaggagactgtgcgtatggatgaaatttctgcggatatctcagattgtgacacggacgcagttatgcggaccggcatataagtgtcagcgtcgagcagaaccacgacacggttgccggaagtgtccgggtccgcgccctcagaataggtcgcctcaatgaagtcctcaccgtcgatctcccgccgctccgatccgcagaagctctccggacgtatcgaaaacagcgacagaatctcagtcaccccgcgcaccatctcctcgtcctccaccggaatcttaagcgcccccgaaaccacataagccctgccgcccgaaaactcaaacgacaccccggaaacaatactctcctcaatcacaacccgcgcgctcctcgccaacatccgcccctcctcgtcatactccggcgcctcaagcgaaatccgcgcccgcgtctctttcccgtcgaccgaaaacaccccctcgatctccagcgcctcctcctgataagaaagcagctcccgcttctccccgccgcaagccgaaagcagaatcccgacaaccataaacaaccccacaatcaccggcacaacccgccgcgcaaacctgtcccccataacaaaaccccctccggataatatcacaacatcatattatccggaggaagactttattcataatataatatcagaaccgcgaaaacgccgaaggattcgcgagccgcataagccgccgcatatcctcgtccgtctcaatgataaccgccttcttcttcccggtcttcttctccggcagaacgcatatcatccggtcctcgctgtccggatgtgccgaaaaatcgagcagctcggtgtccggcgcgtcggcgagcttcctcgaatcactgtcaagcgggcgtatcacagtaaagtccgaaatgtccgccgagaacctcttccgcctcgttttcttaccataaatttcagcgaccgtcagctcccccgcctcgacggcgaactcgtactcgaccatgacgaaccgccacgtgatgtttatcagcgcgtagatgatgaaaggcagcagtatcaacggctgccactgtctgagcaatatccagaaaaagaaagtgtaccccgccgcgacaagcgcgtaaatcagcatcagtacgaccctcagaagcatccccttagcccccgtctccggcgtcactatgtattcgcagaaactcttgtgttcattcatatatatttcctcccgtcaggcgcgcttatatcacgcccgcattgcccatatatcattatagcataagaaaatgaaaaaatcaattattttctcaaaagaaccggcgaattccgtctgaaattctccattcaggtacttgatttcgtcacataaaaggtgtacaatataaagtagaacaagttctacaaacaatcgagaaggatagattgaaagataaatctttcaatctcaacattttggggctttcgttgtcttccgacaacgattttgctccgcaaaaccagccccaaaatggggagaaaggaagctttcgcggcgcgcgaaagcaataataattaaaatgaaagcagtaatcaccgtaacaggaaaagacacgatgggaatcatcgcgaaggtcgccgcaggctgtgccgaatacggcgccaacatcatcgacatatcgcagagcgtcctcaaggaatatttcgcgatgataatgatcgtcgacatagaccgcctctacatagatttcggcgagttcgtcgacaagatgaagaagctcggagaagactccggtctcgttatccagaccatgcacgacgacatatttaccgcaatgcattctatctgacggcgcagccggaagatagaataccgcacacccatttatatagagaaaggcacaaacaatgttcaacacggctgatatactcgagaccatcagcatgatacgcgaggaaaacctcgacatccgtaccatcacgatgggcatctcgctcctcgactgcgcaaccgacgacccgaagcgtctctgcgacaaaatctatgacaagataacgcggaccgccgaaagaatcgtcccggtcggcgaagccatcgaaaaagaatacggtataccgataatcaacaagcgcgtctccgtcaccccgatctccctcgtcggcggcgagctgaagccggaggattacctcgaggtcgcgaagaccctcgaccgcgccgcgaagaccctcggaatcaacttcataggcggcttcggcgctctcgtccacaagggcatgacgagaaaggacgagaatctgctcttgatcatcccggaggcgctcaccgagaccgatttcgtatgttcctcggtcaacgtcgcgacgaccaaggcgggcatcaacatggacgccgtgaagaagatgggcgagatcatcaaacgcaccgcttatctcacccgcgacaaggattcgctcggatgcgcgaagttcgtcgtcttcgcgaacgtcccggaggataaccccttcatggcgggcgcgttccacggcgtcggcgagggcgaagcggtggtctcggtcggagtctccggccccggcgtcgtcgcaagcgcgataaagcgcgccggaaactgcaatttctccgagctcgcggacataataaagaagacagcgttcaagataacgagagtaggacaactcgtcgcctacgaggcgtcgagacgcctgaacgttccgttcggaatcgtcgacctctcgctcgcgcctaccccggcgataggcgactcggtcgcgcatatccttgagaacatgggacttgagaaatgcggcgcgcacggcactacggcggctctggcgctcctcaacgacgcggtcaagaagggcggcgtcatggcgtcgagccacgtcggcggactttccggcgcgttcattccggtctctgaggacgcgggcatgattgacgccgtgaagtgcggttcgctctcgattgagaagctcgaggcgatgaccgcggtctgctcggtcggtcttgacatgatagtgatccccggcgatacgacggcggaggtcatcgacgcgataattgccgacgagatttcgatcggcgtcgcgaacaccaagacgacggcggtccgcgtgatcccggctttcggcaagaaggtcggcgagatcgtgaacttcggcggtctgctcggctacgcgccggtcataaagctgaacgaggcgtcccccgcgatcttcgtgaacagaggcggcagaatccctgccccgattcatagtctgaagaattaaggggaacgggtcgcttttttgaaaaaaagctccgcaaaaaacttt

SEQ ID NO: 684 - DNA, 19193 bp, Unknown
  16S sequences of unknown bacteria
gccgatttgtttctgaatctttgataatttgtgaaagtccacaataaagcagaggatttggaagaattcagaagaatttttaagataaacccggttaaaaatgtgatttcttcatgttttttcagtaaaatcactgtttttgagagtaaaatgcgaaaaaataattgacaaatttttgcattatgttatattggtagtcgctgtgtattgtcgttttaccggcaatacctttgcatctgtgcacgccggatttccggcaaaaatccaatagccttttgccttgtgcaaagaacgtgccggatacgggtgcgtcattcgccttggcataaagacgaagcgtccagtttcggtgccgcctaaaacgaacgggatttcccgttacgattagaacaagccttttgcggggagcggtataaaaagctggatggggtcgacaaggttttatactgcggcggcggttttccgccggctgattgcccgtaccgcagtcgggcgggaagcgtaaacggcacagcgaagcgcttccaggaattttacttgtgagacttaaaatccgcaaagggggatgcaaaatgagcaacacaatcatcagcctcaaggacatcgtggtggaattcgacggacaacgggttttagaaggactcaacctggatatccacgacaaggaattcgtcaccttcctcggtccttccggctgcggaaaaacaacgacgctgcgtatcatcggcggctttgtggatccgaaagagggagacgttttcttcgaggggaaacgcatcaacgacctgccgccgcataaacgccatgtgaacacagtgtttcagcgttacgcactgtttccgcatttggacgtgtttgagaatatcgcgttcggtctgcgcatccagaaggtgccggaaaatcaggtcaaagagcgggtgtcggaaatgctggcgctggttaacctgaaaggctatgaaaagcgcaacgtaaacctgctttccggcggccagcagcagcgtgtggccattgcccgcgcgctgatcaaccatccgcgggtgctcctgctcgacgagccgctgggcgcgctggacttaaagctgcgcaaagagatgcagatcgaactcaaacggattcagaaaagcaccggcattacgtttatttacgtaacccacgaccaggaagaggcgctgaccatgagcgataccgtcgtagtcatgaacgacggcgacatccagcagatcggaacgccggaggacatttacaatgaaccgaagaacgcctttgtggcggatttcatcggcgaaagcaacatcattgacggtattatgctgcgcgactgctttgtggaatttgccggcacccagtttgactgtgtggacaaaggctttgctcccaatgaaccggtagatgtggttgtccgcccggaggatgtaaaagtggtgggcgaaggtcaaggccagctgtccggcatggtggagagcgtcaccttcaaaggcgtgcatttcgagatgtcggtcacggtatacggccaggagtggctgatccattcgacccagagccaggaagtcggctcggtaatcgagattcggctggacccggaagacatccatattatgaagaaaatggaggaatagccatgaaaacaaagtattcctccctgttttccctgccctatctcatctggtcgctgatttttattatcgtgcccatgggccttgtggtcgtattcgcgtttaccactgagggcggccagtttacgctggactatgtgtcccaggtgggcgaatataccaatgtgctggtccggtcagtatggctggcagccattgccaccatcatctgccttctgattggctatccgctggcattcatcatgtctcggatgcccgggttccagcagcggacgatgctgatgctgattatgctgcccatgtggatgaattttctgctgcgtacatacgcctggatgaccattctggagaaaaacggcctgctcaacaaacttttcggtctggttggcctggggccctttgatatgatcaacacccagggggcagtggtactgggcatggtatataactatctgccttttatgatcctgcctctttattccattatgaccaaaatcgacaaccgtaccattgaagcagcgcaggaccttggcgccaacaccaagaatgtctttacccgcattgtcattcccatgagtatgcccggcatcagcaccggcattaccatggtattcgtcccgtctgtctccacttttatcatttcccggatgctgggcggcggcggaaatcttttgatcggcgatttaatcgatctgcaatttttgggaaacgcatacaatccccacctcggttccgccatttcgctggtgctgatggtgctcattctgctttgtatgagcattctcaatcagttcaatagcgatgaggaccgggaaggcatgcttttgtaagattttgcagatccctctaacataagatcaaaaggagtgtggcacgattgaaatggctttccaagacctacatttgggtcattatggcatttttgtacgcccctatcggcgttttgattttcttttcctttaatcagtccaaaagccgctccaactttaccggctttacgctggactggtatgtaaaactgttccacaacgatctgattatccagtctttgatcaatactctgatcgtcgcgctggtttcttccatcattgcaacagtcatcggaaccattgcggcggtggggattaacagcatgaaaaactggaaaagatccattatcatgaacatcacctatctgccgattgtcaatccggaaatcgtaatcggcgtgtcttttatgctgctgtttgtcatggcacaggggcttttgcgcaatgtgggtatggactttgaattcggctatatgacgctgattctggcccacgtaacctttaacctgccctacgttattttaaacgtaatgcccaagctgcggcaaatggacaaatatgtttacgaggcggcgctggacctgggctgtccgcccgtaaaagcatttttcaaggtagtactgccggaaatcatgcccggtattctgtccggctttttgatggcctttacctattcgctggatgatttcgtcatcagctattttgtcagcggcgccacttcccaaacgcttcccatcaccatctattcgatgacccggcggaaagtcagcccggagatcaacgccatttccgccattattttcgtggtggttctggtggttctcctgctggtcaactttcatggggcgcacaaggaaaagcagtcccgcagagagggggtcagaatatgaagcgctttctgagtttggctctttgcctgattttgctgtgctactgcggtaaaaccgcgtttgcggaatccgaagccgaggtcatcgatgaggattattacaccagattccaggggcaaaacatctcgatctccgtctataactggggagaatatatttccgacggctccgacgatctgatggacgttaacgccgcttttgaggaattgaccggaattcaggtgctgtataccacctttgccaccaacgaagagctgtatgcaaaattaaaaagcggcggcgccagttatgacattatcatcccctccgattatatggttgcccggatgattgcagaagacatggttcagccgcttgattttgacaacattcctaacgtacggtttttggacgaacagtatctttacactgattttgatccggagggtgcctattcggtgccgtacacctgggggactgtcggcattatctacaacacccagtatgtagacgaagaggatacccacagctgggaccttttgtgggacgaacggtatatgggagaaatcctgatgttctcaaacccgcgggacagctttgccattgcccttaaacggttgggatactccatgaactccaccagtgaagaggaactgcgggacgcctgtgaaagtctgaaggatcaaaaagcgctggtacaggcttatgttatggacgagattttcgacaaaatggaaggggaggaagcgatgatcgccccctactatgccggcgacgctattgttatggcggaagaaaatcccaatcttgctttttctgtcccaggcgaaggaaccaaccggtttattgacagtatttgtattccctccaacgccaagcaaaaagaagcggcggaaatgtatatcaatttcctgtgcgagccgcaggttgctgcggaaaatatcacctatatcggctattccacaccgaatctggctgcttatgatttgttggatgagcagatgcagcaaaatgaaatcgcctatcctgctcaggaagtgctgaccaacaccgaggcttttgtctttttgcccgccgaaaccagcactctgatggataagctgtggaccgaaatcctctccaacgataaaaattatagcaagtggaccatcccggcttttctgctggtcggcattctcttttccatcggcatcaatgtgcggcggatgatattgaaaaagaaagagaatctgatgtaaataccagttctcaaaacgccctgtaaaacagggcgttttttcttttcggatgtcaataattagaaaatcatcaaaatgatgttgacatttcgtatccggttgattatattatatttagacagtcgtctaaatataataaggatggaggaggtttcgtgggaattcaaaaaacattcaaagcactctcagacagcacccgccgggaaatcttggagcttttaaaagaaggagccgtttccgccggggatattgcagcacattttcatatgaccgccgcaaccatctcccaccatttggcggttttgaaagccgcggaactggtcagcgacgaaaagcgaggcaaatttgtctattatgagctgaatatgtcggtaatcgacgatatcatccggtggatgacagctttccaaggagggaacccgaatgaaaaataaacacagtaaaatcatcatttggattttggcagcgttgtcgccaattctctgtgcggtgacttatccttttctgccgcaacaggtacccatgcactgggatatcaacggtacggtttcttatgagggaaaagaaacttttatcttcatggcggttttgccccttttgctggcgggcctgttcatttatctgcctaaaattgacccgagaaagaaaaattacgccaaattttcaaaatattatgactacttttgcatgttcatgatggtctttttgctgatcgccaatcttgtcgtcgtttcggaaagctttttccccggccggatttccgtaggcatcgtcattcagatgctggttggcgttttattccttttcctgggcaatatgatgcccaaatttaaaagtaatttctttgtcggcatcaaaaatccctggaccctttccaataccgacgtttggaaccgcacgcatcgcctgtccggtattttgatgttcggaatgggaatcgttactatcctgacctgcttctggctgccgccttctctttctttctggctgatgatgggaatggttctgttgttggtgctggttcccaccattatgtcctacatctggtatcgaaaactgccggaagaaaaacgagacactgagaggggcgaaaaatgaagaaaaatgtttggctctatctggttttcacctttgttttgacctatggagcggtgtttggcctgatgctgactggtatagcctacggcagtccgctttgcatggcggttttctcgttgtgtatgcttttccccgcgctgtgcagcattctgacccgcctggtcaccaaagagggcttctccaaaatgtatctcaaccctcacttaaaaggtcactggcgctattatctggccggattgatcgggccttctgttctcaccgccatcggtgcagctttctattttctgctttttcccgatcaatttgatccgcgcatgacagtcttatcccagactttggaggcacagggcgcagacagttccgccgttggtatgatcgtggtaatccagatgatagttggcgcactgaccggaggcatcatcaacctgccttttgcactaggcgaagaactgggctggcgcggctatctgcttccccacctgtgtcaaagcatgtctattcatcgggccattcttttttccggggcaatctggggactatggcatgcgccgatgatcgccatggggcataattacggcaccggttatcctactgcgccgtggggcggcattctggccatgattgtattctgcattgtctgcggaacttttctaagctatctgacgatccggacaggaagcgtcctgcccgcagcgattggccatggtgctttgaacgcatttgcagccgcccccgcttattttatggcaagcggcgtttataatccctttctgggccctgttcccaccggaatcatcggcggggccggttttattgtcgtggccgtctggtgtgcggtacggctgcgaaacaaaaaggaactcagccaatctcatacaatctccctataaaattgacttgtagaaatagtttcgccaaataaggaacggcatcccggatataagggatgccgttcttatttgttcctgttttatcaaaaaagccgctattcttggccatatacttcctttgccatacgaaaagcagcccatgccttcagccaaccgccataaaaagcagcatgggttaaaatttctgccatctcctctgccgttacgccgtggtttctcgcactttgaatgtgaaactgcaaagaagagtccagtacaccgctggccatcagcgccaccactgtgacaatgctgtggtcccgggcgaaaagctgttcttctctggcccaaacttctccgaacagaacatcgtcatttaactgggcaaacttgggggcaaacagccccaactgatttcttcctgccgtcaccttttccactgcggcgcttccttcaccggcggacgcagaacttccgccacatcattttatggtctattttagcgccaatccgtcccggaatgcatttcccacctttggccccaatgccagataggtgttgttcattgggtcaaaagtaatcggccgaagcttttcgggatcgacttttccgttctcatttaaaacggactcctccgcgctgacattgacgatctcgccaatcaggcagcaggaatcggcatcatagcgaatcaatctgcattccagcaccatcggcagttcatcaataatcggcgcgtctacccgctcgcttttcgtcgtatggaatccggcttttttcagtttatccggcacatcattggcagaaacaatccctacgtaatcacaggcggcaacatgcgcctcatccgccatgctcaccgtaaacgcgcccctttttaaaatattttttacggttttatggcctgcgctcaggcacatagtaatctgcgtatcattgctgatgccgccccaagcggcgttcatggcatcggcaacacccgcctcgtcgtaggtggcaacgatgaatactggttgcgggtaggtgtacggtttcgctccaaaatcttttctcatttttatgctcctttctttctcttacgaaagacgctctgttttttcacgctggatacttgcaaaacgtttttttcatcataccacctggactacactccaagtcaagtccctgacaacagggaagcgattttctcttttcactgccctttcgccgaaggatttacttttccgcacagatatgatattctgtaatcacttccgaactggccagcggacaaagggcgtctcctctctagacaaggcggcttcagcaagggcgtcaaattctttttgtgcgggaatcggtttcgccggacagtgctgcaaaaacatttgaaatcaggagaaaaaatatgtacttttattgcgatccggctgctatcgagcatctgaaaaaagatccccggatgagcgcggtgatcgaccaagtcggtgccgtccaacgcgaggtcgatcctgatttattttcctctgtggttcaccacattgtcggccagcagatctcaaccaaggcgcaggccaccatttggcagagaatgcgagaggccttacacaacgtggatcctgattctgtgctatctgcaggcgccgaaaaattgcaggcccttggcatcagtttccgcaaggcggaatatattatggattttgcccaaaacgtccacagcggcagttttgatttggagggtatttgggaaaaaacagatgaagaagccattgcccagctttctgctttaaggggtgtcggtgtatggaccgcagaaatgatcctgctgttctgcatgcagcggcccaatgtgttcagctttgatgatctggctatccaaagaggtctgcgcatggtgtaccatcaccggaacatcgaccgcgcccgttttgaaaaataccgccgccgattcagcccctactgcagcgtcgccagcttgtacctttggggggtggccggcggcgccatcgaggggatgaaagattacgccccttctaaatccgtcgggaaaaagaaacagccggccgctgcctctcatgaaaacgccgcccgtgaccgcttatgaaaaaatatttcaaaagagccggagaaaaagatgtagaatctttttctccggctcttttggggataggactcttccctgtggaaaaaataaaatcataaatcacccgaaaaaggagaaaaacaatggagtccatttggtttgcatcctgtccaatcgagcgccgagaaccgctgaaccggaacctgcggacagatgttgcggtaatcggtgccggaataaccggcattttaaccgcatacaagcttcaaaaaaccggaaaagaggtggtattgctggaggcaaaccgcatcgcaagtggtcaaacggggaaaacaaccgcaaaaatcacctcccaacacggacttttataccatcgcctaatccaggatggtggagaggaaaaagcccgccaatacgcgcaggcaaatgaaaacgccattgccgcataccgcagcctcgtccgggaagagcagattgattgtgattttgaaacaaccgacgcatatgtttattcccaaaatgccgaatccctgaaaaaagaagcgcttgcggccaaaaaactggggattgccgcctcttttgtccagcctgcccgctttcccattgatacggccggcgccgtccgatttcaaaatcaggcacagtttcacccgattaagctgattgccgctctttcctccaagctgaccatatatgaaaatacccttgtccggtctgttgacggcaatcaaatcgaaaccaaccggggaatggtccgagctgggaaaatcatttttgcctgccattacccatttgttaattttccaggaatgtactttgccagaatgcatcaagaacgctcctacgtcttggcattggaaaacgcagacgtaccggacggcatgtggatcggcgcagagaaacctgcctactccatgcgccgctggcagaatatcctcctgtttggtggagaaagccatcggacggggaaaaaccggcagggcgggcgttaccgcgcattgtccgaaaaggcccagattctgtttccgggcagccatgtggtgggggcttggtccgctcaggactgcatcaccccggatcatattccttatatcggcttctattccccgtatcgtcctgattggctggtcgccactggatttcaaaagtgggggatgagcactgcaatgatcgccgcagaaattctatgcgaccagctttgttcaaaagaaaatccctatgcggatctcttccgcccaggccgcttctcggcacaaaacatttccggtattgccagtgaaggggcacaagcggtgcgcggattgggaaagcgattttttcaaataccgcaggaaacggcaaaaacaatcccggaagggcatggcggaattgttttggaacacggtgaaaaaaacggcgtgcaaaaagatgaaaacggaaaaacgacttttgtttcaccccggtgccctcatatgggctgccagctggagtggaatcccgacgaacaaagctgggactgcccctgtcacggatcccggtttgaccggcagggaaatctgctggaagggcctgcccaaaccggcatctcccattcttaagaaggcgcttctcgacatagcctttcgtcactttctttttcaaatgcccggcgccgaccaaaagcaatcggaaaagtacctcaaaactggatttttttgtgctttcgtgatagaatgtgtctatgaaacggcaggccaaaaagcaaagtgaaaggggaaatccaaaatgtatcttacagccgtcttatccaccgtcgccgcctggtttgtggggctcgtcctggacgtaaacctcccattgggagatccaatgggatttgcaagctttcggattctctttcctattttgacaatggggttgtgtatcctcaaagaggtgaaccggaaaaatcccgaataaaaataagcacagcttaacgccgtcgggccagactatcctcagcagcataagcggggatcgtcttccagagaaggggacaacaatatgattttaaaaaatgatccgtttaccatagaacaggaacctatgcgcaatccctttgtggggattccctcctttctcatggcgcctttgtgttttgatctggatcagttggaagctgatattgccgtcatcggtatgccctacgatctggggacctcggtcaataccggcgcccggttcggcccccggggcgtgcgggaagcctccagctacaactgttacgcccacgaaggatggtacgaccccatccggaaagagacctttttgggcgagccgtggaaaattgtcgactgcggcaacgtggatgtcctgcataccgagcagacccgcagctttcaaaactgcgaggcggccattcggaaaatcctttccaaaaaagcaatcccctttgtcattggcggcgatcacgctattaccacgccgatcctgcgcgcttttgactgctttgacaatctgtgtgtgatccatttcgatgcacacctggatttcagcaaaaatccctatggcattgccgaaggaccgggcagccccatgcgccgtgtctcagaaatggcccatatcagtaaaatcgtgcaaatcggcattcggggcattggcagctcgcagctttccgattttcaggatgccgaagcctatgggaacaccatcatcacatcccgcgaagtgcgccgaaacggagtggaatgggtagccagctgcattccgcaggcggagcactactatatttccttcgatatcgacgggctggatccttccatcgccatcggaaccggatcccccgttcctttcggcctgctttatgaagaggcttcggccatcatcgaagctgttgcgaacaaaggcagcatcgtcgggatggatatggtggaaatttccccgccctgcgatcaccagaatatgaccagcatgtatggtgcgcagctgatgctggacgctatgagttttctgaccaaagcccggggaaaaatggtccgttgattctgttgtttgatttgccaaaccggcacgttttttcgaacgtcccgcttacattcttccaaatgaaaaagccctccgcatagggtagtgtccgtaaaatagttaactctccgaatgattaacttctgcggagagtttcttttgggatagccgctcatagcggcgcaaagatgcaggcgcttgtacggaacgacgtgacgcaaaaacagcccggacttttaagtgtccgggctgtctgtctcacagagcgtacatacagggattgcctctgtatagaagtgcgccattaataaacagaagatttagtgttttagagaatatgatctgtaatgcaatcgtaccaatgaacgtaggttgtgccatttacgataagtttgtcattttcgggtaactgttcgctccaaggcttctgataccggtcaatagcccaatcatcacgattatatctgcgccacagaatcgtctttccatctttgtccaagaactgctcggaaacaacaccacagttataggtttcaatatccattacgcaaacggtgtcataacttttacctccgatggtaacggtatatctgccaacaatatcaaggaggaaatctttgttcacgctcgtaacagagtttccaactctctgaatatcacctttaacagaaatgttcgtttcgtttccgcaattatcttctccaaatccccagttcagcataaattcatcgccgtcaaggaacgtgatgtaattgcgaacatctccatcatttcggagcgttgcaaggtaacgacaatgtgtatctgtaagctgtgctacaaaagtacggttaatcacctcgttcttatctgaataagatgcttctcttgcggtaagctccactccctcaataccgtgaactttggctttgcctgtaacttgcatatcataaacatggctgcatttgcgggaaggaatatcatacataccccaagacagtctttcgccaagcttagggatcaagaaccatcccataagttcttcccattttactgagaagggggctttggcacttgtttcaattttgtattcgggaataaattcgggcaactttttcatagtgctttctcctttcgatacttcggtgttatatggatatttggttttgaaattctgttttgccgtatgaagtctgctttttactgttccaacaggaatactcagttgtttggcaatttcggcttgcggaagctctttccaaaaataaagatacaagatttgcttgtctttatcgccaagtaaactcaaagtttctcttactgtggcaactatggaaacgccatgtctgccgtctgacaattcgctttctgttatttcatcaatcgggatttcatactgcgttgctttcttacgaaagtagtcattacatttatttcttgcaatgctaataatccatgccttaaaaaagtccttgttttttaattgagcgaacttttgacaagcggcaaggaaaacctcttgtaaaacatcgtctgcatccgcttttgagttcaaacgaaatctcacaaaacgttctacagacactcgttctgcttccaacaatttttcaaattcttccatatcctcacctcctttggtctatgagtgattaaaaccggtttcacttatatagacgggtagcagtattgaaaggttcattttgcattcaaaaaataagcggcactcgacattatttcgagtgccgcaattaactgttttatgacgatccgcctatagccggagggctttttattatagcactttgcttaaaaaattcttggtccgctcctctttggggtgactgaaaatttcgtccggcgtgccctgttcgatgatatatccctcatccataaacagcacccggtcagccacttctttggcaaaacccatttcgtgcgtgacgataacaagcgtcataccgccgtgggtaagccccttcatgacatccagtacctctccgaccatctccgggtccagagccgaagtgggttcgtcaaacaggataatttttggattcatggccagcgccctggcaatggccacacgctgcttttgcccgccggaaagagacgaagggtacccgtccgctttatcgcgcaagcctactctggccaaaagctccagcgcctttttttccgcttctttccggtcgatcccccgtacctttctggggccgatggtcacattgtccagcaccgacatatggggaaacagattaaaactctggaataccatccccatctcggtgcgtacttcattctcattttccttcgacaaatgcaccccatcaatcaggatttctccttcggtaatttcctccagacgattcaggcaccgcaaaaaggtgcttttcccggacccggaagggccgatgatgcagacgacctcattttcctcaatggccgcatcaacgcctttcagcacctgcagcgcgccgaaattcttcttgagtccttttacttgaataatgctgctcataataccaccatcttttccgcctctattgttgcaagaacggcttttctttgtttattctgcattgctgttcgccatttttttctcaagatgtttgaccagtttggaagaggggatggtcagcagcatatagacaagcgctacgccgatatacgcttcaaacgtgttgaaagtagccgcattccataaggcgcctttacgcaggatctccaccactcccacataggaaagtaccgacgtctctttgatcaggctcacaaactcgttgccgaaagaaggcagcacgattttcagcgcctgaggaatcacgatcagtttcatcgcctgtgccctggtcattccgatggagcgggcagcttccatctgtcccttgtccaccgcctgaataccgctgcggatgacctccgccacataagcggcgctgttgagcccgcacacgataacagcggggataatcaaatacggccagcgaaaggaaatgccgctggactgcaacagctgcggcagtccgtaggccataatcaaagcctggacgatcagcggcgtgccgcggataatttcgatgtataagcttgcaagcgcagttaagaccttgatcctggacatcttcatcagcgccaggacaaggcccagaaccactccggtgaccatggcaatcaatgtgactcccacggtcacgggaacgccttgcaaagctactaaaaagccttttacatatagcatttagtaagctctcctattcttgctgcgttattctttgccggattatgccagtccccattttttgagcagttcgtcataagtaccgttttcttttacattggcaaggccggcattaatcttttccagcagctcggcattgcctttctgcacggcaaaacccaaatcttcatagctggccttgtcacccactactttcagtgcctcagggtttttgtccatataggcctgcacgatgctggcacccgccataacagcgtccacatcgccattgatcagctgcagcacacaagtatcaaacccatccaggatcactgcttcgcccaaagtgccttcttctaccatcgcctgcaaatcatccgcatagttggtggcgatctgggttgctaccttcatatcggcagtcagagaatccaacccagtgatggcagtgttttctgtttttaccaacagcgccgcaccgtctgtccagtaagtctcagaaaagtccaccttggcaatacgctccgggtcgccgctccacatgccggcggcaatgatgtctccgttgccggtttcgatggcgggaatcagcgactcaaacgccatgtcgacaaactccacctggaagccctgatcctcaccgatggcggcaatcaggtccatatcaaacccgatgatctctccggtgttttcgtcaatcgtgtcaaagggcgggaaagtagcattggtcagtactttgtaaaccggagtcttttcgcttttgctttcgggggtgctttccgtttgaacattgctgccttcgctcttgtcagccatgctgttttcgctgccgggggtcgtgccgctgcaggcagccagggtgcataccattactgctgcaagcagtaagctcaaaatctttttcattgtgttcgtcatttcctttctaagtacgtatatttttattgctaacccaacattttaaccaatgtagccatatagaccataatgcagttgagatagttttcgatcgaaaccttttcatcggcgcaggcaatttcatccgtaccgggaccaaaccagggataatcaccgccgatggcctttttgatataagccacgtcgcatccgcccaccttggtaaaatgcttgggagttctgccgcagactgcttcacagctggcatcaatggcctttacaatctcgctgttttcatcgttgacaaatacgggagtatccggttcataccggttgtggaactcatattcaaaggtcggatcggcctttttgacctcctccagtgcagcgatgatttccgcatccaccgattccggcgtttcgttgggcatataccggcggtcaatgcagatttcagctcgtctggcgtaattgttcaccgctatgccggcatggatcttggtcaccgccatatgggactgaccgtattctgtcagcggttttttggcaatgacctcgtcggccagcttgttcagggcggctaccgctttcattgcttttttaatggcatcctctccgccgtatttgttgtccttgtcgcctgctttgatgggtttggccgcatggccgccatcgccgtatacgatgacctggcagggataaacgcccccgtgtccgatcatcaagtcggtggtgtgatggtccttactactgggctccatgctgataccgaaatcggctttgatcaggttatccttcagtaaagacaggattccgtgctcgccgccgctttcttcgtcggacacatagttaagcacaacgcttcctttgggatcgaaccccatctccttgagaaattttaccgccatcaaagctgcgcagtcgccgcctttcatgtcgctggtgccgcggccataaacaaatccgtctttgatctcgccggaccaggcattgtagctgggatcctccgtttctgtggcagggaacacgtccatatgcccgttaaacagaaacgtttttccctcctgagttcctttccattccgcgatgaaattgggtcggtctttctgatattcataagtgtccacttggatacccagcttatccagccattttttcatagtcaacgccattggcagttcgctgcccgtaggactgggagactggattgcttctaccagacactgaagtgcttcttctttactgtcggccaccttttttttgatttgctcaactgtgatcataacttctcctctttcacctgttgattgtgctatgattgcatattttttgtgtctgagtgtataataacgcattaaaatgcatttgtcaagggtatttttttatttttattcatattttatgcatcttattgtatattgttgaacgatttccatcatgtccagctattttaccgcaatttgcttcatgcggcaaaatactccatataaaactttgtacagcaaaacgcgctgtgatcgtatacaaaatggatggcgtatcaaattctacgcatatgagccgggccttctcatatgtgctgagcgattttatggtcgtgctgcaaaacggtatctacccaatttctcgatgattttgtcctttaaaaatcgctatttttctgatttttctacctaaaaatagaaaaaatcccgctcaaaaagcgggaattttccagaaaaaataatggccttttgctataaataagcgattgctatcaaaaaacttcttccaaaatccgagccagacaggtcagcccttcccggtcttcttcatcaaaccgggcaaagctggtactgtcaatgtccaacacacccacaacccgtccaccggcatgaaggggcagaacgatctctgaattagaagcgcagtcacaggcgatatgcccagggaaagtatggacattttccaccagcaaaatctcgtccttttctactgctgtaccgcaaacgccccgtcctgaaggaatctcaatacaggccggccgtccctgaaatggtcccaaaacaagtctgccttcttccatcaggtaaaatccgacccagttaacgtcatccagcgattccatcagcaaagcggaggcgttggccaaattggccgtttgatggggtactccccgaatgagccctgtcagctgggacgccaactgcaaatacagctgctttttatccgccagacagcccggcgccgtttgtttctgcatccttcttttcctccattctgatccggcagccgcccgcatctttctcgggcggcacccttattaaggcgatagcggctcgctttcatttccagtgtctgcgataaaaccggcaaacagcgcctgtaattacagaccgcttgcatcagctcataaccctgttgctgcggcacggtaggtctgaaaaaagcgtctgtcacaaccctgctcacgtcaagccgctgaaacggcaaaaacctcggaatctctgcgccggcttttcatgaggcagctgccgctcaaaatgtagatttaccattcccaccatctgtctgcccttttcaaagaggtctcgctaatcgtgcagctccgccagcggaagccagccagtttcggtaaatccggcccagcccaactaccggttctccaactcacggaccaggcggtacagcctgccagcatctgatggatcgcttaaccggcgcatatgtttccctatttcggcaaaaaaggcccggacaaccgccggacctgcaaagaactttacttttcgtttcgattttccagcgcctgcatttcataacacagcgtcatcaagctatcgcccagatggacgttttctactgccacatcaggataatacacgccgatatcataatgactgaaattccaaaatcccttaattcccagctctaccagacggcgaaccaaatcctgtgacgccattttgggtacgcacaaaatggcaaccgtcggtttttccttttggcaaaactgctccagctcgtcggtgtgccggatcgggattccttccagcacttcgccggaaaagtcttcgtcccggtcaaagactcccacaatagagaaccctttttcggcaaacgccatatgggccaaaatggcacggccaagattccccgcaccgatcaaaatagtctttttcggcaggctcagtcccaatattttgccgatttcctcccgcagagctaacacgttgtatccatatccctgctggccaaatcctccgaaacagttgagatcctgacggatctgggatgcagtcagccccatcttggacgaaagctccccggatgagattcgctgtacgccattttctgcaagcattcccaaaaagcgatagtaccgcggcagccgccggattaccgatgcggaaacctgcttttcgctcataccttttcctcctcatcgactgcgtcgcttattcatttcccttttagaataccaccattgataatctcttgtcaatggtagggcggcaatgtccatttttaaaaacggcgctgcaccttggcttaacagtgataaggaactaatttacttatcaactgttagctgacggttt

SEQ ID NO: 685 - DNA, 13589 bp, Unknown
  16S sequences of unknown bacteria
tatggtggtgagaatttgaaattcctctcccggttccaccacgctctgggaaggacggcagctgtatgatacacgggacagcgcgcttttcaccgacaccagttcacagagcagggcgcagacaatgagcagaaaaagaaggaaaagcaaaacgcctccctcctttacaggttttctgtgggcaccggcacggcggcaatgagcttttgcagataggtctgcacatcccgggaagaagccagggaagaggaagacaggcgatgtcccagcacatgaggcgccatatccttcacatcctcgggaatgacaaaatcccggccgtggaaggcggctgtcacctgagcggctttatacaaagcgatggcgccccgggtgctgacgcccacggaaaagccgctgtcctggcgggtcttttccaccagatccatgagatagccggaaaccacgggagaaaatttcacctgggtatagttttcccgcacataggcgatatcctccggggtgacggtggcctgcaaagaatcgatcatatgggctgtgctgggccggccgatcagctccagttcctcctgccggtcggggtagcccatgtgcaaacgcatgaagaaccggtcggtctgggcttccggcagagggaaggtgccgtaggactccaggggattctgggtggccatcaccataaacggctcttccagaggataggtcttgccgtccaccgagatctgccgctcctccatggcttccagcagactggactgggtgcggggcgtggcccggttgatctcgtcggccagcacgatattggcgaaaagaggcccgggacgaaattcaaattccccggtcttctggttgtaaaaatcgatgccggtcaggtcagagggcagcaggtccggggtgaactggatacggctgaacttgccgcccagcaccttagaaaaggctctcagcatcatggttttaccggtgcccggcacatcctccagcagcacatggcccgagcagacaaaacaggtgagcaccagctgggccacctctctttttcccacgatcaccgagcacaccggctctaaaacggcgtcgcggaacatttcaaatcgtttgatatccacaggcaaaaactcctttccaaacatgggaatacagaaattcctatatagatatgacaaaggccgttttgcaaaggatttctttgcaaaacggccaggcttgtccgaatgtcttattcctcgctgatggcgccaacggggcaagtagaagcacaagcgccgcaggacacgcaggtgtcggcattgatctcgtagtgagaatcgccttcgctgatagcgctgacggggcactgagccgcgcaagcaccgcagcttacgcaagcatcgctgattttataagccatgggaaaagcacctcctctttaaattacagattcatcataccatgatttgcggaaattgcaaatgaattttttgcgaatcttcggaaaaaataccctcatcgtaaaaatgacaaaaaaggcggcgtcaaaagaaatggaaaaacatcaaaatctggaaaacccgtcctggcggcagcttcgtcagcagttgggcggacctgtgacccttccccacgaaaaccggttcggccaggcgccgtccccggccgctctttcctcccagcccaaaacccggtgaaccggttttgggctacatacgccgcctcttgcaatttgaaaaatatttgctatactattgacataaggtcaaagaaagtcaaagtcaaatattttgaagaagggaatccccatgaaactatccgatctcatcgctcaattcatcaccgagcagctcaccggccaggatgccgtggagctgcagcgcagccagctggccagccgcttcggctgcgcccccagccagatcaactatgtgatcgagacccggttttccccggcccgggggttcagtgtggaatcccgccgtggcggcgggggatatatccgcattgtccgggtgcccatgggaccctccgcccttttgcagcacaccgtggccgcattgggccagcaggtggatcagtcggcagcccagctgcttctgtacgacctgcacaaggcagggatcctgggagaggaatgcttctgcgccctgaaggcctgcctgggagaccaggctctctccgccgttcctcagcccctccgtccccggctgcgggcggaaatgctgggggccgctttggcggctttggctgccgcacaataacgagaaaggaggctatgggtatgctgtgccaaaaatgtggcaagaatcaaggagaaggcactttccgctgcttttctgagaatggatgggaaaccatgtggctgtgcccggcctgcgccagggaggaggaagccatcccctgcaaaggcaaacaggccccttcgctggaagatctgcttcccccggtgccggaaatgacatcttctcccggccgggtctgccgctgcggcgcccgggaagaggaagtccgccgcaccggaaagccgggctgcgcccattgttatgaaaccttccgggatatctttgcccccttgatctccaggatacagggagatacacatcatcagggccaagtcccccgaagtcaggagggacggcagaccatcctgcggctgcgccagcagcttcaacaggcggtggagcgggaagaatacgaaaaggccgcccttttgcgggacacattgcatcagatgaaaaacacccccaaggagggaaacatatgacccagcacacatggctgaacgacccctatctggctttgggcgcccaggtacgcctgagacgcaatgtggacggcctgcccttcggtccccgtttgcaggaagcacaggccctgggcctgctgcatcgggccgaggatgcatcaaaacgggcatcgggcgcagaaatggttctggtgcctttgcaggatctttcccccgattgccgccaggctctggtggctcaggggctgatttcccgggatatggaacggaaaaacccctgcggcctgatctggggccgggacaaagggctggagcttttggtcaatggggaggagcacctgaccatccaggcccagggagaggccccggacctggagccgctgctgaaaaaagcaatggatctggaaaccctgctggaagagagcctggacttttcctatgacgaagagtggggctatctcacccaggacccccagcacatcggcaccggattacaggcttcggtggtgcttcatctgcccctgctcacccgcaccggccagatcaaaaatgtggcggctgcggcccgacgggtggggatcaaaatggaaaacgccccaggccggaaggaaagttaccgtcttttaaatcaagccacattgggcatggacgaagaaagcatcattcacaaggtcaatgaagctgcccaaggaatcttatcccgggaaatggcctggcggcaggcttttcgccgccagcatcccggcgtgatggaagaccgggtatggcgggccatgggcattgcccgctgcgcccgacggatggattgggaagaaggacagctggccgtctcccagctgcggctgggagcatcccaggacatcctgcccgggttttctcccggagagctgatgcggctggaggaagagatccacccagctcttttgacactgggagccggccgggccctttccccacaggaggaagaggaggcccgggcccgctgcttccgccgcgtcctttcccaaaagcccttggaggactgaacaaaggaggtcaccatttcacatggcaaacaacagatggacggaaaaagcccaaaacgccctgcgtctttcctatgaggcggccagcgctctgggccacaactatgtgggctcggagcacattctcctgggccttttgggagaaaaacggggagtggcttccaaaatactcctttcctatggtgtgacaggggatgccctcaccgctgccatcgtccaggccatcggcaaggggacacccggcgtccagcccatgggcatgaccccccacgccaaggagatcatggagctggccgcggccgaagcggccggacagggggcgggatacatcggcaccgagcatatgctcatggccatccttcgggaaaaagacagctccgccatgggtctgctccgctctctgggcaccgacgcccgggccatttaccggacgctggaagagggaaggagggaagaatcccctcttgccagccctggggaaggacggaaaagcggagagaaaaacaccctcaaggccctggggcagttcggcatagatctgactgcccgggcccgggagggaaagctggacccggtgatcggccgggaacaggagatccagcgggtgatgcagatcctctcccggcggcagaaaaacaatccctgtctcatgggtgagccgggcgtgggcaaaaccgccattgccgaaggcctggcccaaaagatcgtgcagggggatgtgcccgagaccctcagcggcaagcggctgatcaccctggacctgagtgccatggtggccggagccaaataccggggtgaatttgaagaacggctgaaaaacgccctccaggaagtaaaacgggcgggaaacatcattctctttattgatgagctgcacatgattgtgggggccggggccgccgaaggggcggtggatgccgccaatatcttaaaacctgccctgtcccggggcgaactccaggtgatcggcgccaccaccacccaggaataccggaagcacatcgaaaaagatgccgctttggagcgccgcttccagccggtgacggtggaagagccctcccaggaggacgcccagaagatcctgctgggtctgcgggacaaatacgaagcccatcacaaaatcaagatcaccgacgaggccatccggggtgcggtggagatcagcgcccggtatatccccgaccggtatctgccggacaaagccctggatctgctggacgaagcagcttcccgggccagactgaaaaacatgaccccgccgccctccctcaaggctctggaagataccatctcccaaaccgaaaaggagaaagaggaagcggtgcgcacccaggactttgagcgggccgccgctttgcgggatgaggaaaaacagcaaaaagctcatctggaagaacaaaaggagcaatgggctctttcccggggccggatctccggggccatcggtctggaggacatcgcccaggtggccgccttgctcaccggcatcccggtggctcagatgaccgaggacgaagccgcgcgcctggcccacctggaagaagagcttcaccgccgggtggtggggcaggaagaggccgtgcgggctgtggccaaagccattcgccggggacgggtgggactgaaagacccgagccgtcctgtgggtagctttcttttcctgggccccaccggcgtgggaaaaaccgaactggccaaagcgttggcccaaggggtgttcggggaagaaaaatccctgatccgtctggacatgagcgaatacatggagcgccacagcgtttccaagctggtgggctcgccgccgggatatgtgggctatgaagaggcaggacagctcaccgaaaaagtacggcgcagaccttactgtgtgctgctgtttgacgagatcgaaaaggcccatcccgatgtgttcaacctgcttttgcaggtgctggacgacggcatcctcaccgattcccagggccgccgggtggactttaaaaacaccattatcatcatgacctccaatgtgggggccagccagctgcaaaacaagcgccccctgggctttggcggcgcacaaggggaagaagaagaccggcagatgaaaaaagagctgctggcccagctgaaaaaggccttccgtccggagtttctcaatcgcattgacgacaccatcgtctttacccggttgcaaaaggatgagatccgccagattgccgcccgtctgatggatcaggtggtggagcggctccggccagccggtctggaggcttcctatgacgacgctctactggatcatctggccgaaagcggctttgacccggactatggcgcacggcctctgcggcgggccatacagtcccagatcgaggacctggccgccatggagctgctggaaggccatgtgaaaaaaggagagcatgtgctctttaccctgcgcgacggtgaagtactgctggaaaaagcagaggaccgggaacctgcttttgccccagccctttcctaaaagcaaaagccccggcagaatgtcccgccggggcttcatttctttcagtgttccatatgccggcccaaaaaggcggccatggcctgacagagcttgctttcgctgtcggaagcggtcttgctctctcccaggcaggccacagcccccagcagatccccgcccgacagaatgggggcggcggaagtgacaaacaagggcgcctccccctgacacaggggaaggggctttcctgcaccggcccgatacacctgccgctcctccatcatctgacacagctccggggagagccggccttcctgtacctctttgcgacaaggacccgccgcggccaccaccgaatcccgatcggtgaccacggcgctgcaccccagggtacggaaaatggcgtcgcacatctgctgagcaaattctccctggtcatccatcatggaatattttttaaaaatcacgctgccgtccttttcagtaaagatctccagcgggtctccctcccggatgcgcaatgtgcgccggatctctttgggaatcaccacccgccccagatcgtcaatgcgccggacgataccggtagctttcatatgccaatttctccttttatttcagatactgggaatagtgtatggaatccatgggcagttatacaggcaaagacggaaagaaatccctctcggcttttccttcggccccagtcctttgccgccttttcagacaaaagttttccatcccctcttgacgggacaggatgctttggctatactattagttagtgtcctaattagtttcagaaagaaggatgacgattgaagctggaacgcatgattggcgcccggatcaagtccctttccaatctgctcaaacggcaggtggatcaatccatgtccgaaataggaatcgagcccctcaccggtatgcaggggcgcattgtgggctatttagggcgtcaccaggatcaggatgtttttcagcgggatatcgaagaggagtttcagatccgccgctccacggccacaggtattttgcagcttctggagaagaagggacttctggagcgccgcccggtggcccgggacggcagactgaaaaaactggtgctcactcccaaggctctggccatccaccagtgcatcgaagagcggatcatccaaagcgaaaacgatctgtacagctgccttacgccggaagaactggagcagtttttcgtcatcaccgacaagcttcgccagcatctggagcataaataaacctacgccgcttcgggcggcgtttgcgtatcgaaaaagtggcaagtccactttttcgagttttgcaagggtctgcgtgcagccattcggccacactggccccttgatcggtgcaaaaagccacgcacaggtcgcggctttttgccgattgattcggaaaagggcaaaaggctctttctttccacggaatcgttttaccgtctgacgccgcctcgggcggcgtttctcccgcccatatagttaggatacttactgtcagctccataacaatttgctatatttttcaattttaaggaggtccctatgctcaaaacactgctttcccatctgcgggaattcaaacgggtctccatcctcacgcccatctttgtggtgctggaagtggtgatggaggtgctcatccccctgatgatggccgccatcatcgacaacggggtggagaaggggaacatggcctatgtgtaccgcaccggtctgctgatggtgctcatggcgatgctctccctatttttcggcgcctgcgccggacgcctggctgccaaggccagcagcggctttgcccgcaacctgcgccggggaatgtttgcaaacatccagcgcttcgccttttccaacctggacaaatattccaccgccggcctggtcacccgtatgaccaccgatgtgaccaatgtgcaaaacgcctttcagatgatcctgcgcatgtgcaccagagctcccaccatgctgctgtgcgctctgatcatggccttttccatcaacgccagactgtctctcatctttgtggcagccatcatcttcctgggcttctgcctggtgctcatcaccaaaaactcccatccagtctttctccgggtcttccgcaaatacgacgccctcaatgccagtgtccaggaaaatgtaggcgccattcgggtggtaaagtcctatgtgcgggaagaccatgagatcagcaaatttgaacaggcctgccagaatgtgtaccggctgtttgtccgggccgagcgggtgctggtgctcaacgccccggtgatgcagctgaccgtctatggctgcatcctgcttctgtgctggctgggcgccaagatgattgtggtgaacgacctgaccaccggtcagctgatgagcctgttttcctatgtgatgaacatcctgatcagtctgatgatgatctccatggtctttgttatgatcaccatggcccgggcctcggccgaccgtattgcccaggtgctcaccgaagagcccgacctggaaaacccggaaaacccggtgaccaccgtcaaagacggctccatccagttttcccatgtgaccctgcggtattccgccggaggcaaaccggtgctgcgggacatcgatctgacagtagaaccaggggagaccctgggcatcatcggcggcaccggctcttccaaatccagcctggtgcagctgatcccccggctctatgatgtaagcgaaggctcggtggctgtgggcggtgtggatgtgcgccgctatgaccttcagaccctgcgcaatgaagtggccatggtacttcagaagaatgtgcttttctccggcaccatccgggaaaacctgcaatggggcaaaaaagacgccacccaggaagaactggagcacgcctgccgtctggcccaggcccacgactttgtcacggcgctgcctcaggggtatgacacctatatcgagcagggcggcaccaatgtgtccggcggccagaagcagcggctgtgcctggcccgggccattctgaaaaatcccaagatcatgatcctggacgactccaccagtgccgtggacacccgcaccgacaagctgatcagggatgccatggcccaggaacttccaggcaccaccaagatcatcattgcccagcgtatttcctcggtgcaggattgcgaccacatcctgctgctggacgccggaagcatctgcgcctatggcacccatgagcagcttctcaacaccagccccatctataaagagatctatctttcccagcagaaaggaggggacgaagaatgagccctatgcacaaaggccccatgatgcagaaaggccccgccgtggcccatccctggaaggtgctgcgccgcctgttcgcctatttgctcaaacgttataaattccaatgtctcctggtgtttgtgctcattttgtgcggcaccgccgccatggtcatgggcaacctgttcatcaagacattgatcgacgactatatcgctccgttcctcacccaaagctctcccgatttcaccccgctgctccggcagcttgtgcgcatgggtctgatcttcctggcgggcgctctgtccaccctggcctacaaccagatcatggtgtatgtgacccagggcaccctgcgcagcctgcgctgtgatctgttccgccacatggagaccctgcccatccgctattttgatacccacccccacggggatatcatgagcatctacaccaacgacatcgacaccctccgtcagatgatcagccagagcatgcctcagctggtgtcctcggcggtgaccattctgggcgttctgctctccatgatctccctgaacatccccctcacttgcctgtctttgttcatggtggggctgatgctgctggtcacccggcagatcaccaaccgctcgtcccgttattttgtggcccagcagaaaaacctgggcaccgtcaacggctacatcgaagagatgatggaagggcagaaggtcatcaaggttttctgccacgaaaaggagaatgtggaccggttcaatgcgctcaacgatgagctgttccacagcgccgacaacgccaacggttttgccaacatcctcatgcccatcatgggcaacatgggcaacctgagctatgtgctcacctccattgtgggcgcccttctggccatcggcggcgtgggcggcttcactctgggcggccttgcctccttcctccagttcaaccgcagcttcaaccagcccatctcccagatctcccagcagatcaatgccatcatcatggccctggccggcgcccagcggatcttcaccttgctggacgaagagccggaagaggacgagggcgatgtgactttggtcaatgcctctttggacaaaaacggcaagcttcaggagaccccggaacgcaccgagctgtgggcctggaagagccccgacggcaccctcacacctctgcggggcgatgtgcgcatgaaggatgtgaccttcggctatgtgccggagaaaaccgtgcttcacaacatcagcctctatgccaagccgggccagaaaatcgcctttgtaggcgccaccggtgcaggcaaaaccaccatcaccaacctgatcaaccgattttatgacatcgaccggggcgagatcctctacgacggcatcccggtcagccgtatccacaaagaatccctccgccgctctctgggcattgttttgcaggatacccatctgttcaccggcaccgttatggacaacatccgctatggccgtctggacgccaccgatgaagaagtgatccaggccgcacgcctggccaacgccgacacctttatcgaacagctgccccaggggtatgccaccatgctcaccgccgatggcggcagcctgtcccagggccagcgtcagcttctggccattgcccgggtggcggtggccgacccgccggtgctcattctggacgaagccacttcctccatcgacacccgcaccgagcggatcgtgcaggaaggcatggacaatctgatgtcgggccgcacggtgtttgtcattgcccaccgcctgtccaccgtccacaattccaacgccatcatggtgctggaaaacggcaacatcatcgagcggggcacccacgaagagctgatggagcaaaaaggtcaatactaccagctctataccggcaaattcgaattgtcctgatccagtcaaagaaaaaagctgtccggaaaaatttccggacagcttttttacgcttcttcttttttcacaatgacttttttccgccatttgccccggcggtaggcgatcaccgacaaaatagcgcccatacaccaggaaatcagcaaactgataaacaggcaatagggggagtgcatcacggccgccaggccataggccagcggcacccggatgaccactgtggtgatgagagagatccacatggggctcatggtgtcacccgcgccccgcatgacgccggacagcgtctgggtaatggccatggcaatataacccagggccagcacccgcagcatattccggcccatctccaccacttccggcgtgtcggtgaacagccggatgagggaagaaccaaagatcacaatggccgccaccagcacagcgatgaccaccagtcccagacgcaggccatcccggatgccttcttccacccggtcggtgcgtccggcacccatattctggccggtataggtggtcatggcattgccaaaggtgaagttgggcatcatggcaaagccatccacccgcataactacggtattcaccgccaccaccaaggcgccgaagctgttggtgagcgactgcaccacaatggccgacatggagaagatggcctgggacaaaccggagggcaggcccagaatcaaaagctccttagccagaaggagatgaggcttcaaagtgtggaggttgatatccagggtatccttcatccggcaaagacggaacagacaaaggaaagccgacaggaactgggcgatgatggtggcaatggctacaccggccacaccccatccaaagcgcaccacaaacaaaaggtccagaacgatattggtcagacaggccgccatcaggaaaagcagcggcatcaccgagtcgcccatgccccgcagcacaccggcgatgatattgtaataggccatgccggcaatgcccagaaaatagatgaccaggtaagaagatgtcatatcaaagatctctgtcggcgtatccaccatacgcaaaaaaggcggcaccagcagcgggccgacgatcataataataaaggaagccagcaaagtcagtgtgataaccgttcccaccgtgtcagacagctcggaacggcgtttggcgccaaaatactgagctactatcacattggctccggtggaaatacccacaaacaacaccagaagcagattgatcatgggaccgctggcgcccacggcggccagggcattgtcccccacatagcggcccaccacaatggagtccaccgtgttgtaaagctgctgagccagatttccaatcagcaaagggatggaaaactggatgagttttttcaccgggctacccaccgtcatatcctgggcgcccataaagcgggcaaggcctttggccatgtgatcacttccttccatgattttcaccggcaaacagtttagagtcgaaactgccgtaatgcaaatcatatcacaaaatcagggattccgcaagcgacccaggaggtcctatttaagagatgcaaaaaccggcgcacaggccgccggttttgcaaattgataagaggtaaagcaaatgcttccctctggctatatcggtttttccacagtctggcgtttcctgtcaaggcagttttttgccgcagcggcggcagaaatcatagtccttttctgccggggccccgcaataagggcaaaagcctccttccggccttttgttttcttcctcgggggaggagggggaaaaccgcttttccagcgggtcaggttcctcgccttcctcggtgatatcaaacaccgaataccggttttccccggtggcatttttgaactgataaacggcctgcaacatggcaaacacaataaagaccacaccgaacagggcaaaaattccggcccccatctgcaccgccgccatggtccagatgacgccgaatacgccggcgaaaatgctgcccaggcctcccatcatggaagggccccgtccgggcttgatgcttttcataaaataccctccttgccataaccccattgcgcaaccaaccatccgatttttctcagtatagcacaggtttcttcgcagaaaagaaacagaatgtaaaaaaagacctgggaaaatgaacaggtccagtaaaaacggacagtgacaaaagaccccctgatgtaggaaaat

SEQ ID NO: 686 - DNA, 1968 bp, Unknown
  16S sequences of unknown bacteria
atctgtaatgatcgcgatgaacatccgggactacctcagaactacgcttatatacgacacggaagggcagcttctgcccgggtgcgtccgtatcgaagggctgcaagtcccgggctgtgcctacaggcataccgctcacaacggatacaacagctttttccacattcacagcgactatatgccatcctcgaatgtggcgttctgcgactggaaccacttctgcaacgactaccgcttcatcctgaagcatggcttcaaaggcagacttgagacaatacgcgaagccaaagaaaaattcgccggaaacagggaaaagctcgacttcctcgaagcgtgcgagatcatcgtcgattctgtacacgatctgtccgcgaggtttggctgcgaggttccttatgagcccgcgaagaactttgacgacgcggtgaagtcgatatggatcagctttctacttatgcccgattcgttaggaaggctcgacgacttgttatggccgtactacaggaatgacatcgacgccggagtcatcacgcaggagcacatggtcgaaatgcttggtgagcttttcgtaaagatttttgcgcacgtcggacccggaagacacaggagcggcgacaacaccttcgtcatcggcggctacgtccccgcggacgaaagggaaaccggcgagatcgtcgattatcgcggaatgaagctccgtgacggcttcaccgagctctcggagatcatcatccgcacccgcgtcgccctgccgatatggcgtccgcagatcaacttccgctggacaaagcagacaaagccggaaacgatgaagctcgtgaccgaaatgaacgcgaaatgcgccgacatcgttttcgtgaacgacgaaatattcctccgcgcctttgagcggatcggaatagaaccgcgcgacgccatcgactacaccaagatcggctgcaacgaatggtcgataatgggaatgtcccacaccggctccgacggcttcttcaacacctgcgccgctctcgacgaagtgatgcagtaccacgaggaagagctgaagacgattgacaccttcgataaattctacgaattcttcctgcgctacctcgaccagttcgtcaccttcatgtgcgacctcgccgacaacttccacaccgcctgcgcaaaggacaccaacgtcctctcctccgtgatgatacagggctgcatcgaaaaagccgaatcaatcacccgcggcggcgcgaaatacaacgccagctgctggtcagccgtaggtatcatcgacctcgccgactcactctcagtcatcaggcaattcgtctatgacgaaaagaaaaccacgatggagaccctaatcgacgccctgaaaaacgactggcagggacacgaagcgctccgcgccgatatccgaaagaacggcagattcttcggcaacaacgacgaacgcaccgacgaactcgtcaaccgcctgatagctgacctcgacgcactcgcgaacaaacgcgtccccctccgcggcggcagattcatcttcggctgctacataggctacaacagcgcccacatctcaatgggtctgcgcaccggcgccacaccgaacggcagacgccgcggcgacgcactgaccgcgggaatcatcgccgaacccggcatggacaaaaacggtctgacatcctaccttgcctccgcggcgagactcaactacaccaccctctgcgcccccctcgccgtcaacctcaaactcgacaaaaagctgacctccgaatccgacaagatatccgccctcttcgaaacctacatgaaactcggcggacttcagctccagcccgactacctctcggcagaagacctcaaggacgctcagattcacccggaaaaatggtgcaacctccgcgtcagaataaccggattcaccggattcttcacaagatttgacaaagcttctcaggacgaaattatcaatagaaccgaacactgagaaaa

SEQ ID NO: 687 - DNA, 8906 bp, Unknown
  16S sequences of unknown bacteria
tcgtcggcagcgtcagatgtgtataagagacaggttttatcctctgcacatttgggccttgtatacgctcagcacacaattaccgcaataacatcaaaaacaggtgaattttgtaaaatctccgcctgcttttgatgttattcatctaattacagtttaaaaaatactgaggtataatcttttgcttaaaatttctaacgcccggattcccgcaatactgtttcccttttcatccagagccggtgaaaatattcctatgcccatacgggttggaaccacggccataattccgcctccaacgccgcttttggctggtacaccaacctttaccgcaaaatctcctgacccatcatacatcccgcaggtcatcaaaattgcattgacgtaactggcatattccgacggaaaaattcgttcaccggtcattggctgccgaccatgatttgccaatacaaaaccgatgtgtgcaaggtcggcgcaatcgacacgaatggaacaagcccgaaaatagcagtccagtacttcctccacatcgtcttgtatcattccgtaagtttttaacaaataggccagcgcccgatttttattgccgctctttttttcagacaggtaaacatcttcggccaggcaaatttcgtcatttcctgccaatagacgcgttagattcagcagacgctcaaacttttcggcatagctgccgccacggatcatggtacacatggcgatcgcccccatgttcaccatcggattaatatgttcactaagcagagtttgctctgtgtaattgatggcatcaaaaggctttcctgtcgcctctacccctacccgggaacgaacataatcaacaccgttatccagtagcgcctgcaaaagcaaaattggctttacaatactttgaatcgtaaaatattgatgataatcacctgcacggctgatccttccatcgctggataccatgtagatacccaagctgcgtggatcggcttttgccagttccggaatatagtccgcaagggttccctgagccgtaaacggcgcgcattctcttagaatttcttccaaaagttcgtccattgtccatcaccttttctctgtttacggctagaataacaatctctgagaaaaatgtcaaggcgtcgcttttcaccagaaattctgcaaaacaaatggctataacagcaattcccgcaggtgcaacaaaatctttttttctctgcgtgatacctgcacctgcgtcatacccaaaaccgctgccgtttccacctgcgtcttccctttaaaataacgcaaccgaatcagcatctgatccttttcctccaaaagtgctaatacctgtcgcagggaaatactgtctgccaattcttcttccggcgattctaccggcaggtcaatttgaggagctccctcttcatcgctgccggttaacgacagggctggtgctgctgcggaaagagcttctacaacagacgagacttccagccccagcgaatctgccagctcactgatggtaggctcccggcccaattctaccgaaagccgttctttggtccgcatcgttttcagcgatagttccttgagtgtccgcgatactttaatcgttcctccatctcgaaacaaacggcgcatttctcctagaatcactggcaccgcataagtggaaaaccgaacgccccgttctcggtcaaaagcatctgttgctttgatcagccccatgcatcccgcctgaaacagatcctcatactcaataccccgtcccttaaatttatgcgcacaggcatggaccagccccatattctgttggatgatctcatctcgatcggcagtgatcggcattttattcggctcctttggacaggatcgttttttccagcgtaaccgatgtgccgtgccccggacgggatcgaaccttcactttatccataaacgcctccataacggcaaaccccagtccggaccgctcgccggttgtgcaggtggtatacaaaggctccatcgcctgttttacgtcttgaatcccacagcctgtatcacggatacgaatcacgattctgtttttttctaaaatttttgcatgtatgtagaccgtgccgatttcttcccgatatccgtgtacgattgcgttggtcacagcctcgcttaccgctgttttgatatctgccaattcctcaattgtcgggtccatcgccgctgtaaaagcagacaacgccgttctggcaaatgcttcattggccgaacgactgggaaaagacaacttcatttcatttaatactttcatatctttgcctccgtttttgtgctgtttgtcccgcttttaggcggcgaagaatgaatcgacgcaattctgtccagtcccgccagtctcattacttttttgatggatggagccgggttgtggatttccaccgacccattccattcccgaatcaggcgataacgccccataaccagtccgataccggaactgtccataaaggtcacctcccgaaaatccaggatcaatgtatccggatggttcctttccagcattgtgtctatttcttcccgtagcttgcccgctccatgatggtcgatttctccgatcagacaagcggtaaccattttcccctcggcacacagcttgagtggcattgccgttcctcctttatccttctatattttctgcccggttgggacctcattgcatttttccagataaaaaggacaagcctttattccggttcacttaccagaataaaggcttgtccttaaaaaatttgtcacattgatgcagtttgtctgttttttattttccagcaaactgcgtcatcaaaaccggtcgtgcctgtgatgccaaatacagggatccacagcaaaacaatgccgcatcctcctcgagcaaaggcagtgccgcatcaactgcagattctattgttgaaaaagctttcaccttgccagctattccttctaccgctgctgccagctctccggcgggtaaagcccggggattttcaggcgaaacggcaaaaaacatttccgcttcctgcgcaatccgggccgcagcatgaagccagtctttgtcccgcagcatgcccatgatcacaactttcttcttcggtgttaagggcatcgcctttgcaagtgcttcacatccttgcaggttatgggctccatccagtatgaccaacggttcaacagaaatttgctccattcgggctggaaagacaacttttgcaataccatcagtaatatttttatccgatattgcaaatccttggagttttactgcttctattgccgaaaaagcggttaaaaagttatagatttgatgccgccccgccaatggaagctcaaaggtaagaccatgatagtaaaaccgggatcctaaaatactttccgtacaaatttcgactgattttgcatttggtatgattaagcggttttctttttgggcgcattgcgccataatctcagccagtgcctctggatcttgctgcggataggatacacagatcccaccgggctttaagataccgcatttttcaaaagcaattttctgcaatgtatcccctaaaatctgggtgtgatcatatccaatggcacagatcacagataccaggctttgatcaatcacattggtggcatccaaccggccccccagcccaacctccagacagaccacatcgcagttctgtttggcaaaccagagcatacccaacgcagtaaccacctcaaactctgccggagcgattccgctttgagtcatcttttctaccgcaagctgtattttctcgcacagctttgctatctcttcttccggaatcatctgcccatccacctgaatccgctcccggaaagtcagtacataaggcgaaacaaacatccctgtacgatatcccgcttcccgtaaaacggaggcgcacatgacggtagtagaaccttttccattggtgccggcaatatgaataaaacgcagctttttctgcggttcgcctaaaagggacagcagcgttcggattccgttcaatccaggttcttttgtaaatcggtgaaaggagtggataaacgcttcgctttcctgataattcattgtcatacctccaaggaaagacaggcggatccctcaaagggtccgcctgtcctcggtttgctatttcgagaaagcggcaatgctttctacaatcttttccatccgttctttgtgcttttccagttttgcccgctctgcttcaaccacgttctgcggcgctttttcaataaagccctggctggacagcttttgttccaccatggcaatatccttttcgcaggttttgcgctccttttccaaacgagccaactctttttccttatcaaccagctcatccagtggaataaagatccgggcactgtcggtaatcacctgcaccgcatcggagaaatcctccccttgctgcggcgcaacgccggatacttttacttcagaggccgacgccaatctctcgatgaacattgcgccggactcaaacacgccggtattaagcgttttgacaaatactcttgcttttttggatggcggtacattcatttccgcacggcggtttcgaatggccttgattgcactcatgaccttctcaaaatcctcttcctcctgctggaagcacagatcctcccggtactgcggccaaggagcaaccataatgctttcacagtcattgggaatcgcctgccaaatttcttcggtgataaacggcataatcggatgcagaagctttaagcactggttcatgacataaatcagcacctgctgggcgctttttgctgattcgccgcctgcctgaatccgggattttgtcaattcgatataccagtcgcacagcacatcccaaataaaatcgtacagtttctgcaccgcaatacccaattcaaaccgctccagattctcggtaacctctttgatcagagtgttgagtttactcaaaatccacttatcttcggtttgcagtcgctgcggcagttccggtttgtcaatttcatcggacaaattcatgaggatgaaacgggtagcattccagattttatttgcaaaattccggctggccttcaccttttcttccacaaaacgcatgtcgttgcccgggctgttgccggtggctaaagtaaagcgcagcgcatcggcaccgtactcatcgattactttcaacgggtcgatgccgttgcccaaagacttggacattttccgtccctgcgcatcacgcacgatgccatggataaacaccgtttcaaacggagatttgcccatattctccacgccggagaagatcatacgcgccacccagaagaagatgatgtcatatccggtgaccaacgtactagtaggatagaagtatttcaattcctcggtctgattgggccagcccagtgtagagaaaggccaaagagcagaggagaaccaggtatccagcgtatccgggtcttgctgcaggtttttgctgccgcattttgggcaggtgtggggctcttctttggctacaatcacctcgccgcagtcctgacaataccaggctggtatccggtgcccccaccataactgccgggaaatgcaccagtctttgatattttccatccagtgatagtaaattttgctgaaccggtccggaacaaatttcgtttccccgctgcgtaccgcctcaatggcgggaccggccagcggttccattttcacaaaccactgcttggacacccgcggttccactgtggtagaacaccgatagcaggaacccacattatgcttgtgatcctctactttaactaagaagccttccgcttccagatccgctacaatctgcttacgacattcatagcgacccattccccggtattttccgccgttttcgttaatggtcgcatcgtcgttcatcacgttgattaccggcagattatgccgcagccctacctcaaagtcattggggtcatgggcgggggtgattttaaccacaccggtgccaaaatccatttctacatagctgtctgccacaatgggaatctcacggcccaccagcggcaggattaccgttttaccaaccagcgcttgataccgctcgtcatccgggtgaaccgccagcgccgtatcgcccaacagcgtctctgggcgggtggtggcgatttccagatagccgctaccatcagacaagggataacgaatgtgccagaaatggccgtcgtgttcttcatattctacctccgcatcagagatagaggtcaagcaatgggggcaccagttgatgatgcgctcgccgcgataaattaatcctttttcatacaagcggataaaaacttcttttaccgcctcagagcagccctcgtccagcgtaaaacgttcccgctcccaatcgcaggacgaacccattttctttaactgctcaacaatttttccgccataggtctttttccattcccaggcgcgctccagaaagccctcccggcccagatcgtccttggtcacaccttctttgcgcattgcttctacaatttttgcctcggtcgcgatagatgcgtgatcggtgcccggcagccacagcgcctcatacccctgcatccgtttaaagcggataatgctgtcctgcagcgtacagtccagcgcatgacccaaatgcagctgcccggtaatgttgggtggcgggatcacaatggtatagggttttttcttagggttcggttctgcatgaaaatagcgtttttccaaccaaaaccgataggtcttgtcctcaacctgtttcgggtcgtagaccttttccagttcttttttcattttctcctccttctgctctgtttcagccatgtaggggcttagtccagtgcttctcattccccatgtatttgggcttaatggttattatagtagaaaatataaagaaaagcaacgaaaaacatttttattgacaaccgtttatactgtatataatatttatatacagtataaacgcacaaagaaaggaggcagcctgattggagttctatatcagcaattccagcgacaagccaatctatgagcaaatcatgacgcaaatcaaaagccaaatcctgtctggagcgctcaaagagggcgatgcgctgccttccatccgcgtactcgcccgggaattgcgtatcagcgttattacaacaaagcgagcctacgacgaactggaacatgcagggctgcttcattcggtagcaggaaagggtacttttgtggctgccgctgatccgcagcttctgcgggaagaaaaaatgcggcaattggaggatttgcttcaaaaagctgtaaatttgtcccaagaacatggtatctctctggaagagctgacccaaattctaacacttatctatcaggaggaacggtaaatggataccattttacaagtcaaaggcctgtgcaaaaaatacgaagactttgcgctggaccatgtttcctttacactgccccgaggctgtattatgggctttattggggaaaacggtgccggaaaatccactacgatgaaagcgattttaaacctgatccgccgcgatgaaggagatattcagatttttgggaaagacaacatccaaaacgagctggaagtgaaagagaaaatcggagtggtttttgacacaatgaacctgccggaaatgctctgggcacaggatgtgggaaaaatgatgcgttctctgtaccggcagtgggacccggcaaaatatgcacagtatctggaacagtttgaattgccggccaaaaaaacaatcaaggatttttcccgcggtatgaaaatgaaactcgccatcgcggtagcgctttctcacaatgctcagctgctgttgctcgacgaagcaaccagcggattagaccccatcgtccgggacgagatattggacattctgctggactttatccagaacgattcccgcggcgtgctgttttcttcccatattaccagcgacttggaaaaaatcgccgactatgtgacatttattcataaaggaagaattttcttttccgaccccaaggaccagttgttggaacaatacggtattctcaaatgtaccgagaaagaactcgccgcactagatcgtaaggtaatcaaaggcgttcgccggcatcagttcggtgtggaagctttggtagaaaagcaacggatatccagcggatatcccgtcgacaaagcaagtatcgaagacattatgctgtttattgcaaggggggagcgccaatgaaaggtttactgctgaaagatttctgccttttaaaaaagcagatgaaactgatggtcgtctttgtgatcttctatgctatctgtgccgtcgccgcaaaaataccttctatgatgggtaccatggtaattcttttgagtattatgatgccgattacttctatgtcctacgatgaagccgggcagtggtaccgctatgctttttctctgccgatccctcgccggacactggtattaagtaaatatgttctggggtttttggttgcattgggaggtctcgtggtctccgcaatcggcaatctcgtcgttttatccctgaccaactgggaaaattcactggaatcctggctgatcatcgttggctttttggaaatcggcatgatttttctttcgatcattatcccggtactattccaattcggtgtagagaaaggccgttttttagtcgttgtgatagcggtcgttccctctctattaattgccatgctgggcagcctgttgaagacctccggtgtccccatgcccagtgcagaggttttgcaggcaattctatactcttccccgctgtttactttcgccgtcttcctgatttctttccgtatatcggtgagaatctgccagaaaaaagaatattgaaatagtatattttcttttgtatttttctctgaggcaaaacttcatgggtttggagcacaccgcggttatacgccccattgatac

SEQ ID NO: 688 - DNA, 3916 bp, Unknown
  16S sequences of unknown bacteria
ccctaaggccaggcctacccttgccgcataatctaccaccgattgattcattacgggcaagctgccgggcaatcccaggcatacagggcagcaatgggtattttcctcaccgccgaacacattttcacagttacagaatatctttgtcttggtggccaattccacatgaatttctaggccaatgacggtttcgaacttcatttcgcgcctcctttttggcaaaccggacgaatcatcgattggccgaaattctgctggtaggcatggccggcgttgaggactttggcatcttgataatgtgcgccgatcagctgtaggccaatgggcatgccatcctcatccttaccgcagggaacggaaaggccgggcagccctgcgatgttgactgcaactgtacacacatcggcggcatacatggccagcggatcggtcacttctcccatttcccaggcaacgttcggggaagtgggcgtcaacagtaaatcataggtttcaaaggcttttctaaaatcccgtttgatcagcgcacgggaggccagcgcctttttgtaatacgcatcatagtagccggcggatagcacgaaagcgcccagcataatgcggcgttttacctcatcgccaaacccttcggtacgggtacggatcagcatatcctcaaagctttccgcctcttcggcccggaagccgtaacgcacgccgtcataccgggccaggttgctgcttgcttctgcacaggccaatagataataggtgggaagcccatattgcgtcaaaggcagcgagcagggctctacgatggcccccagcgattccagatcacgcgcggccttttgtaccgcttcgcgaacctgctgggttacgccttgcccgaaatactcctgcggtatcccgatttttacccccttgacatctccggtcaaagaagattcgaacttaggtgcggcctgctgcatggaagtagaatccttagcatccgggccggcaatggcgtccataacgacagcacaatcctccacagtgtgggaaaacacgccgatttgatccagcgaagaggcaaaggcaatcagcccataacgggaaaccatgccataggtaggcttgaacccaacaacgccgcagagcgaagcgggctggcggatggaaccgcctgtatccgtacccagggcaaaggctgccataccagaggctacgatggctgcgctgccgccgctgctgccgcccggtacacgattgagatcatgcgggtttttcgtttcaaaaaagtaggaggtttctgtagaggaacccatggcaaactcatccatgtttgccttgcctaacatcacagcatcctgattgaatagcttttcaactgctgtggccgtataagggggcacaaagttttccaacatcttggaagcgcacgttgtctcaatgccttttgtgcataggttgtccttgatggccatagggatgcctgtcagcggctgtgctgtgcggtcgtccaaccgttgctgcgcacggacggcctgtttttccgccgtctgcggattcaggctgatatagccctgcaccagagggtctacatccgcgactcgtccttgatagctttgcattgcctcggaagcggaaatctttttctcccggagagctgcctgcaattctttgatggtcatttcgtatgcttgcatgttgcgcctccttatacgatccgaggaatgagaaaaccatctccgtccgtttcaggcgccaattcaatgacggcctgcttgggcagagagggggcgatctcgtctgcacgcaccacggcatggtcggcctcgggtgctacgctgacgccttcggtatccagctgggacagctgatccacaaaggccaaaatactggaaaattcatcggtaaaagcgtccaactgctcatcggtgaaggacagctttgccaactgcgccaactgggcgatctcgttgcgatccacgggttgatccgctccttttgggccatatagcctatttactcatgatggaatactataccatattttgcggagaaaccgcaatgttcgtatgttattgatataaaaaaatcaacgcttagcccgaaattggacggtatgcgtgagaaaacttgggatattgaggtacaaaacagaggaaaacggaggaaacaaagcctcgttttatgccgtagaaaaaggcggcaattttgctggggaaaaattcgttttgccacgtttgcttgcttttcggcccgtctggtatactacatagcgtgaagacagaaaggatgatagcttgcaccgaaaatttacagagaaagacagagcacagtatgtggcgatgagccgggagttttatcagggagatggcgtaagccatgctgtgccggaagaaaacttcaacaagaccttcacactaatcttacagaaaaatccttatttggaagggtggatgatcgaatcccaaggccgtgcggccgggtacattctactgagtttcacctatggaaacgaggcaggcggcatgattgtgctgttggaagaattgtatatccggccggaataccaggggcaggggttgggaacccaggcgcttacctttgtaaaagagcagtatcgcaacagagctgtggaaattcagttggaggtaatgccgcaaaacaaaggggcaattcgcctgtatcgcaggcacggatatgaatccatcgtatatcgggaaatgagcctgtcgctgacagggcgaatgtaaaaaagcaagggatgctcccttgcttttctttatctctggctttctgtatcttagatgacatagaacagaatgcaaaaataatgcaaaatggcgccggccaagacaaacagatgccagatggaatgaaagtatttctttttgctggcaaaaaagccgatgccggcggtatacatgacgccgcccagcaccaacagaacgatgccggatacaggcagcgccttgaccaaggggaacatagcaacgacgatacaccagcccgtagcaatgtagcagaccatgccaaagaccttaaagcgctctaaattgatggcgctaagcacaatgcccaaaatggtagcgccccaaaccacgccgaaaatcgtccatccccagccgccgcgcagcgtaaccagcgtaaagggcgtgtaggtgcctgctatcaatagataaatagaggtatggtcaaaaacccgaaatactcgcttggccgtcttatgattgatggcatggtatagggtggacatcataaaaagaaagaacactgcgaacccatagatgcatacgcttacgattttccatcggtctcctgttaaagccgcaaatacgattaaaaccacagcgccagccagtgccataagagctcccaatccatgcgttatggaattggcgatttcctctcccagcgtataaaaaccaaggccaatcttttttgccggctttctttcctttttttgtgatacctgcatgcattgtcccctctttcttaggtttaaagcagcgtttcaagcctttctgcgcaaaatgaaacatacttcatacagggcctctcttccgtttgagcctgctgtgcatctcgtgctttcaatgcttggcactgtaaagagccgaatgtctgctcaaactcttgggccagctgctgcatggctgtacggtaggcctgtttggcttgcgtatccttcgggtccgcagaggatactgcataagacaacgccatggcggcgccacataacgccccgcatatctgtcctacggccacgccgccgccaaaggctgcggagagcttcattgcttgctcctgcggaattcccatactttctgcaaaaggcaaaaatacgctttgcgcacagttataaccggtttccgcctgaaaataacgacaggccttttcctgttggctcataaaaatcgctcctcttttattagtatatatggtt

SEQ ID NO: 689 - DNA, 2452 bp, Unknown
  16S sequences of unknown bacteria
gctcatattccacgctccgagttcaagtttgctgaacttattatagcaccatttttttccattgtcaaggggtttcggaaaaatttttgtttttttttgaaaatctcttgattttatttgtcagaaaaggtataatatatctgtgagattatatctgcccgtcgttttcgccgtgaaattcgcgtttcaggcgaagactcccaaaaaaaatcctgaagaaaagatcggtaactcatggaagatttcagcacgcggctccgccgcatcatgaacgagcgcgggatctcgcagtcggagctttcaaggctctccggcatcccgaaatcggcgctcagtcagtatatgtccgggcttttccggccgaaacaggaccgcacgctcgccctcgccaaagcgctcgcggtggatccagcgtggctcctcggctacgacgttccgtcggacgcggcgaaaaagagcggctccgggacaaaaaaaagtgaagaggattttcatattcttgacgcgtacaaatcgctttcgccggaagaaagaaaacttgtttcagattacatcgacaccctgaccagcgctcacagggggcgtgaaaagttgtcccgggacgatagtttgcattccggagaggtcttccgcgccgcgaaatcgagcggaggcaacgcctcgccgggtcgcgaacggctctcggaagaagacctcggacggataagctccgctccggagaccgacgaggatctgtgacgccgcggggagacacggacgcttccacgcgccgcggaaaggtctccacgacgcctctactttgcccggaaaagcgcctgtttatcggcatcctggcgattcggagggacatattatgtctgatttctacggcgtctacgcgcactgccgcgactccgcgtggcgctgtctcatagacttcgacgtgcgcgagctgccggtcaaggtcgtcgccatcgcgcggcgcgcggggatacgcgtcgtcaaggattcggacgtcggcgaactgaggcgggacgagtacggggcaagcatcaagtgcgccgattcgtggacgatagtttacgacgacagtctgcccgcggaggagtcgaggttcgtcatcgcgcacgagctcggacacatttttctcgggcacgactacaagtactccgggcacgcgacgatcatcgacgagcgcaagctgcgctcggaaacgcaggcggatatgttcgccgagcggcttctagcgcccgccttcgcgctgcacgagctcgaaatcaccgacgccgacggcatccgcggtctgtgcaaacttccgcccggagcggcaaagcggcgcgcgagacgcatggaacttctcgaggagcgcggtgcgttctacgcaagtccgctcgaaaagcggctctattcgcggttttacccatggctcatcgagttcggggaggggaagtgggtcagatagacgctttttgtccgtcatttcgcgatgttttgcttgcttcaaggcgatggttttcatcattcttacaaatatcagaaaatttacggaatgtacttgcaatgtgcgcggttttgtggtaaaatattattatctaatgatatgcgcacggctgctttcaaaatctttcagcgcggaccggcagcgcaatttttcggaggtttttttacactatggatatcgtactcggaatcattcttctcatcgccgcggtcttcctgatcgtctcggtcctgatgcagaacggcaagtctcatgaactctccggcgccatcgtcggcggcgcggagacgtttttcggcaagaacaagggcgctactgtcgacaaggtgctcagcaaggtcacgtctgtcgtcgctatcgtcttctgccttattgtcgtcgctatgtatattttccaggaagacgtcgattattccaatataatcagcaatccttcgactgaaaccaccgtttctgacggctcagacgctgccgacacgaccgtcgccgacggcgagaccaccgcagctgacgctgaaaccacggtcgaagagactaccgccgctgaataatcttactattgtagaatattgccaccgtatgacggcgtgttttcctgcgctcatttcgcgccggagcacgccttttggcgtttttgatggtcgattaacgactattttgcagcgcctttacagaaaggatgaatgaaaattgcagaaataccatgatcttgccggcatgaccgaggctgttatgtcactcacatcgagcgacgggtatgtgccgatggacgctgacgacatcgccattgtcctgtcggttccggaggaagaatccgggctgcttgagcaggcgcttgacacgcttatttcctcgggaatcctcgcacggacaaaacgcggaaagctcgccgctgccgccgaaaccggactgataagcggaactttccgggcgacgacccgcggcttcgggtttgtcactccggatccggtc

SEQ ID NO: 690 - DNA, 32759 bp, Unknown
  16S sequences of unknown bacteria
cgcacctgtcgccggaataacgaaaaatgcggcgttaccgccgcaaatacaaattcaatgatttatcgacaaactgcacgcgccgctgaatatgcggcgcttttttattgcaatttgcctgccgtattatacgccgacgcattaaacgcataaaaaagtaaattatttttaaaaacggcgcggtatatgttgatatttcccgccgctttaagtataatagaaaggtataatgatatattgggggcaattaacttggattgcaaacagttttttaagcagataaacggtaaaaaaatagcaatgtgcggtataggagtgagcaacactcccctggttttgaattttttgagtaagggcgcgacagtttacgcctgcgaccgccgcagccgcgaacagataggcgcattggcggatgagcttgaagcggcgggtgcagcgctgcgcctcggcgacgggtatcttgataatttagaggttgatattatattccgcacgccgggtatgaacttcaacttgcccgagcttgaggcggcgcgcaaaaagggaattgcggtcacgagtgaaatggaagtatttttcgacctttgccccgcaacgatattcgccgtcaccgggtcggacggaaaaaccaccacaaccacccttattgccaaaatgctggaggcagagggaaaaacggtgcacctcggcggcaatataggcaagcccttgctgcccgaaattgagagcataaagcccgaagatttcgtggtggccgagctttcgtcatttcagcttatatctatgcgcaaaagccccgacgtggcggtagttaccaacgtagcgcccaatcaccttgacattcataaggatatggacgaatacgttgaggcgaagaaaaatatactcctgcaccaaaacgcgttttcgcgcacggtgctcaaccgtgataacgatataacccgcgaattcagaaagtatgttcgcgggcagtcgctctcgttcagcatggagcagccgcttaaaaacggcgcctggctcgataccgacggcaccattcatatggcgtaccgcgggattgacgcacccattatgcaccgcagcgaaatagcggtactaggcgaccacaatgtcgcaaattatttggctgccatagcggcagtctggggctatgtgagcatggactcgataaagcgtgttgcgcacgagtttaaaggcgttgagcacagaatcgaatttgtgcgcgagcttgacggcgttaagtattacaacgattcgatagcctcaagccccacccgcacaatagcggggctcaaggccttcgactgcaaggtgctgcttatagcgggcggatatgataagcacatcccctttgaacccatggtgccttatgtgattgaaaaggtcaaaaagctttatttatgcggagataccgccgaaaagatcgaaaaatgcatccgcgccgataaaaactacaatggcgagccggaaattgtaagggttaaaaatattgacgaggctgtagcagcagcgcataaggacgctgtttcgggcgatattgtgaccctaagccccgcatgcgccagcttcgatgcgttcccgaattttgcagcgcgcggaaattactataaggacttggtaaataagctgtaatggatattaaagaggttttatttaagctttcaagccttgattcggtaggggctgtacacgatgcggcggattacgccgccgaggagcttaaaaaatatgcggaggttgaaaggcgcggcgccgcggttataggaaaaataaaaggcgccgccgattactccgtcttgcttgatgcgcacatagaccaggtggcgttcaccgttaccgacattgacaacgagggctttattaccgctgcctgctgcggcggcatagatctgcgcacgctgcctgcccgtgccgttacggtgcacggtaagaaaaatattcccgctgttttttgcagcaccccgccgcaccttgcaagcggagaggtggaatattccgacatagcaagcataaagcttgatacaatgctgggcgctaaagctaaagatttagtgtccctcggcgattacattacattttccgcagagcctgccgagctttcgggcgggcttgtaacaggccgctcgtttgatgaccgcgcgggcgttgcctgccttttaaaaacggcggagctgctttcgggtaaagcgctgccctgcagagtggtgttgcttttcagcgacgcagaagagcttggtatgcgcggtgccgccgcggcatccttcggtatacgccccgatgaagtaatagcggttgacgttaccttcggggacggtataggaatatcggcggaggaatgcggcaaattaggcggcggacctatgataggcttttcccccgtgcttgacggcggcgtttccaaaaagctttgcaaggtggcggcggaaaacggaattgcatacgcccccgaagttatgggcggcaaaacgggcactaatgcggatgtgctctcgacagcggaaagcggcgctaaaacctgcaccgtttccattccgctgcgcaatatgcacacagaggttgaaacagtaagccttgcggacattgaaagctctgctgagctgctcgcaaaatatattttgtcgggagggcttttaaatgcttgaaattttaagggagctctgcacacttgatgcggtttcgggggacgaggctgccgtaagagactatatcataaataaaataaaaaatcattgcgaatacaaaattgacccgctcggcagcattatagcctttaaaaagggcaaaaaaacgcccgctaaaaaggttatgcttgacgcgcatatggacgaggtcggcttaataataacatatattacggacgacggttttctgaaattttccgccgtgggcggaattgatacctcggtgcttatgttccgccgcgttaaggtaaacggcataaacggcgttatttcgggcaagcctatacacctgatttccgccgacgagcgcaaaaagctgcccgacccgcactcgctttatatcgacataggcgcttcctctaaagaggaggctttaaagcttgtctcccccggcgaccgcgccgtgatttgcggggaatatgccgacgcgggcgataaaataaaatcaaaggcgcttgacgacagaatcggctgcgcggtgcttatttctatgctcttaaaagaagcggagtacgatttttacgccgttttctcggttcaggaggaagtaggtcttcgcggcgcgaaagcggcggcttacaccgtagcgccagacgcggcaattgtgcttgagggcaccactgcggcggatattgcaggcgtcgaattttcaagaagagtctgcgctttaggcggcggtcctgcagtttcatttatggacagagccaccgtttatgataaagcctactataatgccgcccttaaaagcggcataacctgccagcccaaggcggcggttgcgggcggcaataactcgggtgcggtgcacacaagccgcggcggagtgcgcacgctggcgatttccgttccgtgcaggtacattcattccccggcctcggttgcggataagtgcgatattgaaaacgcgctgcggcttgcggaatatatgcttaaaggcatttgcagcggcgaaattgaatgataaggcttgtaaacgctctgcccgaggttttgaaaccgactgcggagtatataagaataaagtgcctttttgattgctacagtgaatatcccgatactcatttttggcagcagacgggttcggaaacatatatttccatgtcagacggtaatatgaccgtttcttacggcggcgggaatacggcggagcttgccgggtttattaaaatgcttaaccccaaaacggtttttaccgacagtgcgacctttgaaaagctcggaatacagcctgacgaaacggcggaggtaatggtgcgctgtgccgatacttccccgctttccgatatcggggacaggctttcaagcaaggatatttacgaaattttttccgctgcggggctggatgtgcccgattatccccactttgcggttgattactgccgccgactgaacaggggtggggcttcactttggggaattaaaaacaaatgcgccgcagtttcttttaatacgggcaattacgccctgctttgcgggcttgcaagccttgaaaaaggcaaaggcgggcaggcgcttaaagcgataatatgcaaaaacagcgggcggcaaatgcttttatgctgcaagccgccgcttgtgcgattttatgaaaaatacggatttaaaaggctttacacagccggttataaggtgagaaagtgaacataaataatttttttaatatagatgaacgcttaatgcagctggatgaaaaaatacttgcggaagtttccccgcgttttaaggaaacagacgatataaccgaatacaatcagcttaaaatgctttcggcgtttattaaaaacggcgtaaccgaatcggcgtttgcgggctctacgggctacggctatgacgaccgcgggcgcgaaattttagagcgcgttatggcggacgccatgggcgcggaggattctttaatacgccacaatttcgtttcgggcacgcacaccttaacggtggcgcttttcgggcttttgcgcccgggcgataaggttttggtgcttacgggcagaccgtacgacaccattacgggcgttttcggaattgacgaaaaaaccgacggttctcttgccgatttcggggttgaataccacgaaatagcgctgctgccagacggcacgcccgataaggcggcaataaaaaaggagcttgccgccaatacctacaaaatggcatacattcagcgctcgcgcgggtacagcacaagacccagccttacaatagagaaaatacgcgagctgtgcgatatagtgcgcgaaacttcccccaaaagcattataatggtggataactgctacggcgaatttaccgaaaagcaggagccgtgcgaggttggagcggatattattgcaggctcgcttattaaaaaccccggcggcggaattgcccccacgggcggatatattgcaggcaagcacgagcttatagaaaaatgcgcctacaggcttacctgcccgggcgtcgggcgcgaggcgggcgctaccctcggacacagcagagagctgtatatggggcttttctccgctccccatgttgtgggcgaggctatgaagaccgccgttttcgcatccgctcttttcaaagccttgggctttgctgtaactcccaagcctgacgataaacgcggggatattattcagtgcgtgaccctcggcacggcagaggggcttattgccttttgccgcggtatgcaaagcggcgccccggttgacgcctttgtaacccccgagccttggtatatgccgggttatgacgacaaggttataatggcggcgggcgcgtttacaatgggcgcctcaatagagctttcggcagacggacccttgcgcccgccttatgctgcttggatgcagggcggactaaatttccacagcgcgcacgcgggagtgctgcttgcggcgcagaaaatgctcgaagtcggagaaataaagctataacggaagtgaaaacgaatgaaaaaaatattttcgggcaaggtgtttgatgtgctgccgctgtcggacggcataatattttcctactgcaaggatgttattgacgagaacaccattgtctcatataaaatgatttcctttgaaaacgggcattttaccgatgtcgctcggaatatatacctgctcaccaaattcggcaacaactataaagccaccgctatgttctgcggtaattatatcaccgcaaaatcaatagttttgcctaacagcaaggtttttctgcttgaggataacggcagtgccgcccttttggataacgatgccacgctgctttggtcgggcgagcttaaataccgcggcggtgcggcggcggatattgcgctttacaaaaacacgctttgggcaagctttcccgagtgcaatgtgcttttgcgctacaatctttccaccatgcgtgaggagctgcgaataggtggtaacaagtcgcccttcagccgccccgagggactttttgttgagggagacagtgtcatggtctgcaattcgggctcttcaaagcttattcaggtagaccttaacagctacagcgtttttgaatacgaggattttgaagaaccgatccatcagtatgtcaaggtcggagactgccgctttgcggtgctcgattcggggctttatttgatttaaaacactcatttcagccgctccgctttaatatatataatatatatcatatatcaagaaacggggcaatggctatggaagaaaacagatcccttcagcccgcaggaattgcgggcattttaattaccgaggcaattgcggtcatattgctgcttttggctttaacggcgatgaaatattttttcaaaggctcttatgaggatatcaagagcttttatgataccgctctttgcactgataccgatattaaggaagtaatagaaacggcgggcggtgacatagttgaggtttaagcttttcggaacggaattttacatatccttcctgttttccgccgttattaccgccatgctcgcatttgacagaacgggctatgccctgccgcttatttttgcggttgtaatgcacgaaggcgggcatttgcttgttatgtggatactcgattgctcgcctaaacgcgtacgccttgtgcctgcggcggtggaaataaccaccgcattcggctgctcgcgcaaaaaggaaattgccgtagcgcttgcgggtcccgcggtaaatttagtgctgttttttacgctttggtttaactttcttgcatataaaaacgagccggttattgtatgcgcgcttataaaccttttgattttcgctttcaatatgctgcccgtaacggggcttgacggcggaacggtgcttttctcgctgctcacccgccgcaaaacccccgaaaaagccgcgcttacaatgcgtataataaatttatcgcttgcagctttggtgcttttcgccgcagtttacctctgctttcacggcaaagtgaatatttcgctttttataacggcgctttaccttattgttataagtataattaaaatgtagttgaaagagcggctgcaatattgtataatttaattcaataaattatacaaaggaaatttaatatggatgaaaaaccgatagtccctacaaattgcttttttcaaggttgctgcaaccctgcatacaaagcggataggacaagctatacgacctattcaccggaataaactcgtgtttaatacaaaagttgaaaggaaggctgtcaatgaaaaaaattaaaatagatgccttatccgaaaatatttccgacagagtggaaagcgatattaaaaacaataatatcagcggcgcgtccgtttcggtaataagccccgataaaacacttatcaaggcacatttcggaactctttcggcagaggataaaaccccgccgaatgactccacacttttcagaatggcttctatgacaaagccggtaacagccgttgccgtaatgacgctgtacgataaaggacttttggaaatagatgacccggtagaaaaatatcttccgcaattcaaaaatatgtatatagccgaaatgattgacggcaaggcggaaaaggtgcgtaaagcccaaaccacgcttacgataaagcacctgcttacgcatacatccggtctggtttcgggcagctgcggggaattttacgcaaatgaactttccgatgatacgaataaaacccttaaagatacggttgattattattccggcacaggtctcggctttgagccatatacagaaaatcagtacaacgccaccgccgcgtttgacgtgcttgcaagaattgcagaaatgatttccggcatgaattatgcggattttttgaagaaatatgttacagacccgtgtgaaatgtacgatacggcttttgtaccgaataatgggcaatgggaaagaataatccccatgcataaaaaggaaaacggcaaaagcggaatttccgaaatgaaaaagggctgcgttttcggaaatgtacccataacgcattatcttggcggagcggggctgatatcctcactcggcgattatacatcctttgcgcgaatgctgctgaacaaaggcgtaataaacggaaaccgtattatttccgaaaaggcggtaaagcttatttccacaccgcaggtgcccgaaagcataatgccgggtaacgagcgttgggggcttggcgttagggttataacaagcgaaaattaccgttttctccctgtgggggcgttcggctggagcggcgcctacggaactcatttctggattgaccccgtgaattcaatcgctgcggtttatatgaaaaactctatgtttgacggcggctcgggcgcggttaccgcggcaaattttgaaaaggatgtttttaattcctttgaggaatcttaaaaaaacggagataaagaatgaacgataaagaatttgaaagactgctgctttcggtgcaaaagccgggcagatactcgggcggcgagataaacagcgttgtgaaggacaaaaacaaggtagacgtgcggtttgccttctgctttcccgatacatacgaaataggaatgtcgcatttgggaataaaaatactctattcccagtttaacgagcgcgacgatatttggtgcgagcgcgtttttgccccgtgcgaggattttgagaaaataatgcgcgagaaaaacattccgcttttcgggcttgaaagccgcgacagtatacgcgattttgattttataggctttacgctgcaatatgaaatgtcctacaccaatattttaaatatgctcgaccttgcgggcgtgccgctgcgcgccgccgaccgcacagagctttctcccttggttgtggcgggcggaccctgctgcagcaacgcagagccgatagccgactttttcgaccttttctttttgggtgagggcgaagaggtggatttagaggttatagacctttacaaggagtataaaaagcagggcaaaagcaagcgcgagtttttgcgcgcagccgcccaaattgagggggtatacgttccctcgctttatgatataagctataatgccgacggcacggttaaagcgataaccccgcttgacggcgcgcccgccaaaatacgcaagaggattataaaggatcttgatacctgctattttcccgcaaagcctgttgttccctttattgaggttatacacgaccgcgccgtgcaggaaattttccgcgggtgtattcgcggctgccgattttgtcaggcgggctttatctgccgccccgtgcgcgaaaaaagcgtggaggttataaacgcgcaggcaaaggctacctgcgaaaatacggggtatgatgaaatttcaatttcatcactcagcacaagcgactacacaaagctagagcctatgctcgaaaaaatgcttgaatggacggagcctaagcacataagcctttcgctgccgtcgctgagaattgataatttttctaaagagcttttgcaaaagaccaaccacataagaaaaagcgggctgacctttgcgcccgaggcgggcacgcagaggctgcgcgatgttataaacaaaaatgttaccgaggacgaaatcttccgcacctgccttaccgcctttgagggcggctatacggcggtaaagctctatttcatgctggggctgcccacagagaccgacgcggatttagagggcattgcggaattggggcaaaaaattgtagacctttattaccaccaggaaaacaaacccaagggcaagcccgtttcggtttcaataagcgtttccacatttgttccgaagccctttacgccctttcagtttgagccgcagatttccaaagaggaaaccgagcgccgccagtattacctgcgtaactgcaataaaaaccgcaaggtaaacataagctggcatgattcggcaaccagctatatggagggcgttttggcccggggagacaggcggttatcgagggttattgaggcggcgtttaaaaagggctgcaagtttgacagctggacggaatatttcagccttgaaaagtggcttgaagcctttaaggaatgcggcattgaccccgatttttatacatcccgccgacgcgcatatgatgaaattatgccgtgggagcaccttgattacggcgtttcaaagagctttttaatatccgaaaacaaagcggcgcacgcgggcgttaccacacccaactgccgcgaaaaatgctcggcgtgcggcgccgcgcgctatggggagggcgtctgctttgaaaaacgttaggattttttacaccaagacagaccgaatgaagttcgtctctcaccttgatatgaaccgccttatgagccgcattattatgcgggcggatattcccgtgtggtacaccgagggctttaatcagcgtatttacattaactatgccgtgccgctatccttaggctttgaagggctgtatgaaataattgacatacgcttaacagacgataattacccgttagataccttgccccaaaggcttaacggcgtgtctgttcccggtattgagtttatccgcgcggcagagccgcatttgccaacaaaggatatttgctttgcgggctaccgcctgcaatttgacagcgccgaatttttccccgagcttgaaaattttttatcgcgggaaagcgttatttgccaaaagcgggataagcgcggcggcacaaaggattttgatattatacctagtataaagtcgtttgagcttgcaggaaataccgcgcaatttgttttggcggcgggaaacaacggcagcctgaacccgtcgcttattatgagcgcgttttttgagcaaacaaaaaccgcacccgtatattgcaccgtcactcgttatatgctgtttgacggaaatatgaaggaatttatataaacggaaaatgctaacttgaccgtaaagctcgtttcgaatataaaatcccgtgtaagcttctttaaaactgaagcccgcacgggattttttgtacttttatatttttattattatcggcattattccgtttgcttcaatatctataacagcgtagcttttgctgccgtcgcgcggctctgcgcaggagccgggattcacaacatacattccgtcctcatataatacctttgaagcatgggtgtgcccgtaaagcgcaatatcacagcctgcggcgagagcggcggaaataagtctttccgtcccgtatttaacacccaaggtatgcccgtgggtaaaaaatatcccgtgccctgctatattcgctatgtcggaggatggatatgaagaaaaaaaatcgcagtttccgctcacaatatgaaaggtcttatcgggatagagccttataagatcctcgatatctcccgtcacatcccccaaaaagaaaatatggcgggcgctttgctgcgcgtcaaggattttttttatattcccgcttcttctgtgcgagtccgaaataacgacaattctcattacaacacctattctacaaaattgtttttttacataatatattaaaggggggttgagttatgaactacaacgatataaacaagcaaaggcttatcgacgcgctgctttcctcgtccggcggaaaattgagccgcgatactataaaccgcgccgccgacagcaaggacgcttcgtcgcttataaacagcctatcgcccgaggacagggaaaggctgaataaggttatgtccgataaggagagcatggaaaggctgcttaaaagcccgcaggcgcagctgatattaaaatcggtattaaaggacggaaaaaacgatggacgaactgggcgataagctctcggcgatactgaacgaccccgacagcatggagcgggtcaggcaaatggcgcagagcattttgggaggaaaggatgacggtgcggctccgcagaatacggctgagcccgccgcccccgcctatgacgatataaatataaaacagatagtctctcttttttcaaaaatgaaaaatacagcggatgattctcgcgttcagctgatttacgctttgcgcccgcatttaagcgcggaaagacaggcaagggcggataccgcaataagactgcttaaattacttgatatgctgccgtttataaaggaaagcggaattttgaaggggattttatgagtgacaacgattttatgcgccgccggcaggatgccgttgaaaaaatgcgtgaaatgagccgcaaagcagccgaaagctctgcgcagcccatgccgccgatgccgccctttgtaaggctgcaaaacagggaaaaccaggcgcaaagccaaggctccgccgcttcacagcaatccgtgcaaaccggcccgcaggcatctcctgcatcgaacgaagattctctgccccatacccgtaaaggcgggctttcgtcgctgccctttttggatatgctgaatatagacggcgatcttccgctgatcataggtctgctgcttattcttttcagcgaaaaggcagataaaaaactgctttttgcactgatttatattcttttgtaacacttgaattatcggtaattttcggaatattttcttgcaaattttgcattatgttaacttggacaaccttaaaagttcttctacttatccaccatgatatccacagttacgcaccgtttcaaacggaaaattaagctttgcaggactttttcggtggataagtctgtttataagtgggataaatgtttattcataataaaatgaataagaaaattatgtaaagcattcgtcaaaattcgacctatacattttcactttcttttcatggcgcgcagtatctttttatcctcatccgatattcggcgtgattccagcattttttgaatcgatttgttataagtccaatcgtcaaatccgcagtcttcaagaaaacggtaggttttatcgcggtattttgccatagccgtggcggtgcaccaggcagccgccattttatagtaatagtcagcattatgcgcagagcgcaaagccgcgaacacacggtcgatatattcatcattcaaataatgcgacatcatggtaacaaccgctatacgcatataatatgtcctgcccgaggcaagataatccgtgagccgaccccaaacctgctcgggataccgtcggcattgtttaaaggactggcacagtatatcgcaggtcgaccagttatcgacatgataagctgcattatcaaagtattttataagggcgtttatatccgcccttgttttaccgagtacataagcgtataaaaagcacatttccatgcttgaaaaatcgcatttgcgaagaaattcatcgcccctgcccctcttgacgatttccgccgccgcaacccttaaggcaggcaaacgcacgccgagaagcgtaagagaggcttcgggaataagcttctttgaaaaatcgcgataatccgcctccgccatcgcattcagctcattttttatatcatcgatcattttttcacttcccgaaattcaaaaaaggctgtttttaagcagccttttaattattccaatatatagatctcaacattgcgaacgccgaaggatatgcaggcgctgcgggtggacataaacagatcaacccctgtcgggtggttgcttacaaatccgccggtatcggctgctacggcatagccgtaaataaagctgccgtccgccgttcttatatacatttttgtgccgtagggtattaccttcggatttaccgctatatagcccggctgcggagcaacgcctgtagcgcagttatgaccggtataggtatacgcagtagcgcgtgataccattttggacttataattaagcggtacgccgtttttatcaaattctatattaagagtcggggtgagggtcgaaacgcccttgaaggacgaattatcggccgtagcggtgctttttgccgccgctttccttgtgccgatgatttttctgccgtttacggcgcttttaaccacttcttcaccggtcacggtgcgtccggaggatacgccgttcactattttttcggtatagcttatgcgcttttcgccgtcggtacccgcttctaccgtttcgctgccggaaatcttttccgcagaataaacggtttcgagagtgtgaggtatgacctcggtatagctgccgtcaacatattcaatatccgtgtaatcaatataagccgtgtcggtaatctcggcatccgccgcaggctcaataaaatcgttttcgtcgggagcaaagcccgccgcaataagtgcttcatgaacagtgccgccggtaaactcgatttcaatcgtgttttcccccgccgttataaatacagggaacgaataagcaatctcaaccgtggtaagatgattttccaccttggtgttcattattttataatgctcggatttcagtctgagaccggaaagaatatttgcaacattcgcactcacagaacgcactgtgtaggttttttcgccgtcgaatacctttacggtattgagtgaaaatccaagtaaagtaacaaccgctatggtgacggcggtcatagccgctatgcaccttacacgggttcgctttatgaactccgcgtcagacagacggtactttattttttctaacatcaaatgactcctttgaaacaaatctcgcaagccgaggcatattataagtctttgtgctgacaatgtcaaagtcgcaaaaaacagtgtttttgtttaaaatgacggttaaaaagcggttacaaaaaggttacaaggctgtaactttttgtgccgagactttaaatctccattttttgacatttaacttgtgcaatcctacaaaattgcataaagtggcgggtcatatagcctgtacgattctattttacaccaaaagtgggggatttattcattaattccttaaaaaaccacaatataaagaaaaacggggaaatttaaattttgttaatttgtcttcgggaaattgatttttcggtcgaatgtagaataatgttataatattcaaaaaacaataggaggttgtttaaataaaatctgcatgggtaagctcggattatttgccggaggaaaaaaataattcggagtttggaattgttaaaggctcggcttcggcacagggcataaaatcgttaataaattaaagtcatttaaaaattcccgacgctattcggaacagcgtcgggaattttttgtatttatatattaggtgtaacgcaagtttaagcgcgctttttacgccgctttataaggcagaacagcacaaccgcgccgcacacgagaacaaagcccgcaaccgagagcactatcggcagcacgatgtttgtttgagccgccgcaggcttcttctttttctttttaataacctttgttattgtaacggtctcctcttctccgtcgccgccgtcggtgtttttgatttcctcgccgcggctttcgttcggcacctcaatcggaacatcaacatattcggtaaccgtttcatcctcatagcgggttatgctcggcgcgaatttattatcgtatttatattccttacctgtccaaccgccgcggtccatgtcggtcttataattctcgataagcggtattatccttgaaatatcaacgccgaccctttcgccgctcttcataattgcggtcacccttgcggtaagcgagcccgcgccgtcctttgacggatctgtaaccgaaagctccgttacctcaaccttgcttacaaactcatcggaaagcgcagaagcgaaatatttctctatatcctccgcctttatatccgaataaaccggaactctttcggaataaagcatcatattgaccttcagctcgttttcggagagcccaagtgttgaatacgagtatttatttgcatccgaagcgtagccgctgtttataagcttttcggttgacgagccgggcaggtaattaacctttacctgtatccagctgaggtctgaattccagaaatcatgcctttcggcatattctgcatttttgcttaatacggtaatcgttcgcggaatataaacaccggggcttgttgctattttcttttgaagaatcgggtcaagctcatcgcaaagctcctgtgaaatggcgttgccctgcgttctgacgccctcaacaagatatttaagggtcttaagcggccacgcaaacgcctcgtttgcaatgctttcaacgcccgcgggtataactatatcgcgcaaagcagacaaatggaagctgcccttatctatagtcttcaaagcgttcggaagatgcagatcggtaagcagcagggtttcaaaaagcgcttcctcgttaagattttcaagattttccgatagccgcagatttttaagcttatagcacttccagaacgaatgcttgccctccgccttcacgacattatcacccatgataattacttctatattgctgctgaacggaacgccgaactggtcgggcagaacctttaatgaatcgggaagaattatgcagcgaacctttgtaaggtcggtatcgagccaccatgactgatcgagatactcgacgccctcggggattataatcttttccgcagtgccgtaataatcgagcagcaccgtgccgtcggaggaaagcaggaagaactctccctctgtgccggtatcgccgcgcagtccgtccgtgccgtccacggtttcgggatagaaggtatccgcctttgccacagtctcaaagctgtagctgtaaatttcgggcttgattacgccgtatatagaaatatcctttgtatcgaccgcagaggtaagccttatatccgcggtaacatagccgttatagccctcaaacattaccccgtcggtatcctcgcagccgggaacagccctcagcttataccagttgctcacggcagccttatatcctgtatcggcaagcttcttttcaagataaagagaaaactccgccgcgctgccgttatttgtgaacggatagtcctttataagtgcctgaacgacctcggtgtttatttccttcggatatctgccgttcagcatgtatttatcatgctgcgtctttaaaagctcggccgtttcgttatccagcgcggtatattcatcctcaagactgttcgaggtctgggtctttataaattcctcgatgctgttaccctttaaagcgtatatatatgtataccaaagataatccgggccgttatccatatcgcatgaataccagagccagcttgatttgaccgtcgggtttttgccgaggtagaaaaagcttctgtttgaaagatttgtgcccacatcggcaataagatcctcgcggacatcctctttaacctgctcgtttatgctttcattaagtgaagtaacatattttttatgggtatcgtagccgttgcccgcaaaatcatccgccgtgatgataagatcccttgcggcactgccgtaaaacgcgcggtcggaaacacttttgaccgccgcgggcagataaagcattgtgagcgcctgtgtgccggcaaagcagtatttgggaatggcggtgaatttttccgaaagacggacatacctgagcgaggtgcagtcgctgaaggcgcgctcgcctatttcggtgcagccgtcgggtatgtaaaccgccataagattcgtaaagccgttcatcgtccacggcattatttttttcatggttgacggataaacgattattttaacctttgttttatcacccttgtaccactcgccgagggtcttgctgtttacctcttcaacaccctcgggaattataagcttatcggcagagccgttatagtaattaagatacttgcccgcgcctatattccaaaccgagttgtcctcctcggcagatgacttcgtgtaggttagggtcttcatttcggcggataaaacctcggtgaattttaccgttcctactgttttcccgtcctttgtgacctcggcacttatgttcacatagccgtcgcgcgcaaccgtgatgactccgtccttatcgcagcttccgtcaaccgggcgcagcaccgtggcgttaagctttaccttatagcctaccgccttttcatcggcgaagctgtcggcgtttaccgcaaacgcggtgtcgtagatccggagaagtccctcgcgggaggttttgtcgccgtattttttaatatacgccctgtaaagctcctcaaggtgcgaaagcgcctcttcatcgcttatttttctgattcctctgtattgctcgcttaaaagcgttgcatcggccgcttcaagcgcggtatactcatcctcaagactgttggagatctgtgtctttataaactcctcgatgctgttgccctttaaggcgtaaatgagggtgtaccagaggtaatcggcaccactcgctatatcgcaggaataccaaagccagtttgatttgaccgtcgggtttttgccgagatagtagaaatgcctgtcggcaataaagccgcggtcgtccttcagatccgcctcaacatcggcttttatttcctcattgatattctcgttcagctgaattacaaagtttttatgggtatcatatccgtcgccgacgaaattatccgcgcagataacaatatcacgcagcgcgctgccgttaaacgcacggtcggctatgctttttatgcctgcgggaatatacatctgcgtaagcgcaggcgtgtttgcaaagcagctcttcggaattgccgtaaagttttccgaaaggcggacatatctcagggatgtacatccgctgaacgccgaagcgccgaggtctgtgcagccgtcgggaatatataccgcaataagatttgtaaagccctgcagggtttccgccaaaacctttttcatggttgatgggaagattatgattttaaccttggtcttatcgcccttataccaggtggagcgattgttccagttgatctcctcaacgccctcgggaacgataagcttatctgccgagccgttataataatttaagtatttgcccgagcctatattccaaacagaggaagcctcctcggctgatgaccttgtataggtaagcgtcttgacccctgcggttattttctgtgcgaacgataccgtacctaccgctttggaatttttggtgacctcggcgtttatgtttacataaccgttatgcccgcgggttatttctccgtccttatcctcagagccgtctatcgggcgcagcaccgcggcattaagcttgacctcatagccggcggctttttcctttgcaaagctgtcggagttgatttcaagtgccgaatcgtataccctcaaaagtccctctcttgtggttttatcgccgtactcctcaatataagccttataaagctcttcaagatggctcacggcagcagcgtcatccgccgaaaccgacggcgatgcaaaaacgggaattgcctgcgccgcgatcatcgacagcataacgcctaacgccaaagcaatattggcatgtcttttaatcgtttcgattattttcatttcgtaaatccccttctttcatgaaattaagagtatgaagcgggtgaatttatttttgctccctcatcgtgccaaagctttttcacggttccgcccaccgcactgtcaaacatacagtcaagataacccgaataagagccgagccgcctgttttcgttttgaatgtatgtattgccccgaagcaccggcggggtgttcatcctgctctgcgcgtttataaggtcgtatgtgctgagctcgaaaatattattttcaataacgaaattctcagcaaaattaaggcacgcgccgttgctttggatgtgtgcggtcatatttttatcggggcgctgaagcccgccgaagccgtagcccgcgaagcgcattatattgccgctgtaggtgatattcacgcattttgaatcctgaccgagccagtattccacagagcccataccgcagtattccaatatatttccggtaaactccatatcctccgcgcagtaatcgccgtagccctggtgagttattccgctgtcgtatatctggtgtgcaatacaatttttcacaacggaatttttgcaccctcgcataaactcgatcgcgtttccgtagcgcacatcgccgtttttgtattccgtaaggaagcagccgcctataaagaagaactcgcagcccgttatgcgaacatcgcgcacttccgtcgcccttattccgtgaccgccgcaaaagcagaaggtcagattttcaatcagcgtatttttgactgagtccattctgaagagccacagattatgcgctatctcgatgcttttgaaggtaagtacgggattgtccttcagcctgattactatgcggttaccgtttttgtggtcgctccaaaaatcgaattcctcagagatatcggcacggtttgttttttttatgccgaccgccctgcccttatcgaagattatgttccccacatccgcggggaaatccgcgtccaccgtccacagaccgtcagggagcctgtaccagttgtcgtttatataatcccttgcagagccgtatatcctcggcttttcgccgctgccgtaagcgccgtagtttactccgtccgctgctgttatgcagcccctgaaaatatctcctctacggaaaagaacggcagtacccgcctttagctccccacggtttctttcaagcgtttcaagcgaatcccaagcggtttcgggcgtttttccgtcattgtcacggctgcccgataccgatatataacggcattctcccgtattcttcaccgtgtccggaagcgcgccgatttcgtttcgcagtttctcggtttccgaatctacctgcttatttgtcgcctcgggaatttttcttgagttgattatctctgcggccggaacatataaatccctgttagttgcctttatatccgtcatatatcccccgtaaaatatcatgcaaaagcaagctttgccgaagcgtcgttccaggtatttttaattataagctccgagcttttgttaaagcgtatattggtgttcttgccgtaatagccgagccatctgccgtccacctgtatatatgtgttgccgtccaatgtgggcggagtgcccgcatcggacgccgcgtttacaagctgatatgtgctgagctcgaaaatattattccttataataaagctttcggcgtaattatagttcgagcctgtcggctttgcgttgctctgtattgcggcgctcatgttcttatcgggtcgctgaagtccgccgaagccgtagcccgaaaaacgcagcatattgccttcataaagcacgcttttgataaccgcgccctttgtgtgccaatactcaatagcgcccatgccgcagaattctataagattgttttttgccgtgaagttttcaacaacgcagttgtcgccctgatgggttattccgctgtcgtatatctgatagatccagttgttttcgagcagtgtgtttttgctgttgctcataagctcgattccgtttccgtagcggacctttccgtcgccgtagccgtcaagatacgagccgccgacatagcctatttcgcagttcctcacggttatgttctcggtgtttgagccgcgcaccgcatgaccgccggtatatttgaaggtcagattttcgatagttatgtttttctgcccgtcaaagcggaagagaacgctgtccgcaccgatttcgatgcttatgaacaccttggacggatcctcctcaaaatagaggtaaacgcggtttttatcgctcgtgtcgcagaaaaagtcgtaattgcttttaagctccgccctcgaggaaacacggttgcccaccgcctcgccgtggttgaatacgattattcccacatcgcttgcgaacatttccctgagtctccaaatgttcttgccgtcgcttgtgaagacagcgtcggcaaaattgcgtgcagagccgtaaatgcagggtctgtcgcccgtgccgtaggcgccgtaatatacgccgcttgcaagcttcatgcttcccctgaaaactccgccgcgctcaaacagcaccgcgtcgccgcttttaagggaggcgttgtgtacctctgctcccgcaggggtagcccacgcggtcttcgggcttttaccgtcgtttgaatcatcgcccttttccgaaacatagtaggtagttccggtgatcttaacgccgctgccgtttgaagaaagtattttcgagcgcatttcatccgcctcgttatcaagcgtacccgtaaccgggaagcaaagcctcgccgggttttcatgccatgagcggtctgtattcgcgggaatattcgggttcggcttcttcacggttatttcggaggtgacatagcttaccgttttgccgctccccgatgaaactgaggctgtgctatcggcggaggaggtatcggtcgatgagctgccggtcgatattatctccgatgaggtcacatcggtatcgctcgttccgcccttgctattatcggtgctgcccttatcctttccgcaggcggaaagcgaaaaaatcaatactgccgttaataataccgtcaatattcttttcatatttctgtcctttcagcggcataatcagccgaaattgctgactctcttgttttcagcttcaataaattcgtccattgcggcggaatgcgagtcaagcgttgccttgacctgcgcggagcctgcctttttgagcgcggtcacaacgctgcccgctcccgcggaataagcgtaggtacggtttttaatcgagcaggcgtaatcaataacctctttcgcctcgctgctgcagtaaaccgaattcatatcgtagctctttttatcaagcacatagcgcagatagtaaggaacgagcgctgggttctttgagccctcggggatgccgaaggcggtgtattcgtacatgacctgatatttggaatcggtcggcatgggtacaacgcccaagcggtttctgctctttaaagccgactgtctgttatcctttgcacgtgcggagaatggaccggacaggaagaacagagtcttaccctgatcgaacgactgctcactgtggttttcaagcagcaagcccttttcctgcatctgcagtgtggtctgccaggaggagatagtgctgttgagctttgagccgtttacaaattttccggtgctcgaattgtaattgattatatagccgcccattgcacggacatacgaatctccgtactcaaaggttgcgccggaatagcccgatttatttttgtttgcgtttacaaactgctcgcacatagaccagaatttttcccatgtccatgccttcgggtttttcttccagatttgatacggatcctccatttcggcatcctgcagcgcctttttgttgtaatagatgaccgaaacatccgaaatagcgctgtcgttaagatttacggcgtagcacttgccgttaaaggtataatccttcataagctgcgaatcccacgcggtgtcgttaaaattgtagccgctgttggttatcggctgaagcgcggttatctgccagctgacatttccgagcaggcggacaagatcgggtgctttgcccgagcttattctggcgctgagcgtttcctgaaagccgtcataggacacaatctcgcacttaaccttgcagccgcttgccttttcaaacgcctttatagcctccccgtccatctgcttcatcgggtcgttccaatacatataggtaagggtcttgcccttaagcttcgcgggcatttgagcaataaactgatcgcgcgaaagggatgtggtcttgcccgaatttccggaattgcccgagcttgcagagcctgtgccgttttgagatgagccgccgcccgatgaatccgtttttgaatcggttgactgtgtatccgagccctttttgatagtggaggttgttacgatcacctcggtcgaatactcatccgaaattgcctcggactgacttttgcacgccgcaagcggcaagagcaatgccgccgccagcaacacgcactgtgaacggaagaagaatgattttttcataatgattttcctttctttatttattagccgactatgccgacgctgtcgatactctgcataaatttgcgctggagaattatataaaccgcaaccggcggaattataaacaaaaggcacgcggcgggcggaactccgaaaattaaggagcttgcgccgttcgcttctccgaaggtcagaaaaacctgatccttaatactgtgcaccactaccgcaagtgtcttgttatccaggttatacatcattgcgaggtaataatcgttccaatgccatattaccgagaatataagaacggttagaaatgcgaccccggccgacgggatgattatagtcaaaaaggttctgagcggccccgagccgtcaatatacgccgcctcttcaagctcgcgcggaagccccccgaagaactgcatgtaaatgaagatgaaaatacccgatttcagccccaccccaaaaagtgacggcaggtaaaaggtaaacggcgttccgagaatattaagcctcagatccttaccggtcaggcggtttacaagccctaaaatacctaggaaatccagctgcttgaagtttatcatgcgcggcagcataagcattacatcgggcaggagtattgtaagcaccagcacaaacacaagcgccttttgaaatctgaacttgaatctcgaaagcccgtaggcgtacaccgcgcagacgaaaacctcaatcaaggcgctcaccatttcgtatattaaggtattggtaagggatgtcacataatccattgccttgaatgcgtcggaaaaattcttcattgtaatatttttcggcacccacacaacagaagggtctatataatccgccgttgtccgcagcgcattgctcagcatataaaacaccgggtaaagcaatatgtaggcaaaggctatgagaaaaacaaacctgcatacagaaaccgccgcatttttataaaacgagggctttttttgtaatttcacaccgtcaccccctaattccagcgcttcaaaagcagcttattgtaaagcagcattacaattccgatgattattcccacacagataaaatatatccagagctgcgcggaggtggagtcgtatatagtatgccagcgcatatcctgcagcgccgaatcaaccagctcgctgttttccacaaaaagctccaccatggtatagaagaccacaagcagagttactctgccgagcatcgggaaggttatgcaccaaaagctttcccacgccgtagcgccttctaccctgcccacctcgtaaagctggacgggaacggtttgcagccccgcaatataaagcactatctgcacgccgcagctccatatgaggttaaaggtgtccgaaaggtagcccatcagcagattgtttacatcactcgggaaattaagccttgaaagcagccccgaaaaatctatcggcgtgacatatgctcccgccgacgcaccgtctcccagtgccgacgatatggtagccgcgctgctgccacccccgccgtttaaaacatacattacaacgccggaggagattattaccggcaaaaagaatatcgagcgcattatcattctgcccttgaaattctgattaagaattatcgccaatataagcgagagggaaactattatgggcagagatgtgaaaacacttgagagagacgccgccaatctgtcgacataaaccgtatttttgaaaagcagcctgtaataatttgaaaatccgacgaacttcatctccgggccgctgcttcctacagtgacaatgctcaaggaatataaaatcgtcgtaataatcggaaccgcgacaaatactatgaccccgaatacccagggagcgacgaacgctattccgtagcgccgctttattgcctctattccctttcttttgtttttcatagtgaaaaaactccttactgcgccaaagaaaagctcattgcgtcaaccgtaacgccgccgagcgtcacgggattttccgtgcggttcacaaaaaccgccgcccccgacgaaaataccgttttactcacgccgtcggctataatttcgtggctcaccggatactgctctgcggcaacgcgcgaaaattcggaaagccttgaaattatgcccgccgccttttccttttgatccttaaaaagcgtaccgtaaaagcccgggaacgaagagttcgcaagctcatcggaatactccgaaataaaggtaaacgagggaagcactcccgcctcgacggattttaaaatcagattttccgaatcatccgccaaattcacggcttccgaataaagcgcggtgctctcggcaaataccagcgaataaaacggaacggatacatcaaggttcaaatagccgccgttatccgtcggggtatcgtaaaccgtgtctgccgctgccgccgcatatccgttggcgcggcttcccgccgttttatgaccgcttttatttatcctttcaaatatttcgctcacctgctttgccacagtgcccttgcggtaataacgggcttcggcataatccgaatatgcagtgcaggacagcgcggcaagtgaaattcccgatttataattctttgagtgatctataagcttctcggttatattatcaagcgccgagcgctttaaaagccttattttagcgccgctttcattcggtaccctgagccctgtgccgagagtataaaacgccgccgcctgcctgccgggagtttttgccgtgtcaaagcttttattcaccccgccgcccgagcttttgaaacgaaccgtttcgtaatccacatataaatctattttgttatcgtcacaatatttttcgagagccgaatatccttttttaccgccgagcctttcggggaacgaaaagcctcccgctattttaccggcgtctacgcccgtttgcccgaagcctgcaagcgttaccgcaggcgttttcccggtttcggccgcaagctcctttataatttcctcggcatcggaaaaatcggacgcctttgtgagcgttgtataaggaaagcccataaagaattttttggacattgccccgcccaaaatatttacatgaaatgccgactgtgatctttccgtattctttaaagcgccgctgtcggataaatatttcttatagcgcgccgccattccgttatagccgctgttatctcccgaaagcgggtagaagccgaccgtgtagaccgcggattcatcatagctctccgcaaaaaccttttcatcggtgtaattgttgcgctcggcttcggtctcatcgcttccgcgaagtacaagtgaggaataaaccgcggaataattgtttttaaagcttcccgcctcggtgtttatccgtgcaaagccgtcgccctcctctataatcgcgaagagtgagttttcaccgtccgccgcaccgtaaacaggcatggtaagcgcggtttcgtccgcagtatcgtcaagaatcttttccgacgcgtctctgccgtagacctcacccgtaaagctgcgcgaggtgttttgaatttcttcatcggtatacataagcgcgccgctgcccgacggaacaaacaaatatgaattcttattattgccgttcggcacggcgcagaaatacggaagcacggaaattgaaattatttttgtttttccgctttccttaatatccttaaagggtacggacaccgcaagcgagtcctcccttaatttaaattcgagtgaaatatccgcctcggcatcgataaagtgaaaggtcattttaattccgtcatcaattttttcaaccgaataattgccctcccccatgcagtccgaatatgcctttgcggtctgtatagatccgtcctccggagtataatactcaataaacagcggtgaattgaggtttacgcttgttccgccgctcaaatagtaattatacggtacggttgaccatatatgcccgctttcgttattctttaaaagcagtacggaacgctcgctgtcccattcgagggtgtagctgccgtttgaagcggcaataccgccgtccgcaacctgcgtttcgggaacggaatattctttcaccgcggtctttttgccgcatccggcaaggcagaaaattaaaatcagcgcaattcccgcccgcattcggcggacaagccttttatttaaagcagataacattttttctcccctttgcctatctgtacgcggtttccatgaatacggttaccaaaaagctccaaagctgtgaaagcagcattccgagcatgaatataatgaaaattataagcagcattgcaaaggcggtaagcagtatcgaccccaagaacttcgggaacgaaaattcgtgtataaccataagtccaacggtcagtactatacccgtaagcattgccgctacggttgaaagtcccgaaagcagcgtgcttgagggtgatgttattatgtgcgacaaaagcgtaaacacaaggttgtatattatctgcggcaccgtggcatatgccgtcacaataaatacctccttaagtctgcccttgccctccataagaacgcataccgcccagtttgcaaccgaaaacaaaattaccagccccgccgttttcacaagctgcagagccgcgcttgatgtgagcgggctgaacgaggtgaaacggaaatcgcttaacatttcggaaattaccgccgtgatataaaacagcaccgtaagcgccgccgctattacaagcgatcccatattcttatattttatgctgttaaacgaaccgaacggatgggtcaccgtattaaacagcaaccgcaccttggcgttccttattaaaacaatctgctttttcgaggcttcgatcgtgaagatcacagccgcgcctataacggcgactgcaagcaaaaatatccaaacgaaatttttatttatgaattcgcttccggttttaccgagcgcctgactgtaggttacaaagtcatagcccgccttcgcatattcgcgcgccgttttgtaatcgccctcggcgaaatatgcctttgcaagcccccgcattgccagctgatttgaggaatcctcgcgaatgacactctcccattcgctttttgagcccttatagtctgcggaaagcgttttgctctgcgccgacataagcgttctgccgtaatcggtgagtgaaaatacggttaccgaattattctgcgaatcggcgaccgccagcttatcccttccgtatgcaatcgcctcgggagccgaaaaaactcccgcctgcatgcccttgcccttacctccgccgaacgcggttataagattgctctcggaatcgtaaacatatattatcccgtaggtggaatccagcgcgtagatatagcccctttcatcggtctgtattgaagtgaaattctgcactacggttttattgtttcgcttttcggttgaagcctcgccgaaattatagcttcccgcgtcggtctttgtgccgtcgggctttgatttataaagaatgttaacgccgttaggactcagcttctttatctgaccgtttgaggaggcgttatcggtctgcccggtgcaggtataaacaaaatccttttcatcaatgctcaaatcaaaaaaacggtacggcagctttttaaccgaataggctcttttatcatcattctttgtaagcgcgtcccacaaatacgaaagagtggtaagcgcagagcccttaacggtgttagcgccgtaaaagcccgaaaattcaccgcttggtgcgaaaagcagagcgccgtaataagcgccgtcacacagcacataaagcgtccccttgctgtcccgctcaagctttatgggcgcgaacttgaagtcctcgggaatcaatcgcgaatcgggttttgttatttcccttgttaccctgccgtcgccgtttatttctattacccgctcgttttcggtatccgctatgtaaatatcatcggagctcatcggcaaaatgccgcgggcaccggttatttcaagcggctcaccgtcggcggaggtaattttatattcctttgaaagcttaaagtccccatcaaggagaaacagccttccgtcagaggtcagcagataaaaattaccgtcatcatcggtcgctatgtcggcaatcttctcaattccctcgggtattcccattccccttatatcggtcagccttgaaaccgcgtaaaccgcgcgggaggaaaccgcctcctctgccgcagtgccggaatagccgtgcgtaaaactgcctgtgggagctcgtgcaagcaaaacagactgaacggaagaaacaacggtaagcagtgagataccgagcataagaagatatttaatttttttcaggtagctgcgcttcacattttcaccctttccgaacacggttcaacactatcccttcatacctgcgctgcccatggtttccacaacattggtttgtgatataacaagaattattatcggcggaattatcataagcacggcggccgccattgcagagccggcgcgtgcaattcctcccgcggttatcgacgataaaacatacggcagcgttttgagcttttcgctgaagaccgtacccgacggcattgccgaccaaaggctttggaaggacaaaagcataagggtcatccacgccggctttgtgatcggcataactattttaaaataaatgcttacaggccccgcgccgtctattcgtgcggcctcgagcagactgtcgggcacgcttgaatccatatactgctttataaggaagactccggtggttgacggaatcgcagggagaatatagacccaaagcgtatctataattttcatattgctgtatatcaaataccgcggcacctcaagtgtgtatgcattgtaaagcaatgacagctgaaccacggcaaatattgcttttttgaatttgatatccgtcttcgcaagcacatatgccgccattgaagccactattatatgaagcgccgttcccgcaaaggttataaacgccgtattgaaaatatatcggctgagcggcacacgcagcttttctataagagtcggcagaatcacaaaattctccacggtgggtctgtgaacaaaaaacctcggcggaaaaacaagcaattcgtcaagcggcttgaaggcggtgcagatgcagtaaataaacggaagcatggaaaaagcgcccgcaagtatcaaaaagaaaaaatatgtaaaatttcccaaacggctgtgtgtataccttttatattcagcgcgttttttcatatcagcgaatccccctgtttgcgttcactttcccaaaaggtttaaaatcttgcctataaggtatcttgcaaatagcatcattaaaaacagaaccgttgatatggcggcggcatagcccatttcatacctcaccgtgccgacatccaaaagatgcgaaaccaccgtatcgaccgaattgtttaccgacggataacccgcaagagcctttattaccgcgccgatcgagaaggtggcctgtatctgcataaccgcgccgaaaagcaatatgctcttcatgctcggcagcgttatgtaccaaagctcataccacctgtttttaatgccgtccagggcgcccgcctcataaagctcggggtttacattctgaagacccgcaatgtccgccagaaacgaaatacccatactcgtccaaagctgaacaattataagaatcgtgaaattatatgcctcgtttttaaaccagcttatgggctcggttattattcctaatgatatcagaaagctgtttgcatagccgtagctgtcggatgagaacatggtctgccaaataaaggttgcgttgcctatcatagccggagcatagaaaataaaggtcaggaccgttctcaccacagggttgaactcgttgataaaccaggcaagcagatacgccagcaaatagctgagcggccctgtaaccaccgcaaacttcagcgtattaacgaccgccttcgggaatacctcatcgccgttgaacatacgcagataatttgcaactccgctgaacttcggcagagaaatcatatcataggaaaagaagctgagtacgagagatgagataaccggtaacacggtgaacaaaaagaacagtattaaaaacggcgatatcattatgtaatgcacggcgttttcgcttaaagcaccgcactttattgtcttgtttttcgttttattcgacatatgccgccatacctccttttattcgtattctgcctttttccttatcatttcgttgtttacaatgtcgccccattttatcagggcgtcggtcggattggcgttctgctcaaccacattccagtatgcctgctcgattccgcgggtcacataatagccgcccggcagctgcggcagattgaccgtattttccctttgcgaaagcagggcaggcacaatatcattgctccagtcaagctccgaaaaagccttattgcttgcggtggcaaccctgcctatcggtcctaatatcgattctacattctccgaatatgccgtctgtgtctcggcggatacccaccatttaagaaactcccatgccttttcggtattctttgaaagctttgtaattccgcagcccgtgccctccgcagaggatgaaaaatttatttcaccgctgccggttttaacacccggcagcgttaccgccgtccatctgtcggcaatttcgggcgccgccacctcaatctgggttataagggtgtagggcgatatccccataggcgcgctgcctattctgaagcggttgaagaacgaatccatagccttggggaatt

SEQ ID NO: 691 - DNA, 7643 bp, Unknown
  16S sequences of unknown bacteria
gcaccagcgaccccgccacgacgccgccgcccaggacccggtccagctcccccatacccgtcgtggcgcgaatttcccgggtggaggttacctgcgagagggccactggggcgcggttcgtcagacttgtcgtcccccggttccgggcgggcgacgcgggctggggcgtaaactccgtgatcgtattccaagcgccgcaggcggggcagcgaccctgccatttcagggtctcgttgccacactcggtgcaaacataaaccgtcttactttttgccattcccggctccccttccgttgggttttctttctgctatcatagcgaggtggggcacaaagcgcccccattgcggttattatagcatatctcgcgccggaatgcagcaaaaaagccgctaaaccgccgtgcgccctgccaaaaatgccgtgatggacccggccaggacggcggccaggcgtttttgatagtccttggaccgcagcagcgcctcctcgcccggattagagagaaagccacactcgaccaagatgcctgggcactcgattttctccagcaaaaaaataccgctgccgggcttacattcccgcttgttggccgggtcgagcccggcgcgcagattctgctgcatcaaggcggcaaaggcccggctttccgtattcggggcgtaaaacacctgcgcccccaggtattggctctgggaaaattgattttgatggatgctgacaaggaccgcgtccgcctgctggttgattcgcgcgacacggtttttcagatccgtcacctttttctcactgatgctggccgcgtcggcgctggcgaggtccgtatccccctggcgcagctgcagtgtcgggcagcccagcaggtgcaaaaggtcgtccagccgctgggtgatggccagattgatctcgcactcccgggcgccggtgcaggagacggccccgccgtcggctccaccgtgcccagcatccagcacaacggtcgtctgcggcatcgccagggcgtcgcggtaaacgcgcactgcgccaaacgcccgggagccaagcagagacaatcccgtaaatccggcgatcaccgccagatagatgggccagttttttcggaaaaatttcatacgctcccccctcacccaagtctatgcggcttgtctgggcgggatgcgttattccgcctgccaggaaagcttgagccagtctggcaggctggcggggtcgaagcggtagtgggcggtgacccggtcgttccggtcgaagtagtcctcctcccgcttgggctggccgccgttgtggatgacataggcccggccgtcacgattgcgccggtcagatatgatgccgatgtgggtatcgcgcccgaaaatgacgatatcccccggctgccattggtcgatctgcgtcgtgtcgcaggtcagtgattggccataggcggcgaagaagcagtgcagattcggcacgcggcggaagtcaatatccgaatccggctcgttgatctggggataggctgcggggcgggcggcaatatcggcgtcgaccatatcccgcaggcagtagcccgcctggcggaaggcgcgccagatgacgtcggtgcagacgccgatgtcgtctggcgggtagccgccgggctggtacgcgccgtcatagcgcgggtgatttttcgcgtcctgccgcgcgccgaggacgaggtcggcatagtcgtccacaccgttgccgttgaaatccactgggctgacggcgacggggatgccaaaatcctctgccgtgtacgtccgctctggcagcagatgatacgcccgggcaaagcacagggcagcaagcgccgccagcaccaggcaccccagcaacgcaagccgctttttcctcttttgcttcaccatgcgtgcccctccctttccgcgtctttttcttcactatagcggattttcatcccagcgtcaagggcggccggtgcggcaaaagaggttgacaggctccccggcacattttataataagggcacgaaagcaagattcacgccattcggcggcgggccgccggagtatttttttgccccgcccgcgccgccaagagtaaggagaggccccatgatcgacaaggaactgcgcgagctgcgccgccgcctgcggccgcagaagaataatatcacgaaaattcacggctgctatgttaccggcagcggcgagatcatcaccagcttcacccgcagtgtcgcgatgatgccagaaaatgaagcggaaaaatatctggcgattctcaagcggactatgacgggcgcgctgggcaagcggcttatcgacatttgctttgccacgagtcaggtcgccgggagcccggagcatcagcttttgatgtccctgcgggatacaaagctggaggacgaggcggtgctgcagcagttttatgagaaggccgtcagcagcgtccatctgggggagaattacctcatcctcttggcccatgacacctacgatgtccccttccgcggcaaggacggcctgctgcaggaccgcagcgacgagagttacagctacgtcctgtgcgccatctgcccggtgaagctctccaaatccgccctgcggtatatcgccaaggagcaggaattccaggataaggacgctggttgggtcgtctccatgccggcgctggggtttttgttcccggcctttgacggccgccggacgaatatctacaacgccctgtattactgcaaggaccagacccagagctatgaggatttcgtcggcgaggtcttccacacggacattcccctcccggcggcgcagcagaagaagaattttgaagcgatcctgacgagcaccttagaagaggattgcagcttcgacgtcgtccagcagatgcatgagcagctgagcgagatgatcgaggtccacaaggagtcccgagcggaggagccgctcctgatctcccaggggcaggtgcgccaggtgctggcccagtgccaggtcccggaggagaagctggcaaaatttgccgtccagatggaagaggacttcgggcttgatgcgcagctgagcccggaaaacctcatcgacgaccggcactttgctctgaagacgccggatgtcacgatccaggtcaaccccgctcggagtgacctcgtccagacccgggtcattgacggggtcaagtacatcctcatcaacgcggaggaatccgtcgaggatatcagcatcggggacaaagcgtaaaggagccgccatgcaggaatttatcatcaccgggaacgatgccgggcagcgcctggaccgcttcctgggtaaggcggcgccgctgctccccgcctccctgatgcaaaagggcatccgcaccaagaatatcaaggtcaacggcaagcgggccgagcgcggccagcggctgtgcgacggcgacgtcgtccgcctgtatctggacgaccgctattttgaaaagcccgcgccggacagcggctggaaaaaggtcacggcgccgaagctgcatgtggtctatgaggacagccagatcctgctggtggacaagcgtcccggcatcgctgtccacccccacgacggcgcggagtacggccggacgctcatcgaccagatccaggcctatctctacgcccagggcgaatgggacccgaagcaggagcacgcctttgccccggccctgtgcaaccgcatcgaccgcaacaccggcggcatcgtcatcgccgcaaagacggccatggccctgcgggtcatgaatcagaaaattcgggaccgggagctggggaagtattatctcgccatcgtcaagggcgcgccccggcctgcacagggggtcttgaaggggtatctcttcaaggacgccgtcaaaaaccgcgtctatgtcacggaccaaccccagaaggggtcgaagacagcccagacgaagtaccggaccctggcaagttcgaacggcctgagcctcgtcgaatgcgagctcatcaccggccggacccatcagatccgcgcccagttcgcccatgcgggctgccccctgctgggggacggcaaatacggcaccctgggcaaaaacgcgccgcgcaaataccaggccctctacgcataccgcctggagtttcgcttcacgacgcctgcagaggacctggaatacctgaacggcgccagcttccgcgtggacgacgtcgattttgtacaggagtacttccctgccgcaacgctttcgaaataacgcaaacaccgccctgcttgtgctggctgggcggcgtttttatgcaagataactgccccggggcccggggcgttgggtgaattcaaggtgcaaattcaagaggagacggtcaagcgctccagcgttgcgccgcgccgccactggtcgagatagacgcgggtgcattttttataccgggcgaacgtctgctgcgccgcatcgacatcgccatagaccttccagcatcctgccagcttatggcgggctgctttgttttccataaagccctggacatcctccggcggatagccgagaaataggccaatttcgtggggaaattccgcatcctgccgcagatgggccatcagctgggccaggcagcggcccgttgccggatcggtgtagccttttttgcgcaaaatagccgccgcatcgtgctggcgcaggtcagattctagctggcgcgaccggtacaggtacagcagcacatgcccgggggtaaaccgcaggggcaaaatttgtacgcccttcggcgagagccgccggttccactgccgcagctgcgccagcaccgccgggacatccgggcacggcgctgtgaccaggctgccggtcttgagccccgccagggtcggcgcgcagtgctggatcaaaagttcctcggacatatttgtctctccccttcccaactgctcgttagcagtatgcgcaaatacaatgatttgatgctctaagttagctaccgctaactatcgtaaaaaagaaaagcgcaggcaattccgggatcgcccagcgcgaaggacgccacgcccccaccgggcccggtgggcgatgaatcaggtcttgtcttgacggcaagcgctgcatccgtcacagctgccgcaggagcagccgcaggcgctcttccctgtctttttcttgtggatctccgaagcgatgatcgccacaaagaggatcgcgacaatcgatgcaatgatcacagtagccataaagacccctccttatttcgccgcagcaacctcatggacgtgcagcgtgttttcgtcgtacttgttcttgcgaaccagcaggtagagaagcgcagccaaggcgatgatcgcgacagcggtccaaacggtgaagccgttgccggagatgagcatgccgagctgatagacgatcagcgcgacgacatatgcaaaaccgcacatatagccgatggctgcccaggtccacttggcgttgttcatttcccgcttgatggcgcccatcgcagcaaagcaaggtgcgcacagcaggttgaagatcatgaaggaatacgctgccagctgactgccattgaagaattcctgaccaatgacggtcagaccggaggtgttgcccgcttcgaccagctccatcgccagatccgcgctgcccatggaggacagggagccgaagacgccaacgacctcttccttggcgaccaggcccaggaccgtcgcgacagcggcctgccaacggtcgaagcccagggggtagaacagaacggcaatgccttcgccaatgacattcaggatggacatttcgtcgccatcgccgatgtagtggaagccgccttcaaagctcaagctgttaaggacccagatcacgatgctggccgccacgatgacggtaccggcacgcttgataaagctccagcctcgctcccaggtcgcccgcaggacgttgaccgggatcggtgcatggtaagccgggagctccatgacgaagggagctgggtcaccggagaaggccttggtctttttcaggatgataccggagatgataacggcggcgacgccgatgaagtaagcagaggttgcgacccaggagctgccgccgaacagggcgccggcaatcagaccaacgatgggcatctttgcgccgcaggggatgaagcaggtggtcatgatggtcatcttgcggtcacggtcctgctcgatggtacgggaagccataacaccggggacgccgcagcccgttgcgaccagcatcgggatgaagctcttaccggacaggccgaatttgcggaagatacggtccatgatgaacgcgacacgggacatatagccgcagtcctccagcatggccagcaggacgaacaggatcagcatctgcgggacaaagcctaggacagcgccgacgccgccgatgataccgtctgcaaccaggctcgtcagccagccggcgcagccgatggcttccaggccggaggtaacgcccgggacgatccattcgccgaagagcgtgtcgttcataaagccggtgacccagtcgccgatggtgccgatggagatggtgtagaccgcccacatgatgacgatgaagatcggcagggccaggattcggttcgtcacgatcttatcaattttatccgacgtagagagcttgcccgctgcctttttcttgtagcagcgcttcatcagctggccaatgaaaagatagcgttcattggtgatgatggattcggcatcgtcgtccagctccttctccgcggcctggatatccttttcgatatgggctgcgatcttcgggtcgagcttcagctgttcgagaaccttgtcgtctcgctcgaaaattttgacggcataccagcgctgctctgcttcgggcagattatgtactgccgcttcttcgatatgcgcaatggcgtgctcgacggtgccggtaaaggtgtgcagcgggatgcagctgccctgcttcgcggcttcaatggccgcttccgccgccgccatgacgccttcgctcttgacggcggagatctcaacgaccgtgcactccagcgcttcggccagctgcgcggtgttgatcttgtcgccgttcttccggacgacgtccatcatgttgatggcgatgacgaccgggatgcccagctccatcagctgtgtcgtcaagtaaaggttacgctctaggttcgtgccgtcgacgatgttcaaaatgacatcggggcgctcctgcaccagatagtttctggcgacgacctcttccagcgtatacggggaaagagaatagatgcccggcaagtccatgatggttacgccatcgtgcttcttcagcttgccttccttcttctcgaccgtaacgcccggccagttaccaacgtattggtttgcgccggtcagcgcgttaaacagtgtggttttgccgcagttcgggttgcctgccagcgcgatttttaagtccatagatttcactccactccttatcaaattagctttcgctaacttattgtaaaaagaaaacactgcgtataccgggatttgtgcaagccttccggaatgcatctaggtgttccgcacaaaaatcccatcagaggcgatgcctcatacagagtacgacgcagcacgatgtatgttgcgcagcgcgcggatcaaaagtcctcctcaggagacttcgatcatctcagcgtccgccttgcggatcgagagctcgtagccacggaccgtgacctcgaccgggtcccccagcggcgcgacctt

SEQ ID NO: 692 - DNA, 15105 bp, Unknown
  16S sequences of unknown bacteria
ccttcttctcttatcccctctttcttcctcatcccactgagtttgacgaagagcgataaaatatttacaaaaagaatattttgaataaaatatacatacgcaatctcaatgataaacttagctaaaaaactttcatgcaatatttcttggggtattagtacattttttagctttgcgggcaaattgcaagtgcagtcaattgaatttagtaatttgaatgctgctctatgttccgggagggggaggagcgataataatgggcactgccctgccgtattttttgagaaatcagccggcaagacaacttttagatatttagaagatggcgaaatagaatccactttaacaaaaagcgtggaaagcatagcaaaaatattcaacggaagtctggataatttatgtggacaatattataatgccgatgcctccggcatcagatgagaactgtaaaaaaagatgacaatcaaaatgaataagatatttgcatttataatattgaatctttcaggatattgcgccttagccataggacttcccaaagctgaaattctatggcaacattttttcccttttgacaatatctcattttcatataaaaaggaaagtgcaacgaaaggtgagaaaatcgagaagaattattttttaatatttgaccggcttagccggtcttataaattagtgtctcgtaaagataattttgagctttcctatttaaataataagattacatcattgcaagataggaaatatggagtaataaaaaacgactttggaattatggatttcccgtctgttttaaatccttgggtagatccttatgccgactataacttaaggctttcagttcaagatacaaaaaaactaaaattgtatgaagacgggaattacattgtaataaatcatgccaatacaaaaatctattttacaaaaaacgactaccagttggctattgttgaagaatatattgaagatagaacggcggataacaatgaaccctattcctacctattcaaaaaatatacttttaataaattttacaatctaaacggaaccaatttccctttatcaataaaagaagaaatatacggagcagatggaaacatagttgttacaaacgattacactattgacgaaaaatcgattagaataaacgacaactttaattcatcaacagccatttccttcccagagggaaccattgtttggaatatgattacaaatgcaagatacatccataccgggattgatggctcaaccacaaaagaagaagccatagaaagattattagatgatgcgatgaaaagtcccaataaacatgaagacgaaaataaacttataaaagacaaatagaatgaaaaaaattatatggaaaaatttaccataattgcacttgttttatgttcatcgcatattggagttgggtgcgtaaggacgaccgcaacattccaatagcccaaattagaaatctttgaatagttaattctatttatataattctttaatttttacatttcgacccgtcgttttgcaaattgcgcaataaaatgttaggtcaaccacaagtcagggaatttaatgaaaggtactcaactccaaaagttgtggaatgcggattttcgagaaaacagatttcaaaaaattcacaggcattttaaaatattatacgcagtgctaaaaaatacccagccgcaaaaagcgcatgtttgcggagcgtcatatcctctttgtaagcctcgcatttcccctctttaaagcggatgaataggaggcgttttttgcctttaataaaagttttcttccttcaatgctgcgcgtatatacaatatcgcagtcgccaacgtatctgcgccacaatccggcaaatgtttcaaccgtttcgcgctttgctgatataattgacggcactgcatggtaatccgcctgcctaatatttttccacgtctgccgcctcaccaatatatagcggggattttctatcggatcgactatttcccgaatggcgtttatcacggcggaagtttcgtcttgcggcaaatttgatatttgaaggcacgacatatctccagatgtttcggactttattctcaccgtatccaagcgcgttttaactatatccattgaatatagcgtttcgattacagtccgggcaatttgcctaatatatttattcggattcccgcagcgcagccacattaaggctggacgaaatgaaaaatacgcaaatattcccgcagccgccgcaagaccgaaagcccccgccctctgcaaaacgtatatataacttccggccgcaatcagaaaataaaatgagagaatgtacgataagtttgcgagagaccacaacctattgtctatcttatgagaggcaagctcgctttttaacgccaattccggattgtcgtaagaatccttaaagccttcctcccaagcccgtctaatggcgggcaaatcgaccgaggccgccaatgagcggctgttccacgacggcggaatttcgcgctttgccagcattttatttacgtccaatattctcgaaatcccgcttgaaattacaaccggcttcgatattgacggcgcttcaaaaccctcgaaccgcctcgttagcgtccttatatcgtgaaggtaatcgtcagactcaaaaagttcagactccgacatcgacgattttggaagaagcgccattaaagagtccgtaaagcttataaatcttatcgaacaaagatgccatattgtggctactttttcgggatttttcttgtctattctaacggcgcgcccgcgcatctggttggacagcatataggatttcaccgtgcttgaaagaattatggaatttatgcacggagcgtcccacccctcgccaagcagcgcttgcgtccccgccaaaacgttaattttgccggactcgaaaagcgaagtcacaacaccaatcgccttatgccttgcatttccgcgcaaatgcagcttagcgtacctttcgtcaaaatccaaaatttttacggaagctccgccttttagcgttggggattcggcagcaagctcggcacattcgcgcggaagtattataatcgaccctgtaaggacgccaagtttcaaaccctcaaagccgcgctttctgagcatctcgaatacgggaactaccccaaagctcgttatctgggaattcagcgcctccgctcttatatagtccgcaagaatcagcattctcaaattttcgccaaaagcagcgctttgcgccgagacaatcgcttctattgcgtagagctttccgaggcttagcgcgcacattctttttattttcccgtcggcaagcagagagaatttgcccttgcatataagccctgccttttccgcagattttttcaattctgaaatttctgcttcagcgcaaccgaacaatccgcgctctttaaaaaacaggccgtttaaaagcgcgtcaatgtcggatagggaaaagctttttatttgatggtattttacccccaacattttgtatagttccgtattgggccttatttcaaagcgttttagataggccagaagcgcgagaaaaaaatctggggcgtcaaggacaacgtctattcgcgcctgcgcctcttggaaaatctcggcgagtgaaagtttgccggcaagttccgcattcttaaaaacgtcctcggcaaaatccgacaacacccgctcgcgctcccgcgccgcaatcttctcggctttcctcaattccgcaaagtagatgaaatcttggtgcgggcatagatcgcccacctttacaagttcgggaattgatatgcaggcgtcaataggcccgcacagcgcctcgtatcgcttccattcgccgtacccgacatcgaatgggggtgttgcggtgagcgacaccgttttgggagacagactttcgcacaatatatttagagccttccaccactcgtttctcaggtggtgggcttcgtcaaggcagagcgcctttattccggcgcggcgcaaagtttccactgcattgactattttaggctcgtcaaaccgcgcattatatggctggaaatcgtccagtatttcgccggattttgcttcgcttgcagcgctgttttcgccttcgtcaatgccgcaaaacgcagcaaacaacccctggtaagtgcttattgtaatagctttcggcgctctaagtgaaagcgatattattgattcgcactcttctggcttttcgagaaatgcttcgcaaatccgcgacttccattggttgcggattgccacggtaggcgcaagtatgagcgtaggaatgtcgagcctcgcgataatttcaacgccaagggttgtcttgccggcgccgggagccgcaactacattgacttttttgtccgccaaatgcgcgttcaagctttccaacacgtttttttggtattctctccattcgtatttgaaacgcaatttgtcgcgcaatattcccatgcggaaagattttcaactttccagcctattttacaattaaaatagttttggcgcggaaatgcacttgcattttccagaaaaacaaaccactgaacgaagcttcttacttcaaaactatgtttcaaaaataggcaaacggcataaacagtatctgcaaaaaaataaaaaatttcttttaatgagaataaaatattatgccgtggcagctcgggaaatctccgacggaacgcgttggtttagccttgccaaaattgtccggaggtggtttatttagctttatgacggagaaaataaaaagtctttttttatcggtcgctttttttgttttggcggcatcttttgcgggagccgcggaaaaatcggcaaatgttggcgtgtactatttcgacggatgggcaggcaaaaatctcttcgattccaatcccgcacatacgtgggcgaaaggggcgccttcgcaccttagcaaaaaattggcgaccgacttctcgggccgcgagccgctctgggggtggcgcgacgactcgcaggaaattatggaccgccaaatagagcttgctgctgaaaacggagtctcatttttcctcttttgctggtattggagggacaacaatggccctataaaccaaaaggcgatagagtccgacccccttcacacttcccttaacctctacttaaaatccaaaaataaaaactctctaaaatactgcctgcttgtagccaaccacgcaggcgcggagataaagggcgacgaaaattgggctgaagctgttagatattggtcaaagtatttttccgacccccaatatatgaaagtggacggcaagccccttgtagtcatatttagcggcaagggaaaatccattagcgacaaacaaatagaaataatgaggcagactgcaaaaaacctcggatttgaaaagggaattgcgatagccggctgcaatgcgccaagccgtccgtttgacatatcgactttctataacatcgttccgggatacaatacgggcaaaagccgcgaacgcccgtacagcgacctcatttccgcaacgaaagccacatggaacgctccacacaaaaagccgttcattcccgtcgtcacttgcggctgggacaagcgcccgtgggaggggaagtcgccggaggggctctggaacacgcctttgggagattactacacgggcgacaccccgcaagtgttcggaaaatttttctcggacgccgtaaaatgggtaaatgaaaatcccgataaaacagtcccggaaaaaattgtccttgtttacgcttggaacgagcttggcgaaggcgggtatctcgtgcccactaaggcggatccgtccgctaaaaagctaaaagaaatcaaaaaggcggtctttaaataatttattttgcgcgaatatttgcgcgcctaataaaagcaagaaaaggcaaaaatgcgaatagcagttttgtggctcgcacgggaaagaatttgtgaagaaagagcattgatgttttagcaaagcttaaacacccaaatttttctccgagcctcaaattcaattcacgttttgtgatttgtttttatttctttgtacggcaaagcaggataaaaaatgaaccgcgcggatttgtattccggatattcgcgcggaaagccgcgaggattgcgcaatttttcctattccaatctccctgcacgaaaaccgaaaacacaaagaaaatggaaaaattttatattgaggccggggtgcgagttgcgcacgctttttagcggataaaacataaaaaatttctattggctcaatcctataagcgcaatacaagcaacggttaagcgtaatccgcaacagctatcggcaggataataagactgtttccccaaaaataaccgcaaccccacaccgaataaaaatttacgctttgcccgtcttgcaatcaagagctataaggtgcataaaacagcaatgccgattgctttcccggaatttttgtaaattttccggttttttttgcttgtgcaatagatggatatatggtgaacttacaactttaccaaaacgcgcggtgcgtttcggaaaataaaaatcaaccttaaaaaagaaagtatcccaggttcgcggaagcgaatacggagcaaatcaatatgaatatcactgtaaaagaccttctcgacgcaggcgtgcacttcgggcaccagacccgccgttggaatcctaaatcaaagcccttcgtttacgaccaccgttcgggggtttccattatcgacttggaaaaaacctacgcgcagcttgaaaaagcggttgcatttgtcgaggaagtagtcgccgacaacaaagacataatgtttatcggcacaaagcgccaggcgcaggaaatcttgcgcgaagcggccacaacatgcggaatgcccttctgcgtaaaccgctggctcggcggaactctcaccaactttgaaactatcctcaccagcctcaaaaaatacaaaaaattcctcaatatggaatcctccggagagctcgacaagctctacgcaaaagaggctgccgcaatccgccgcgaaatgtcgcgcatgaaccgcaactttgagggcattaaggacatctccaagctccccggcgcggtatttattgtcgacatcaaaaacgaggaaattgccgtttctgaatgccgcaagctcggtatcccgattgtcgcaatggttgacacaaactccgacccgtccctcgttgactacccaattcccgcaaatgacgatgccgtaaaaagcattcgcctgataactgaagtcatagttgaggccattcaaaacggccttagccgcaggacagttcagcccaagaatccccagataatcggcaaggctgaggcccagccagaagctgccgttgaattcaaacaaattgacgtcgaaagcgtcgaagaacccaaggcataattatggatatcaccgctaaaatggtaagcgacctgcgcgcacgcaccggcgcgggaatgatggaatgcaaaaaagccctcgtcgaagcgcagggcaacgaagaaaccgccatcgaaattctgcgcaaaaaaggcgtggctacggccgctaaaaaagccggccgcaacgccgaacagggcgttgttgaagcatacattcattcaaaccacaaggtcggcgttctcatagaagttgcttgcgaatccgacttcgtcgctaagaacgaagatttccgctcttttgtgcgcgacctctgcatgcacattgcagcagcatcgccaatttgcataaagcgtgaagaagttcccgcggaacttatcgaaaaagaacgcgaaatcgccctcgcccaaatggccgaagacaaaaagcccgaagccatcaagcagaagattgttgacggaaaaatcgacaagttcatttctggcgttgctcttctcgaacagccgtttgtcaaggacgacaaaatgacaatcaaccagctgctcacccaaaagattgcaactatcggcgaaaagattgagataaagcgcttcactcgttatcaaatatagcttcttttaaattcaaaaaagcgttcgggcttcccgaacgctttttttttacacatcttttttaaggaattagcggcaacaatctttgcccttgccggtaaacgcgtccgccggacaacgtttaaaaactggggtctaaaaaatatgagacccgctttatggggaaatttttttaactgtcttataaactatctgttaatttccttgcgtagctaatcgcgatatttagttaataaaaaaaacgctctttacaatttgggatttataaaaacaataacgttaaatagcgtagcatttcagtgccgcgctttgcaccggctaagtggcgattatgttataaaagcgacgcaacccaagcttgataagcccgaataggtgtctaacagcgtatatttaactctaaaatggaactacatatgatgaaaagactaatattattggcagcgggcgcgctttcgtgcgcggcatacggcgaagaagcgcccgcaataaacgccaccgctaatctcgacaggcaattccaaacaatcgagagtttcacggcttccgatgcatggagcggaaactttatcggaaagttttttgcagacgacaaaaaagaaaaactcgccaaatggctattctcccaaaaatatggcgaggacggcagccctgagggaatcggccttagtatgtggagaataaacataggcggcggcacttgggaacaggaaggcgcggatattttcccgatacaacgcagggcggaatcgttccttacaaaagacggcaaaaactacgactggtcgaaggctgctggccaacaatggttcatgaagaaggcaaaagaactcggctgcgaatcgttcctattgttttcaaatactccccccgtccagatgacccaaaattcaaagggctataaagatgccgcagacttcaagtcaaatctgcgccctgacatgtacgacgattttgccgaatatatggcgacagtcgccaaacattttgtcgatgaaggctacaatatcgactacattagccccgtaaacgaacccggttggaggtggtccacaaacgcgcaagaaggcagcccgtggctaaatccggaaataaaacggcttgcaatcgagcttgacaagtcgctgcttaaacgcggattgaaaacaaaacagctcctctgcgaagccgaaggcataaactacctatacgaaaaagattcgtatttgaaaaagcgcaaaaatataaataaaaacccagaggaagacctgccttgcgaccaaatccgcgcgttcttcgaccccgacagcaaagactatatcgggtatctaaaaactctgccgcgcaaaataggcgcgcacgactaccatacccacaattccaacgaagaaatattgtcaacccgccaaaagctcaaagaatgcacagataaatacggagtgcaattcctgcaaacagaatggtgcctactgcccggagtcgtctgcaaggatgacatgccgcaaaaaaatccgtcggatatggacatttctctgctcatggcaaagttaattcatactgacctcgtgcatgctggcgcccctagctggggatactggaaagcttttgaaattaacggcgaccacgcgcttactggcgtttatcccaaaaatggcgacatttgccaaggcggcagcgtcttcacccgcaagaagctttgggtgttaggcaattacagcttcttcattcgccccggatggaagcgcgtggagctttcgggtgctgacaatctcggcggtgtatttgcatcggcatttatgtcgcccgacggcaaaaaggttgcggttgtcgccgtaaacgtctcgtacgaaccggctgacttcaacttctcgttggaaggcaaaggcgcggaaaatctgaaaaaagtctctgcttttatgacgagcgaatcggcaaatcttacgaacctgcgcatagaccccaaatttgacgggaagcgcactttcaagctttcgccgcgttcggcaacaacactgctatttgagtaatttttaagacactttattatcgcgccttcaaaaatggcgcaagacttcgggaaacgggcggcaaaaccgcccgttttttattctccaaaataagaaatttctaccgcataaaaaaattttttagcctttgggattaatttttccaaaaaaagttttaaggcttagagtaaaatccgtttcgcgccaatattttcaagcaaacacaataagtataatgcctaatattgtagagcgctttgattttgccgttttttttcaaaaagcgtaataagtaattctacatcaaaattaaatctcataatctaattgcttatttttaggtgcatatctttttaaataaaaaacgcccttttataaattttgtgttgaatcataaaaaacgtatatttataaagttttccaacagaaaaccaaatttaaaaaatatgctaaaatatacactaatcccgcttgtttgcgcattagtagccgcatgcgcatcgaatccagaatccaacgcaacaaactcagtttgcgcaagtaaagatgccacaaataaatgctccgcaaaaagcgaatatgatgtagcagcaattgtatggcccgcctaccaccccgaaccaagatggaaagagcttggaattttcccgcatggaaccggcgaatggcaaaacgtgtatgaagcaaaaccaaagtttgcagggcacaaacagccgatagtccccatgtggggatatgaaaacgaagccgacccgatagccgtagcgcgaaaaatagacgcggctctcgcagccggcgtaaatgtgtttatgtacgactggtactggtatcaaaaccggccatttctcgaaggagcgctcaatgacggatttctgaaagctcccaataatgagagaatgaaattctttttaatgtgggcaaaccacgatgttgactatctatggaacaataaggtaggcggcaaagacaaaggaaaaattatatggagtgcggacgtctcttacgatgaattcacaaaagtgttagtgccgcgctttatgggatatttcaaaaaaccgaactattataagataaacaataagccggtactcgcaatgtttttaatgcgaaacttcgtgcgcggagccggcggtccagaaaaaacgaaggccgcaatagagttcttagataatgaatgcaagaaggcagggtttgcgggcgtgcattttatgatgatgaacttccccggcaatgtgcccgttcccggtaaagaaaaaggaactgccaaggaaatcgccgactattacggattcgactcaatgagctggtacaactggggcggagaccgcaaaggcggttatgccgcttggagagacagaaacattccgctttgggaaaaatgcaagtcggatttcggagtattcttcccgatagtatcgaccggctgggacaacaatccgcgttttccgcaaaaccagttcaccgcaatttgcgagggcaaatgcccgaaagaatacgagaagtcccttagaatcgcaaaagattgggcggataagaacatacccgcaggcaacccgaaactcatattcataaacgcttggaatgagtggacagagggcgaatacctcgaacccgacaacttctacggctacgactacctaaacgcgacagcgcgcgtatttggcggcagcggacaagccacaaaatagttgctctttttgcgccgcaataattggctaaattgcggcgcacatattttttgctattatattggctcttgctgcgtatcgacttttaattctgcaaggcgttgcggctgtaatatttctccaaaagcggtcttatcattaagactgctttttctgtgcgccttctttttattttagtttatcattaaagtaaaaaaatattgtaaatcaaattctccaacaatctgcatggcggatttttgaggcagtgtttttgggaggtttttttgtgtgaatagtttgagtcaaagcaatccgcttaatattggcaaaattgaggaaaaatcaaccatatgggttcataatttccaacaagacttttccacggcttttcatacaaaacggcggtacggacactcgcgtaaaagcaatcgcttaaaaaaataaaatattttgattgcgaaaatatcgcttcccatagaaaaagcgccggactaaattccgacgcttttttaataggcacccgcaagcacggcaagttgccgcgctgcaaaacatcgccctgtcgctctcaatggctatttatcgcccatagtggagcgcgtatattttgccggagagtccggcggagtatatccgtgggtgcgcccttgcgtgaaaacaatcttcttaggagcggtgatgttgttgtagagcgatgtcaccccggacggcgggcatgtgtagtctccaaggcctgcatctatctcgacggggcattttatgcgcttgccaaagttcacgctgtcgtaataggcgcggttgggcaaatacttcggaagccatccgccgagcctgccgtcgtccacacctccgaggtcgcacatccaagttatgctcgacttgcatttggtgacttttgggtcgagggcggcggtcgctatcgcctggaaacctcccatgcttccgcctgaaacctgcaagtccttgcggttccattcggggcgggaacgcagatattcgagtgcgcgcaagtcgcgcaacaacatcccgtcaaagtaggaatctttcggcgatttcaattccttttcaaatccaaaccccgcgagctttccctttttaagcccatcgtagtacgccttgtctttccccatatccatgctgtggggcgagacaaagaacactattgcgtcgtaaaccggccattggtgcatatcaaccacactgtacccctgaaataccgcctgcgcgggcaacgatttttccgcggcgttcttcggaatgctaagataccctctcacaggatccccaacacagtcgagttttacgtcgtaaacatcaagcttgtcgttcgatttaccggggagaagcgtaagctctgcctttatcggggcttttttcagcgagcgtttgcgggctttccaatatttgtcgaagtcagcgggctcggggcgcgcggacgttattttatcaaattcggcgcacgcgccgccttcaaacttctccgcacccttcaccggctttccgtcgtcgccaagaatttccatttttaagtggacgtagccgggtttatctatggatgtcttatatacaaaaggcttttgcgcatcggaaacatattccccggaatcggttttgccgtcgtcgccgcgcctcgtgtactttatttttttgccgccgagtggcttgccgtcctccataagagataccgtaaagaccatctgctcgccgggcatatacgacagggcatccttgtcgcaagttcctttaaaataagtccttgcggataaaaccgccgctgacgcaaacatcgccgcggcacaccaaaacgttatttttttcataacctcaaaatagcgtattgaaaaaataccttcaagataaaaataaataatgcggacttttattcttgattggcggcttaaagtaggttttattagaaactttaagaaacatagcagcctatgagcgaaaaattttttagaaaaggtccacaaaatgcggcaaaaaataaaccgcatatcccgaccgacgcggaactggcatctgttcccgcatctgacgaacgcaagaccgtaatactcgacgaagatcttgaaggcgtagatcttgaagacagagtttggctttattggaagagaaaccgcaactttataatttttacgatagttgcggcattcgcgattgtaataggagttcaaggctggaagatgtataaagcctcgagctccgataccttggcggcggcttacgccgcggctaatacgccagaaaaacttgcggaatttgcaaaagcccacagcggaactacccttgcgggagtcgcccagctgcaaaatgccgacaccgcttttaatgcaggcaagtttgccgacgcccaaaaactctactccgaagccgcaaaaaatctcggcgaagaaactcttgcggggcgcgctaaaatcggcatggctatgtccgcaatctcggctggcgattcggcaaaaggcatggaggccctcgaaaaggtttacaaagaaggctccgtgtattccgcccaggctggatatttgctggggctcgcaaaagtccaaaacggaaaagttgacgaggcaaagaacttattcaaagagatttcaagcaacaataataacggggtatttgccctgcttgcaaatcaagagctttcaaatttgaattaatatcggtttgtaggtttgtagttggcggcgtgcaaaatttttgcgcgccgcttttattttaggcaagatgtacggagagtcgctcgaataaaaatttatctacgcaattttatcgagaatctgcctaaacgacgatacgggagaatcctcaaatacatccacgtcgaattttgcctgtatcctgacggcaagctcggcgagatcgaacgagtcaaagccgatgtctgaacgcaaatcggcatcgagcggaagcgcgtcaagagcctcacgaccgccgtttttaagaacggtatttacaattaaaagaagttcttcctttgtctttttgggcatatattgaatttgtcaaattgaataaaaaaaacttagccagtcaaattaaaatggaaataaatgcttgacaaaacttcgccgattgagatgttcttattctttaaaaattgaccagtggtgtaatggtagcacaaaggtttctggcaccttttgttggggttcgagtccctactggtcaaccattggcgtcttttttaaggcgtctttttgggtcaacaccaaagtcagtggattttaatgggtcaacaccaaaggttgtggaataggttggggtcaacaccaaaggttgtggaataggttgatttttgggtcaacaccaaagtcagtggattttaatgaaagacgccgcattggacaaggaccctcaatcgataattttgactcgcgtttgcatgcgcaaaccgtctcgcccttcgggtcttttgcctacggcaaaatctcattcgcgcttcgcttaaatgggtcaacaccaaaggttgtggaataggttgggtcaacaccaaaggttgtgga

SEQ ID NO: 693 - DNA, 5996 bp, Unknown
  16S sequences of unknown bacteria
aacctcctgcagccgtttttcttcttcgccaaccgtcagtgccgactgaatgtaggactttttgcttccgtcgcttgtaatgaaattagcctctaaattagtctttttgctctttccatcggttccctatgacaatgtcaaatttccaactcacagttgtgaaccgtaacaaagcatctattgtatcaaaccataatttgtgatataataaggtcacaccggtgataaagaatatgtggaggtttttatggaattaaaaattggaggaaaaattgcaaaataaagaaaactaaaaggatatacacaagaacagtttggagaattggttggtgtttcgggacaagctgtgtcgaaatgggaaaacggaggcgttcccgatacttatttgctaccggttatctccaagattttaggggtgtctattgataccttattgggggtagaaaaaaagatatcggattactcccaggatgatattcttgataatttgtttatgttttgccttcaaaagaccaactgcaaagatgatagaatagatttcttcaaatttctgtttgaaacaatatggactttgcaaagtgcatattttggaaatgaaaaacgtccgctattaaaagatgttattgaaaagtgtcgtggcaatcagcaaataacatctcaaatcatcaacaatgagggaacgacgtatttttctcttgtagaaagttttccgttctttttggcagttatggatacgcccgaaatatcccaaaaactgttatccgaaaagaactttggagagttcttctcgttgctcgcttcggaagacggaatgaaagcgatcattttcacacaaaccacaacagaaacaggtcagtatacggcggaaatgataactaaaaaaattgggattaaacttgaaagatttcttgaaatcgaacctctgcttattaaatacggtcttttgaatgaagatagtttaactttggatgacggcataattaaggtatatcataagttgagtaaccccgaaatccgtccgctattgataatggcataccaatttatcaatgcaagacaatgttactacaatttcacttgtgacagaactaagccttatttcgaatacgaataaatcatgaccaccggttctaccggtggtcatgatttattgccattaaagttttgatacttaaataaaacaaataacccgaacgcttcgccaagtaagagaatattcggattattcgtatgtggtcggagtgacagggctcgaacctgcggcctcaacatcccaaatgtcgcgcgctaccaactgcgccacaccccgataaaatatttatttttttgaaaatgcaatatcgaaataagtttgtagtgaaagttgagaaactgtcttcaatgagatttattcgatattgtttatattatagcaaaatcggcggcaaatgtcaactgcggaaaggcaacaatgttgatttaatccaattcacatataaatatcgcatatatttgtttgttatttaacaatttatatgatataataactctgtatgggaatgatttccgcgatttccgaagcaagagatgaggtaaaaagcatgagtgaaaaaaaagaaatagttgccgccgtatattcgggcgaacgcccgttgttcggggagcatgatcttatcataaaagatacgatatttgatgttggagaatcccctctcaaagaaagcaaaaacattgaactctacggcagtatgttcaagtggaagtatccgctttggtatgcggaaaacgttaccgtggaggactcgacatggttcgaaatgggacgggcgggcgtttggtatacaaataatatctccgtcaaaaactgtgcgatagaagcaccgaagaacttccgcagatgcaacggcgtgacgcttgaaaacatgtcttttcccaatgctgcggagacgctttggaattgcgataatgtagcggttgcgaatgtcagcgcaaaaggcgattattttgcgatgaacagcaagaatatgacgattgacggtttgacgctttacggtaactattcgtttgacggcgttgaaaacgttgttgttaagaattcgaaactgctttcgaaagacgcgttctggaacagcaaaaatgtcaccgtttacgactctttcatttcgggcgaatatctcggctggaatgccgaaaatctgacgcttgtaaactgtacgatagaaagtttgcaagggctttgctatatcgacaaacttgttatgaaggactgcaaactgcttaacacgacattggcgtttgagtattcgactgatataaatgtgacggtaaaaggcgacatagccagcgtgttcaatccgtcgtcgggcagaatcgaggcggacaggatagaggaacttatcatagagaaagaccgtgttgacccgacaagaacgactatcgtatgctccgacattgtaaagacgtcggacaaagccgaaaattaggtggagaaaatgaaatacgattttgatgaaataatcgacagaaaatgcaccgattcgataaaatgggacgtggcggacggcgaacttccgatgtgggtcgccgatatggatttcaaaaccgcgccgtctgtattgaaagccattgaagatcgcgccgctcacggtattttcggctacggagacgtgactgacgaatggtatcgcgcttacggcgaatggtggaaaacgcgccattcgtttgagctgcgaaaggattggcttatcttttgcacgggtgttgttcccgcaatatcttcgatagtacgtaaactgaccactcccgccgaaaaggtcgttatacaaacgcctgtttacaatatatttttcaacagtattctgaataacggcagacaggtttccgaaagtccgctgcgttatgaaaacggcgtatattcgtgcgattttgaagcacttgaagaaaaactttccgacccacaggcatcgctgatgattctttgcaatccgcacaatcccatcggaaagatttggcgccgcgacgagcttgaacaaatagggaatctttgtaaaaagtataatgttaccgttgtatcggacgagatacattgcgacttgaccgaccccgggaaagaatatatcccgtttgcttccgtgaacgatacctgccgagagataagcatgacttgtattgcgccgacaaaaacattcaatatagcgggtattcagacggcggcggtcagcgttcccaatcccgttctgcgccataaagtttggcgcgggcttaataccgatgaggtctccgaaccgaacgcattcgctgtttgtgccgcagttgccgcatttaacggcggcggggaatggctcgacgagttgagaaaatacctctttgaaaacaaaaagaccgttcgcgaatttattgcaaatcaaatctcctcattgaaagtcgttccgtcggaagcgacatatcttttgtggatagactgttcctctctcggttgcaactcacgcgagttcgcaaagtttctgcgaaaagaaacagggctgttcctttcaaacggagcgcagtacggcagcggcggcgaaaactttttgagaatgaacgttgcttgcccgaaaagccttgtccttgacggacttgaaagacttaaacgcggcgttgacgcatatatgaataaataaagaggcgactttttatgtggatagttcttgcgtttctttccgcgctgttcgcaggacttacatccatacttgcaaagtgcggcatacggaggaccgattcgaccgttgcaacggcgatacgaactgtcgtagttttgataatggcgttctgtatgacgcttatcgtcggttcaaccggacagataacctcaatatctccgaaatcgtggatattcctcgtcctttcgggacttgcgacgggcggttcgtggctgtgctatttcaaagcgttgcagctcggagacgtcaacaaggttgttccgatagataaatcaagtacggttttaacgataatttttgccgcggtttttctgcgcgaacccgtgtcatggctcggctggctctgcgttgtcggcatcgcagtcggaacatatctgatgattgagaaaaaagcccgcacaggcggtgcaaagagccgcgcttggcttgtttatgcggcactttcggcggtgtttgccgcgttgacttccattctcggaaaaatcggcatcgaaaacattgagtcgaatctcggcacaaccgttcgcaccgctgttgtgctgcttgccgcgtggggtatggttttggttacgaaaaaaggttctcaactcaaaacgataccgaaaaaagaactcgtttttatctgtctttccggacttgcgacgggtggatcgtggctgtgctactacaaagcgcttaaagacggtcttgcgtcgattgtcgttcctatcgacaaactcagtattcttgttaccgtcgctttttcttatatggttttccgcgaaaaactgacgctgaaatccgcaatagggcttcttttgattgttgcgggaacgctcggtatgatttttgtttgaaattaaatatttgagtattcaaaaacgcttcccggcagggaagcgttttcgtatatgctaagtcttttactcctcgcggcaagttccattgtctcgttaagttcccgggagaaattttccatttcgcacgcgagttcttcaaaatatgcctgacgaccgaattttcgtaagcgttaccgtgatgacgggagtaatgattacataaaacagcaagtcaacgaaaaaagaagtcgttacgcccgaagatgtgaatatcatcgccgccgcgataagaaccgcaaaaacggcattgattatcgtcgtataacccatcatcggaagcatcatatctttggtgtaagatatgacccatttttcgtattcgtctattgagcctttgaattttttgaaagaaaagaccgattgtccgaatgttttgacaacgggtattccgcgcacatattcaaccgcttcgtttgacatattgtcaagcgcgttctgatactcttccattttctttttcatttttgaacccgtcattgaggacattatcaaaaatgccagaaccacgggaacaaggctcaaaagcccaagtctccaatcaaagaaaagaagcaatgcgataagccctatgggcgttgccatggcccccgccgagtcgggcagttggtgcgccagatacgtttctgttgcggcgcttgcttcgttgacggtttttctcattttgccgcttccgataccgtccataaatccgagcggaagcgttgcgatatggtgcattgcttcgtatgtttgcctgaactctgaacgccgcaatatgcgagcacataagcgcgccgatgtagacgagcatggcaccgacggcaaagacgaccgccataataccgttgtgagtgagtgttgtcgcattttcgtaattcggagcgacatcaagaacttcttttattatcttccagatataaatgaacgggacaagcgccaaaagggcactgatgaccgacagcacccacgatgcatacgtcagccacctgaaattgcccgcataatccaaaagtttttgcaaatccgatttctttttcaaatcggttacctcctttttgttcggataattccgagcctcattgttttcgctgttataatagcacttttcgcttgtcttttctgctccgttcaaacagagttaggctccgttcggacaaaaaacaaaggctgcaaaaaacttacgttctttacagcctgttcagagataggaaaaatgttcagaatgagcgaattgagcccatggctgatgatattcgaactctcatcggttttgacgggcgtattttcgtcctaactttcgcaaaagccttgtaaatacgtcgagtatttactgcggcttctttgtcgttatgacaaaaatccgctccgtgaaaactgcacgcacccgccacagagaaattttcgaggaattttttctttttgaggtgcaggcgggctgacgcccgccaaaacgaaaagagag

SEQ ID NO: 694 - DNA, 32759 bp, Unknown
  16S sequences of unknown bacteria
tggcgtagcccgtgccgccgcccaggcgcacgttcagcgtgcggcaggtgaccatgtagaggtcccgggcctcctcgtcaaccgggggcagggagtcctcgtcctcgtcgtagtccgggtagtactgcggctcggtgaaggacgggttggagggctcggagggctgctccggtgcggggatggtgatgcttccgtccggcgcaaccggttcaccgttgacggtgatgtcatcgcccgtgccgttcgtcaccgtgacgccagcggggacgtccgtgacctctttgccgtggacgacctcgagggtctccccggactgcgcggaggagattcgcttctccgcgtcctcgccgacgtagaactggctgtcggcctcgatcacgagggcgacagccagttctacgtcggcgggtttctgggaatagatgccgcccatgacgcggatcgtattgttgtcggcagaagtccccttcacgccgcccgtgaaggtgccgccggagagggttacgtcggaatacgactccacgttcacactgccgttgatggtcccggacgaaatttcgagattggctatgttcgcattggtcccattaatggccccattgacctggatgtttccgttgcagacgacgctgccggacagcttcgttgtgacacgcgcccccgaagcctcggccaccgcgtgcaccgcggtcccgccgtcggggctggtcagggttcccccgctgatctcggcggttccgtagttgtccaaggcataggcgccttgccggtccaccgtcaccgagccgcccgtcatggtaaccgttccaccgccgttgttgcggatcgcgtggagaaagcggctgtacagctccccgccatccagcttcagcgtgcacccgttggagatctgcaccatgcccatggtgttgtcgctattcttcgcctcgctccggatggcgccgtccttgaccgtcagcgaggcggaagaaccctcgatgctgaccaaagtttctgagccgacatccccccggagcgtgccgccgtccagcgtgaccgagccccccgcaattcgcagggcaggcacgtcctgcgaggtgaacacctcgccgttgccggccgtgtcctcgatggtcaatgtgccgcccgtcacatagatcgcggcccgggccgccccatcgtcgctggcggacagcgtgtggccgctgaggtcgagcgtgacgctcccagtgtcgatggtgacgtattccgtgacatcctgaagcaagcgcaccattccgccggaggtcttggctgcatcaatggcctcctgcaccttcatgtattcagtgttcccaaacttcgcgacagcgcccgcccggggcgcctggccctctccggctgggacggtctctcccccggcaaaggccgtcgggagaaaggcaaggagcagcagcaggctgagcgcaagggccgcaagcctgcgcgccggatggcgcaatttcatggacgttcacctctctggaaaatggatatgcgcggcagcccgcgccggtgcaaaatttttcatattattatcgcatatcgggagaagaaatgcaaatctgttcccatccctccggcgggcgcagaaactcgcgcggcagccccgtttttctccgcaggagggggaaaaagcgccccgcgcaggggaagcggattcccgggacgcgcgcaaatttcggaaaaaaacaatttttggaccccggcggggaatcccattcctcccggcgcagagcctcccgaagattttgggaagaaaaaatgcagggccggggaggagagccttgcggctccgctctccggccctggccgcccgtccgccggcggctcagccgatgtacgcggcggagacgtagccgacgccgccgaggtattcgatctcgtaccagccggggagcacgtcgaggatctcgacctccgtgccgcgggacagcgtgccgaggatctcgaagttcgtgcccgcgccggcgcgcacattcagcgtgcggcaggtgacgtgcagaccggtcaggtccccgccgaccctggccaggtagtccgcgctgcagtaggcggtcccgccgtcataggcgaacttcagccagccgtcctccagctcgccggagacgagcgtgccgcgagagagcgtgccgatcttggcgtagcccgtgccgccgcccaggcgcacgttcagcgtgcggcaggtgaccatgtagaggtcctgggtctcctcgggcgcttcttcctcttcctcgtcctcggcggggggcaggtagtccacgtcctcgtcgtagtccgggtagtaggtgggctcgatgaagttgttgcgcacaaaggaggccgtgatggtgtggttggcaaatacgttatcgaaggtgtagctggaaaccgcgccgacgctcgttccatccacccggacgtcctggatgttgtacccatcagccgccgtgatggcaaaggtttggctcccgccggtttggaccgaaaccgtgccggagggggagatgctgccgttcgggccggcggtggcggtgatcgtattggtggaacccgctgggacatctggatcgccctcgacaccgccaaggatttgtcccgcgccattgttgttgtcaatgacaacgtcttctccatcaacagttaccttgccattgatggtgcccgtgttggtgagccccgttcgggcctccagggagacgtcgccgttgatggtgccctcgttctgcagcttgtcctcgaccaggtcataagtgttaaatccgatggagacatctccgttcagcgttgcgccggaagaaatctggagcctcgccgtaaggccgttggtattgctgtcgccctcgatccggatgatattggcggtaacctctccgctcttgatgtagacgcccgtccacggctttgtggaatcattcgagttgaccacaatgcccgcataaattgtatcctttgtagtggtgttgtcggtgaccgtcccgccggtcatggtcagcctgacttcgctgcccacccagatgccgccgccatagccggtcccggtggccttgttgtttgtgatgctgccgccacggatgaaatgctgttccgccgcctgattgtccagagagaggcccgcgccattgccggcttcattgtcgtgaatccagccgccattcatcgtgaacgtgccgggttcggtatcgccgcgcgtgacgcgcacgccgccgccgttgcgtgcatagccgccgtggatgtttgcgccgtcgttgagggtgaggtccgcagaattggtcgcgtagaggacgctgcaatacgcagagcgacttgcgttacccgctacctcgcattcgacggtcaacgccgtcccttcgccgcttatgtagatcatgctgtaattcgaaacggtgaaagtggaagctgcggcgatctttccgccggtcagggtgatttgccttccgccgtcgatgacgagcgtttcggcaatcgtcaccgtgccttcgatgcggatgacggtgggtccgctggcgttcgcgatggcggcgagcagttcctgctctgtcttcacgatcacgtccccctccgcaaacgccgtcgggaggaaggaaaggaccagcagcaggctcaggcccagggccaggagcttgcgcgccaggggtggatgtttcatggacgctgcacctctcttttgcggtctgcgcggatgttccgcgaaacaggggattttctggctttattatcgcacagcgggaaaagaaatgcaattctgttcacaactttgaaacatccgccgggaaatccgccgggagcgccggtttttcctttccgaaacgaaaaaaacgattttgcaggcaaacgaaattgcagcgggggaaacttcccggcgcgcccgcgggcaagcttttttggcccaaacgggaaaatgcaaaccggcaaagaaatcccccgccgccaaaattctttgaaaaacgaaacaagaaaaagccgccctgggatgagaaagcgttcacaatcccatcacagagcggcaagcgccgtgcgcttacagcagcgtgcggcgcagctccgcgcccgtccgcggcgagaggtaggccggcggcacgtcgaacacgctgcgcgcgcccgtctgcccctcggcggcgagcttggccacggcgcgcgcgtaggccacgagcacgctcgcggtgaactccgggttggagtcgagcttgagcgcgaactcgatgagctgcttatgctcggcgttttcgccggtcgcgccgctacgcaggacgaagccgccgtgcggcaggcccgcgtggtcgcggtccagctcctcctgggagacgaagtgcacggtcgtgtcgtagtccgcgaagtagttgggcatctccacgatcgccttttcgaccgcggcggggtccgcgccgggcttgaggaccacgtagcactcgcgggtgtgcttttcgcgcgtggtaaggtccgggttctcgccgcggcgcacggattccacggccgcgggcacgggcacggtgtactgccgcgcgtcggccacgcccggcacgcggcggatcgcgtcgctgtgcccctgggaaacgccccggccccagaacgtgtagtcgtgcccgtccggcagcaccgcgcccgcgtagagccgcagcagcgagaacaggcccgggtcccagccgacggagagcagggagaggtgccgcgcctccttggcggcggcgtccagggcggcgaagtagtccgggatgtgggcatgggtgtcgaaggagtcgacggtgttgaagtgccgggccagggccgggccctgctcgggcaggtcggtcgccgagccgccgcacaggatcaggacgtcgatgtccttggcgtgcgccggcgcgtcagagagcggcagcaccggaacattcggggtcaggatcgaaaggctcgcggggtcgcggcgggtgaacaccgcggcaagggacatgtccggctgctggcggagcgccagctccacgccgcggccgaggttgccgtatccgcagatgccgatgcgataggtcttcatcttagcaaaacctcctaaaagaaagatgcgccagtatttgtagtatagcacagagcgggcggccccgaaaagccgcgcgaacatttaacgcaaataagcgggaaaggatgcggggaaattgtgtaaaataggagattgttagggtccgcacatgcggacagacgcagtatgcaaaacgaggaagataggagtggggttttccatgcagccaagcgaagaagtccagcgccggcgaaccttcgccatcatctcgcacccggacgcgggcaagacgacgctcaccgaaaagctcctgctctacggcggggcgatccaccaggccgggtccgtcaaggcgcgcaaggccgagcgccacgccacaagcgactggatggagatcgaaaagcagcgcggcatctcggtgacgagctccgtcatgcagtttgaatacgaaggctttcacatcaacatcctggacacgcccggccaccaggacttttccgaggacacgtaccgcacgctcgtggccgcggactgcgcggtgatgctcatcgacgcggcaaagggcgtcgaggcgcagacgatcaagctcttccacgtctgccgcatgcgctcgatcccgatctttacctttgtcaacaagatggaccgcgccgcgcgcgatccctttgagctcatggaggagatcgaaaaggtgctcggcatccacgccgtgcccgtgacctggcccatcggcaccatgggcgacttccagggcgtctaccaccgggagaccggcgaggtcgaggtcttctccggcgacagccgccacggcgcggaccaggtcaaggcgcgctttgtgccctttgaatccgaggagatcgagtcggtcctggccgagtcctaccgcgaaaagctgctggaggaccgggagctgctggacgtggcgggcgacgaattcgacctaagcaaggtccgcgcagggctgctgacgcccatgttcttcggatcggcgatgaacaacttcggcgtggagtccttcctggccaagttcctggagtactccctgccgccgcaggcgcgccaggacgaggccggccaggtcgtcgagcccacggacccgaatttctccggcttcatctttaagatccaggccaacatgaaccccgcgcaccgggaccgcatcgcgttcctgcgcatctgctccgggaagttccagaaggggatgagcgtgcgccaggccgcaaccggcaaggagatcaagctcgcccagccgcaggccttcatggccgatgcgcgcgagggcgtggaggaggcctggcccggcgacatcatcggcctgttcgaccccgggatctacgccctgggcgacacgctctacaccggcaagaaggtgcagtacgcgggcatcccggtctttgcgccggagcactttgcgcgcgtgtccacgctggactcgctcaagcgcaagcagttcctcaagggcgtgacgcagctggccaccgagggcgcggtgcagaccttccgccgggcggacggcatcggcgaggaggtcatcgtgggcgtggtcggcgttctgcagttcgaggtgctgcagtaccggctcaagaacgagtacggcgtggaggtcaacgttcagccgctgaactttacggcggtgcgctgggtcgtgcagaccccgcaggagctgacccggctgcgcctgccctccacggcgcgcatcgccaaggaccggcaggagaaggacgtgctgctctttgagagcgagtggtccatccgctgggccctggagaacaacgagggcctggagctctcggacacggccccgcgcggggaataagaggagacaagacccatgaagtttgcctttttgatcctgggcgcgtcgggcgacgcgcgcgaccgggcgcagatcgccggcggcgcggcggagatggacccggtatttgaagccgctttcggcagcgggaggaaggagcacgcatgaagatcaagagagaggacattcggaacatcgccatcattgcgcacgtcgaccacggcaagaccacgctggtcgaccagatgctcaagcagtccggcgtgttccgcgagaaccagcaggtggccgagcgcgtgatggactccggcgacatcgagcgcgagcgcggcatcacgatcctggccaagaacacgggcgtacagtacggcgacgtgcacatcaacatcatcgacacgcccggccacgcggactttggcggcgaagtggagcgcgtgctcaagatggtggacggcgtgatcctgctggtggacgcctttgaggggccgatgccgcagacgcgctttgtgctgcgcaaggcgctggagctgggccaccgcgcgatcgtgtgcatcaacaagatcgaccggcccgacgcgcggccggcggaggtcgtggacgagtgcctggacctgatgatcgacctggacgcctcggaggaccagctggactgcccgttcctgttcgcctcggcgcgcaagggcatctgctcgacgagcatggacgagccgggcacggacctcaagcccctgttcgaggcgattctgaactacgtgccctgcccggagggcgacccggacgagcccctgcagctgttggtgtccaccatcgactacaacgactatgtgggccgcatcggcatcgggcgcgtggagcgcggaacgatccgccgcggcatgatggcgatccgctcggccttcggcgcggagggggagacgcgcgcgccggagcgcatcaacacgctctacaccttccagggcctgaaccgcatcgagtgcgagagcgcgaccgtcggggagatcgtggccgtatccggcatgccggacatcaacatcggcgacacgatgtgcccgccggagcgcgtggagcccctgccctttgtcaaggtttcggagccgacggtggcggtgaccttctcggtcaacgactcgccctttgccgggcgggagggcaagtacgtgacctcccggcacctgcgcgcgcgcctgatgcgcgagctgcagacggacgtctccctgcgcgtggaggacgggagcacgacggactccttccgcgtgtgcggccgcggcgagctgcacctgaccgtgctcatcgagacgatgcgccgccagggttacgagttccaggtctccaagcccgaggtgctcttcaaggagatcgacggcgtcaagtgcgagccgattgagcggctggtggcggacgtgccggaggaatacgcgggtgcggtgatcgagaagatcggccggcgcaagggcgtgatggagaacatgtccggccgcggccgcgtgcgcctggagttcctggtgccggcgcgcgggctgttcggctaccggtcggagttcctgacggacacgcgcggcgagggaatcatgtccagcgttttcgaggactacgagccctacaagggcgatattgcgacgcgcaacttcggctcgctcgtggcctttgagacgggcgaggcgctcacctacggtctgttctacgcgcaggaccgcggcgagatgttcgtggtgccgggcgacaaggtatacgcgggcatgatcgtgggcgcgaacacgcggccgggggacatcgagctgaacgtctgcaaggcgaagcacctgacctccatccgcaacgcggcgggcgcggaggacgcgatgcgcctgcgcccggtgcgcccgatgacgctggagcgcgcgctcgacttcatcgacgacgacgagctggtcgagatcacgcccaagcacatccggatgcgcaagaagattctggacagcacggcgaggtatcgctcgaagcgctgacgcgctggtcccggaaacggacgagggtccgtttccgggaggggcccgctttccgaaagaagggagacgactttcgtcgtctcccttctttcgggccgggccccgtgggccccggacgcgcactcggcttcgcctcgcacacgtccggggcctgaaaggaagcgatttccgccgtgccaaggggggaggaacggctggagcggtgggtgcgaacaaggcggggctgggggttccggtagcaatgcggaaatcgccccgcgcccgccggcaaagccgccgggcacgatgggaagtcgggaggggagcccccctcccgacaccctcccccgagggtgaatgagggttgcgggaaaggcggggcgtgggaaggcagccggggtgtcaaggagggcttgcacctgttatcacatcactacgacttacggcagacctttcgccaattcgtaaaaataggcgcatcactatggagtgctatcataaaaactgaatacaaatatgaaaggacagatgacaacatcaaagaagaacttaatatgggaaaacagtatacaaaggagaatcaaccaagggcgctgaagctgacaaaggagagcggaaaacctgattaaccatgactttaccgctcaaaacccaagcaaaaagttcctcacagacatcgcagagatcccctgtcctgtcaggatgggagactctacctgacctggcggcagtgctggactgcttcgatggcagcatccaaggtgtccgtatggataacaacatgagagcagagctgtgtgaacaggccctggagaacgcctgccgcaacaccaatcgccagagcatgttccataaagggagattcttgacgcagtggccgaaaacttttttagctgtctaaaatgtgaacgggttcctttgcagcactacgatttcccatgcaccgcttacagcgacgtgcgtccccactccgcactcggctggctctcgccatccgcttttgaacagcatctgcgtagtgcggccgcttaacttaagatttttcacatatttctacgattccttccgtttcttcctgcttttgccgtctgcttttacgagaaggactcaacgacacagatactgttacatatttacccatatataaattttggaggccaatggacttgatttggacggcaaaattgtctgttcgaggatactatatttatatctcatctctgcctgtatcaacctacaaggatcagaggccgttacactccttccaggcaatcgctgaaacgaagacaggatgaccgaaggacagtttgggcgcagtgctggatactcgactaatggtggattgtgctgacaccccttttttgctatgctaaaggcaaatacgaaggggggagatccaatgaatttggcacagacagggcactttctcacccagcggcggaatgccctgggcttgacgcaggcccagctggcccagcgcctggatgtcacagacaaggcggtgagcaagtgggagcgcggcaagagcttgcccgacatcgcgctgctcaaccgcctggcggcggaactgcgcgtaagcgtggtggagatactcagcggcgagtccctgaacgtggggcgcagcagcaacctggacgaggcgctgtctcagggggaggacctggatcaggccggggagctgacgttgccccggacggaggcggaagacctgctggtctccccctacctgttcggctgcaacctggagcacactcgctcctgccttgccggcggcctgtccgcccagatgctgcgcaaccggaagttcgccgggaagcccaccgcctgcgagggctgcgcgctggagtggttccccatcggggaaagggcgatcttcagctttgacgagccctacacccggcacggggagggctaccatatgcagcgcacgatcgagtgcaattcgctgagcgttttcgccccttacccggaggagacggcgggcgtgggccagcacggcctctcgtttgcagccggacgggcctacctctttgcggtggtggcaaagtccgccgccggggtgacgctgtccgtctcgctcaccgacagggccggaaaaattgcctacgactgccgcaccgttgccgtcaagggcgcggactggacgcgctacgaagtggagctgtgcccggcgagcaccgacgcggacggggacctgcgcatcacctgggaaggcggcggcagcgtgtgctttggcgcgctctccctgctgcccaaggacaacttccgcggcatgcgcaaagacgtgattgagaagctgaaggagctcgggatcaaggtactgcgctggccaggcggaaacttcgccggggagttcaactggatggacggcctgctgccggtggacatgcgcgcaccgttccagtcctaccttgggctggagacgcagccgcacacgttgggctttgacttcagcgagatcaacaccgacgacttcgtcgccctgtgccgggagatcggcgcccagcccttcctcaccatcaacccatgctggaacacgccggaggaaaacgccgcctgggtggagtactgcaacggggacgcctcgacaaagtacgggaggctccggatcgagcggggatgggaagcgccctacgacgtgcagctctggtcccttggcaacgagttcggctacggccacatggagggcgacaacagccccggcggctactgccatatcgcccaggagaacggcaaaaagatgctggaggtctcgcccaacctcagcctgtgctcctccggcccctaccccagcaaggagtggtcggagctgtcggcccgccccctgtccggcatcgcccagatgatctcgcagcactattacggctacgcgcccaagtacacagacccggacaccgtggagcaggagtacggcaagtgccttgcctccgtcgggcgcatgcgcgagctgatccaccagtcccggcagtacctggcgcccaacatccgcatctctatggacgagtggaacgtgtggtacgcctggtaccgcccctccagcgtaacggacgggatctacgctgcccttgccctgcacatgctgatggaagaggcggaaaagagcggcatcgccctggcctgccatttccaggcggtcaacgaggggctgatccgcgtaacaccggacggcgcctcgctcacggcgcaggggcagatcttctcccttatgacctgccacatggggaaccgcctgtgccttgcctcgccggaagcggtgatctcggaggacaagacgggcgcgcgcgtggccaccgtggtcaacgcctcctaccaggggaaaaagcgcgtggacctctctgcctgcggccgctgcacacaggcagtgctctacacgagcaagagcgtgctgccgccctctgtgtttgaacaggaggatgtccttgcgcagatccaggatggcagcatcgagatgccgccccacagcgtgttgttcctgcgctttgcctaaaaaacaaggcgcaagggtgaccccagctttctgagcgtgaaaagaagggcagccgcgcccccgcgaaagacgggagacgcggctgccctgaaatcgatggacgatcattcgaacacgggcacggtcttgagcacgccgccttccatggcggattgatgcgcgcagatgcccacgcccgtccagtaggcgccgtcgatgtcgctggggacgggatcgcggtcctccagtatgctgcggacgaactcgtgcaccagatgggggtgggagccgccgtggccgccgccctgcaggaaggccagatgcgggttgctgtcgtcgtacaccgtctggcgggtgaagcgcccgatctccggcggcaggcggtccgcgtagtcgggcaccgcgacgcgctcctccgtcaccagcccaccccggccgtagtcgttcatgatgtgctgggagtcggcgccaagcttcatggagaagagcacgggcagctccgactccagctgctgccactcaaagctcttgcgctcgccgtagatgttgaagctctcggtgtagcccctggccacatggtagaggaagcgggccatctcgatggccacgtcgctgtcgcgcagcgtgatcagggccgattcgaaggcgaaggggcagccatagggcgcctccacctccttgcgcacacggccggagcccttgccatagacggcggccgggcgcttgcccaacagcatcaggcagggggccaccgcgtgcgtggggtgcatcagcggcgggaagcccagccagtagtcgggccagccctccatgtcctggtagtgggcgcagcgcatgaactggatccgccccagctctcccttttcgtacaggtccttcacatagaggaattcccggctgtacacggaggtctccatgaacatgtagtgcttgccgctcttcttgcgggcctcgatgacctgatacagctcgtccaggctcaggcccatgggaatggtgcaggcgcagtgcttgccggcgttcagtgccttgacggacaggggggcgtgggtggccgggggcgtcaccaggtgcaccgcgtcgatggtctcgtccgacagcatcgcatcaaagtccgtcagacgctcttccagcaggaacttgtcggcaatcttgttcagctgctcccggttggagtccaccagtaccagggagtccacatccgggtgctttaggtagatgggcacaaattccgcgccgaaggagactcccaccagcgccacgcgcagtttgccgcttttcatcgcataattccctcctattgggtggtttgcaaccagtatacctggatatgacaaaacgtccatggagggaagggggaatatatggactaagggagagtttttctaaggcggcgcctagacttgctccatcggctgccggaaacgcaaggaaaggagaaaggcagggaagcggatatggagatgcagagagtcagcgcccattggtttcaactgacgggagatccttgggtggaagtggtggacaagtggagcggcgggaacgtacaccccgaccgggtgatgaaccagtgggtgttggtgctgatgctgcgcgggcagcgcaccttccgcgtctacggggaggactacgccgtccgcgccggggatttcttcctgctgcccccccatgtgcggcactgcggcatcgagtacgacgagcacgaggcctatttcgcccactttcgcgctgaaggggtccacgcggcgctgccggaaaagctggacaccgagaggatcttgctgcccctgtgcgggcaggtgccgctggagctgccctgctttagcctgatggagtacatggtcagccatcgctcggcgccgtttttcagcgagcacttcctcacctcccaggtccaggccatactgtatcagctcagtttgacggctcagaaaaagttcctgtggtctaagccggaaaggagcttcgcctaccagatcctgcagttcatcgatggaaacaagagcaggcaactgcacaaaagggactacgcggaggccttcggccgctcctacgatgggctcaacaacctaacgcaatccgtatatggagtgacgatcaagcagatgcaggtcatcctccgcgtggagcaggccaagcgaatgctcagctcgggccgctccatcgcagagaccagcgaggcctgcggctttaacggctatttctatttcctgaaagtgttcaaaaagaagacgggcatgacgccttccgagtaccaaagttcttaggagaaaaggtgccggctatgtgtcaggcactgtggatccgcgatcaagggtacttgctatgctttctagcggccggaatagatttacgagtgcctgcgggaagaggaaaggaatgactgcagtgatggcctccggtggatcattgcctggcccaggctttaccgcggctgtaccggtggcgaccggcggatctaccgtatccattcggaacgccatctaaccgtccagcccaaacgtcgttccaataggatcgccaaggctgtccggcaggtggaaaagaagcttccttgccacattaaaaaaagaaaagcgacacgaccgagatgagccgtgaggcaggtaagcgcgtcaaataaacacgtagagacacagagggatgcggatggtaaaaattctgacgcaccagaaacatcctagcgtaagtctccataaaactctaaacgccataggacgtagctctaagctgtatcctatggcgcttttgtcaacagggccgtaatacgaacgccccttaaggggctgcaaaagcgacaaaggcaatgggcttgaacttttgcaaaaagtgaaagccagcgccttgagacgctggccggtaatcattgggcttttagcccttgtgcaaaccacccgtttgacgggtggttatgattctcaaaggtagggggctgagacacccatgaaattcacctggtaccattggtccgtgcgaggtgtcgcaatgcggggcctgcggctgaatgatcaaatgaacatggccgtgacggtgcgcacgaatgggattccaaaaccgccgccgaggaaccggccgcctctgcatattcgcgtcgatgagggcggcgagtacatttacattgataagaagcgctatctgaaggacatggtgcagcaggaggaggagctataaaatgtgtgccacgaaaatgacgattcgggaagcaacacagaaatgggtggacgagttcagccggattccgatcgggattgtggagaagctgctggaagaaaacccggacgaattgcaggagatcacacccgtcagtctgtatgaccgggtggatctgtatgatggagagcatagcggggtcggcgaaatcacgggctatgacgaggagaccggtctgtacaccgtcgagatggacgacggcgaggcaattcaggcggaacgagacgtgtttgacgtccggcgcgacgattatttgcccatgtgggggacgatgtgggcctttggggactcgtcggatgaggattggctggagaatggcggcttgcagaagatggcggactgcggattccggatctacgagcaggaggattacgggtacttctccggcatcgacggggcgggatatgatttttatgacgagcactggtgccccctgtacaaggcgcgtggactgcggtggcacgatgaagaagggaaggcgcaagcgtgacgaggaaggaaatccagcaggccccgacggtcgcggtgtggagctgcgggctggcgggattggagattaagggcatgggatacggaatggaagattctgtactctgcgtctggacgggcgacgacagcgcccatcgatgcaaggtgcgaagcgggcgaagaggcccgtattttttgtttcgcgggcggagggtttacctggacgagtgttggagggcgtaacccaagatgacagaactgatgaggcggctggtggatgcggggtatccgagagaggaaatggatcatcactacactgacctgtatgtgtacgtcaacgaaatctcgcggcctgtaatcgaacagtggtgcgcggagcatgggtggcggaaaatagagatcgtcaaacagaagctggaagacatcgtggagggcggcgaccggagaattgccgttgagtgaggggagtgggacgaatgaggaatacagtgtatgaccagatcgaaagcaataacaggctgcgagatgcgtttgcagcgaggcgagggagcgcggtcggggccaggtggcgggggtatgttggccagcctttccggatcatcgctcgtgtgcggccggcagagccgtgcccgatgtgggtcatcgagtttgcaaatgggttccgcatggcggcttatgcggaagagatttttgaggaggcgtgagtatgggatacaggacggagtttcactttcagtgcgattgcagcgatgagaagcgcatggagcagatcgtgcagaagatgcgggagctgcaaatcgtcccgtatgtgttttcggaggacttggagaactacgatccctgcacctggtacacggaagaaaaggacatgcgggtgctgtcacgcgactttccggatgtacactttatcatcagcgcattcggggagatcaacgacgacatctgggaagcgcactacctgggcggcaagcgccagctctgcgaggcagagattcggattccggaatttgatccggaaaaactggcctgagcgccacacaagcgcccgtactatgctataatagggaggagaacaaatgaaacttcaagaactggcgaattggaatgttgcaggccggggcgggtatcgaaaccgtcccgtttttcttaccccgaacgggacgaaggtggtgcggctggggaatgggtactacccggtgacgcgtcgggacaaggtgcggacggatcgaagattcctgggccgggaagacgactgcgaaatttggagctcgcggtatggcacggtgcgccgggtacggattggaggttgaaggtatgtggtttgtggttgcgctgattgggctggcgtattacgggattcgcatcttcatcgagcagtggaagatgctggagagttcgacggcggatttctacaagacgaaggcgcggttcgatgcgtatacggagaagtgtagaagggagcgtcaagggaaatgaacaatgctagacggcgggagattgaaaggctgcgggctcggatagaggagctgaaggaggaactgacgaacattgccgaggaggtacaggcggtgctggacgacgaagaggatgcgctgaacaacacgccggattccttgcagggcacggagaggtatgaaatctccgaggcggcggtggagagtttgacggacgcgagagacgctctggacgacgcgataaattcgcttgatgagattaactaaacaccttccatatccgaattgaggatatggttttctgttagaattggagaaaatggcatgaaaaagaattgtgctgagatcagatttgagaaatatatggttgatttgcggtggatcgttaagattgtgtatgcaaacgatggccgtcatgcacttgtcgatacgagtccgtccgtggtatcctataggcaggaagggtctgccggaaaggaggctgtatgattacaaacccggcagagtataaggttggcctatatatccgattgtcagacgaggacgacggcatcgagacacagtcggaaagcgtggtgaaccagcaaaagatcctcaacgagtttgcccgcagggaacgcctaagagtggtagatacatacatcgacgacggatggacaggcacgaatttcgaccggccgagtttccagaggctggttcgcgacattgaggcgggacggattaatatggtcgtcaccaaggacttatcccgcctgggccgcgactatattaccactgggcattacctggagcgctatttcccagagcatcgtgtgcgctacatagcgatcgacaacgggattgataccggcgacacatccgctgcaaacgacatgatccccttcctgtcggtcatgaacgatatgtatgccaaggacatttcgcgcaaggtgcgcagcgtcctggcaaccaagcggcgcaatggagaatacgtagggagcgctccgccatatgggtataaacgcgacccgcaagatcgtggacacctcgtcatcgatgaggaggccgcgcaaacagtgcggtacatctttgacatggccgtggcagggtatggattgacgcgcatcacacgtgagcttaacgcacgtggtattccttcaccagctgtgtattctcacaaaaaagattcgtgtttgtgggatcgcacgtatgtgaggcggctgctgaaaaatgtcgtgtatacaggcgtattggcgcaggggcagacaaccaaagtgaactataagtcaaagatgagcgtgaatgtgccgccggagaaatggacggtaaccgtaaacgcgcaccagcccatagtatcgcaagaaacctttgatgccgcaaaacggagcctggaaagcagggtccaaacgcgtgacagaacgtatgactacttgctaaaaggcatgctgttctgtcatgaatgcgggcataaaatcagcgtagaaagacgaaataataagttgcatacaatgtgcagttattaccgatacgcctcacctccgcttagatataaaatatgctcgaggcacaatatgctgctcgacgacgtaaccaaagcggtggtaaaaacggtgcggaaaatttgtgaaaaatatctggatccaaggcgtctggaggaaatcgcgagaaaggcgatcgaggaggccggcgaacgttctgtattggcggagaatacctccaatctcaagataaaactggacgccatgacgaagcgcattgacaaaatctatgccgaccggctggatggactcctggcagaagatgacttcgatcgtctgtacaaaaagctgtgtgatgagcgtcagcgtctgcgggaccagctgcgggaggcgcagtccagatcagaacatgagggccaggatgccgctatggctcgggagttggcacaaaggtttatagacgaggcgcccagcagagagatgctgttggctctgatcgaccgaattgagttaactgatgacaaacaaatcatttataaatttagattttctgatatgaaagactaaacgatgtagttatgagtgtgagagagggggggggccggccccctccttgacaatcctccccagccaaagcggagagattcgcctgacggcgaatctttggatacgcggcgtcgcgaagcgccgccagcgaaaggggcggggggcggaaggctgggcgggcatagagagaagaatggcgggaggcggaacgggtacggcggagcggggagattcgccttgcggcgaatcttttggatacgcggcgacgcttcgcgccgccaacgaaaaatggcggggagcgggaggaatggcgggtatggggaagggatggcgggaggcagaacgggtacggttcaagcggggaaggttcttgcaggagcggcggggttgtggtatactaaattttccactgcaaaaagtccacagacgacgggaaacggagggaaggccatggaattccggcgcatcttcgacacgatccccgaccagtttgaccggtggcggccgcgctactgtgcgcaggcatttgcggacattgcgcaggaagcgcatctggggcccggggcggcggctctggagatcgggccgggcacgggacaggcgaccgagcccatcctgcgcacggggtgcgattatctcggcgtggagctgggggagcatctggcggcgcgcatgcgggagaaatttgcaggctatcccaacttttccctggtatgcggggacttcctcgagcaggacctgggggaggagcggttcgacctggtgctctcggcggcgacgattcaatggatggacgagaaagacgcgtttccgcgctgctatgcgctgctgaagcccggcggggtactggccatgctgcgcctgacgccggactaccggacgcccaaccctgcgctctacgaccggattcaggaggtatacgcggcgcactttcacccccgggaggcgtacacgcggcgcttcgtctacgagaatgcggcgcagtacggctttgtgggggtggagacgcgggagtacgtgcacagccgcgtgctggacgcggaagggtgcgtcgcatacctgggcacgcactgcgaccacatcaccctggaggagccggaccgcacggccttcttcgagggcatccggcgcgcggtgcgcgaggcgggggaccgcatcgagtatcgggaccgcgtccggctgacattggcgcgcagaccgcgctgaggcaggggcggcggaagaaggaaattccaaacagaccgcggcgcacccggggaagggggaagggcggcgcagcggcccatcgccccgcgcgggggaaaacagaccgcgagcgcggtcggtttttcctcgcgcaagttttgccttccgaccggtttctaccggggcggatcggggtatacaatatcagggaatccacagggattgtggatgaattcttcttgacatacaatatatggtgtattataatagcccttgcatgaaaggacgggagacgcaatgattgacaccatcgtgaaacgggacgggcgggaaatgccctttgagagcgacaagatcgcgcaggcggtccgcaaggcctttgaggccaccggccagaacaaggacgaaaagacctgcgcgaagatcgcgcagcaggtggtgcacgaggccgaggagaagcagtacgtcaagcccacggtcgagcagatccaggacctggtcgagggcgtgctgatcgaggaaggctacgtccgcacggcaaaggcctacatcctctaccgggcggagcgcacccgcgcgcgcgatatgcagacgcgcctgatgaagatctacgaggacatcacctacaagccggccaaggactccgacatcaagcgcgagaacgcgaacatcaacggcgacacggccatgggcatgatgctgcgctacggctccgagggcgctaagcagttcaacgacatgtacgtcctcaagcccgagcacgcgcaggcccaccgcgagggcgacatccacatccacgacatggacttcctgacgctgacgacgacctgctgccagatcgacctgctcaagctcttccagggcgggttctgcacgggccacggcacgctgcgcgagccgaacgacatctccagctattcggcgctggcgtgcatcgcggtgcagagcaaccagaacgaccagcacggcggacagtccatcgtcaacttcgactacggcctggccccgggcgtcaagaagaccttccgcaagcgctaccgcgacaacgtcatccgcggcctggagctgatggagggcgacggcaaggactacgaggccatggagcgcgagaccatggacgccctggccaaggagggcctgcacccggagctcggcggcagcgacgactacctccgccgggagaaggagctgctgacggccaagggcctggacgcggacctcgtcgacaaggtgcagaagtttgcctgcacccacgccgagaaggagacggaccgcgccacctaccaggccatggaggcgctgatccacaacctgaacaccatgcactcccgcgcgggcgcgcagatccccttctcgtccatcaactacggcatggacacctcgcccgagggccgcatggtcatgcgcaacgtgctcctggccacggaggcgggcctgggcaacggcgagacgcccatcttcccgatccagatcttccgcgtcaaggagggcatcaactacaaccccggcgagccgaactacgacctgtttaagctcgcctgccgggtcagcgccaagcgcctgttcccgaacttctccttccaggacgcgccgttcaacctcaagtactacgatccggcgcgcccggagacgcagatcgcctacatgggctgccgcacgcgcgtcatcggcaacgtctacgaccccacccgcgagatctgtaacggccgcggcaacctgagctttacctccatcaacctgccgcgcctggccatcaaggccaagggcgacatcgaggtcttcttcgaggacctggaccgcaagatggacctggtcatcgaccagctcaacgagcgctttgagatcatggccaacaagaccatgcgcaacttccccttcctgatgggcgagggcgtgtggatcgactccgagaagctgggcgtggacgagccgctgcgcgaggtcctcaagcacggcaccatgagcgtgggcttcatcggcctggcggagtgcctggtcgccctcatcggcgagcaccacggccagagcgagcgcgcccagaaccttggcctggacatcatcggccacatgcgcgcgcgcctggaccaggagagccagaagacccacctcaactacaccctgctggccacgcccgccgagggcctgtccggacgctttgtcaagatggaccgcgcgcgctacggcacgattcccggcgtgaccgaccgcgaatactacacgaacagcttccacatcccggtgtacttcccgatctccgcctttaagaagatccggctcgaggcgccctaccacgagctgaccaacgccggccacatcacctacgtggagctggacggcgacccgaccaagaacctggacgcctttgagaaggtcattcgctgcatgcacgacgcgggcatcggctacggctcggtcaaccacccggtcgaccgcgacccgctctgcggctacaacggcatcatcgacgacgtctgccccaagtgcggccgcaaggaagaggaggggcgcccctttgagcgcatccgccgcatcaccggctacctcgtcggcacgctcgaccagttcaacaacgccaagcgcgccgaggagcgcgaccgcgtcaagcacagcgtcgtggaggagtaagaaagatgaagttccgactcgcaaacgtggtcaacgactccatcgtcgacgggccgggcttccggctgacggtgttcgtgcaggggtgcccgcaccactgccccggctgccacaacccccagacccacgaccccgccggcggccgcgacgccgacacggactgggtgctggagaaggcggcggagaacccgctgctgagcggcatcacgctctcgggcggggagcccttcgcccagtgcgagcccatggcggccctggcccgcggcgccaaggagatgggcctgcacgtcatggcctactccggctatacgtttgagcagctcctcgacatgcccgaggcgcggcccctgctcgagagcgtggacgtgctggtggacggccccttcctcaaggacaagcgctccctggcgctgaacttccgcggctcctcgaaccagagaatcctggacgttcccgcttccttgcagaagggcgagccggtcgtgctcgactgggacgtgaacccagcataaacggccaggaaaacggccccgcaaaggatttgcctttgcggggccgttttggacttgcgcgcggcagccccctgcgcgtataatagagggaaaatagaaatagggagtgtgcgcaaaatgaaggcattgtttatcggcggaacggggctcatctccacggcggtgtccaagctggccatcgagcggggctgggacctgacgctctttaatcgcggccagcacatccacggcatccccgaaggggcgaacatcgtcaccgtggacatcaacgacgacgaggccgtgcgccgcgccatggagggaaagcactacgacgtcatcgcccaatggatcgcgttcaagcccgagcgcgtgcagcgggacatcgacctgtttctgggcaagtgcgatcagtacatcctgatctcctcggccgccgcctatgagcggcccatgcgcacctggcgcatcacggagtcgctctcgctcaacaaccgctactggcagtacggccgggacaagcgcgcctgcgaggcgacggcccttgccgcctaccgcgaaaaggaattccccgtcaccatcgtgcggccgtcgctgacctatggcgacacgcagatcccctttgccatgggcagctggagcaagccctggtcgctcgtgcagcgcatgctcgacggcaaggagatcgtcgtccacggcgacggaaccagcctgtggaccatgacccacaacacggacttcgccaagggctttgtcggcctgatgggccgccgccaggccatcggcgaggcctaccacatcacctccgacgaggtgctcacctgggacgagatcgccatcgccatcggcgcggccgtgggcgtcgtgcccaagatggtgcactgcaccgcccagcagatcgcgcgcttcatgccggaggaggagggcgacctgctcggcgacaagtccacctgcgcggtgtttgacaacagcaagatcaaggcgctggtgccggacttcgtctgcacggtgcccttccggcagggcgtgcagcgctcggtggactacttcctggcgcacccggacctgcaggtcgtcgacgaggactggaaccggaagatcgacgccatcatcgccgcggaccgcgccttccacccgtaagggcggagaaaggaggacgccatgctgcgcctgaagcaggcgaactttgcggacgccgcgcaggagtacgcctttgtgcagaccattccccgctgcgagaacggctttacaaatgactggctcggctggtcctacgcggaattcgtggaaaaggccctgccccagatgcagcgctgggcgcgcggggaggacctgcccgcgggctttgtgccggagagcttctacttcctctgggacgaggagcagatcgtgggccactgccgcatccggcaccggctcacgcccgcgctcgccgagggcgccggccacttcggctacttcatcggtagcgcctttcgcggccggggctacgccacggaggccctgcgcctgctgctggacatcgcccgggacctcgtgccggaggaggagttcttcctccgcgtcaacaaggacaacccggcctccctgcgcgtcatgctccgcaacggggcctacatccaccacgaggacgacgcgcgcttctacgtgcgaatccccaagaacaagtaaaaaaaacagggtgcggacctcatcggggtccgcactctccgtctgccgaaaaacccttccgccgccttcgcggaggccccttcctctgagccccgcagcggcggcgtgcatgccgccgaagggagcgcgccgaatgtctctcggaacgatgcaatttacagggttcccaagcgcgtcgacgttgccggcacgcacagagtgcggaccccatcggggtccgcactctccgtctgccgaaaaacccttccgccgccttcgcggaggccccttcctctgagccccgcagcggcggcgtgcatgccgccgaagggagcgcgccgaatgtctctcggaacgatgcaatttacagggttcccaagcgcgtcgacgttgccggcacgcacagagggcggaccccatcggggtccgccctctgtttgcattcggaaagcgggatcacttgcggaacatgccgcggtcgtccttccacttggcgaagtggacgatgttgccgtccgggtcgcggaagaagaaggtgcagtagccgtccgcgcggtaattcgggccggaggtgacggtcacgcccaggtccagcatctccttgacggccgcgtcaaagtcctccgggaccagcgcgatgtgcttccagccgatggccggctccgcggcgtcgatgtcgtggccctgcatggggaccatgatctcgatgaggacgtggtccggcgactcgacgaagtagttgccgccgttgcccacggagtgcagcgtaaagcccaggtgctcgatgtaccaatccgccatggccttggggtccttggcgcagatgcccacgtggtcaaagccgagaatcttcatgatttgttttccccctttgtccgccgcttgggcggttttttgccttttttgttctttttgccggtcctgccgtccgcgtcccgggggacgggcttggcctcttcagtatacccggattccttttcgtcgtcaacggcgaaatccacccgccgcgtggacatgtccaccgccgtcaccacaacgcggatggggtcgcccaggcggtagatcttcttcttccgctcgcccaggagcatgtaggacttctcgacaaaggtgtagtagtcgtcgtccaggttggagatgtggatgagcccctcgacggtgttgggcagctccacgaacaggccgaacgacgtcaccgaggagatcacgccctcgcacgcctcgccgacgtggtccagcatgtactgcgccttcttcaggtcgtccacgtcgcgctcggcctccatggcctggcgctccttttcagagcagtgctgcgcgtactcctccgcgcgcttgcgcaggcgcgccgtgctcttgcccgcgaagtagaggtgcagcgcgcggtgcacgaacaggtcggggtagcggcggatcggggaggtgaagtggcagtagtccggcgcggccaggccgaaatgccccagcggctgcgggcagtagcgcgccttttgcagcgagcgcagcatcagccgggagacgagcccttcctcgggcttgcccttggccttgtccagcacggcctgcagggccttggggtgcaccttgccctttgccgagccgcggatgcggtagcccaggttgacgaggaaggcgtcgaaggtctggatcttctcggggtccgggtcctcgtgcacgcggtagaggatggggatctcgtgcaggcgggcgaactccgccacgcactcgttggccttgagcatgaattcctcgatcatgcggttggcgatgccgcgctcctcgcgctcgatggaggtgggcacgccgcgctcgtccagcgtgatgaccgcctcgtcaatgtccaggtccagcgcgccgcgctccatgcgggcctcggtcagcacctgggcgagcctctccatgcggcgcaggtcgcgcgcgacctccggcgcaaagccggcctcctcgcccgtctccagcaggcgcgtcacgtcctcgtagacgaggcgcgcgtgcgagtggatgaccgaggggtagatgtcgtaggagaggacgcgccccgcggggtcgatgtccatcgtgcaggtgaaggtcaggcggtccacgtccgggttcagcgagcacaggccgttggagagcgcctcgggcagcatgggcagcacgcggtccagcaggtacaccgaggtcgcgcgcttgaacgcctcgcggtccaagggcgagccgtcggtcacgtagtggctcacgtccgcgatgtgcacgcccagccgccagccggaggggatgtcctcgatggagaccgcgtcgtcaaagtccttggcggtccggccgtcgatggtgaaggtgttcagccggcgcaggtcgcgccggccggccaggtcctcctcctgcacggcgtccggcaggagcgccgccgcgccgaggacgttctgggggaactcctcgtccaggcggtgctggcggatgagggacttgatgtccgtgccgatgtcgtccttgttgccgaggttttcgatcacgcggccgcgcgggttgcgcccgcggctcggccactgcgtgatgcggacgacgaccttgtcgtccggccgggcgccggcgcggtccgaccgggagacgtagacgtccatggagatgcgcttttcgtccggcacgacgtaggtcgcgtccccatcctgctcaaacgtgcccacgacgacgtcgttggcgtgggtgaggacgcgcgcgatctcgccctcccgccgctcggcgttggtcatgcgcgcaaagaccgtgtccccgtgcagcgcgccgcccatgcggtcgggcgggatgaagaggtcctcctcgccgctctcgggcacgacaaagccgaacccgcgcgcgttgccctgcagccggccgcggatcatgcccagggcttccgggcgggcatagcgctccttgcgggtcttgaccaggcgcccttcctcgaccatggcctccaggaccggcaggacctcgtcctgcggaacctgcagggcctgggcgatcggctctgcgcgctgcggtccctgctccagcagggactcgatctgctccttccattgggtccatccctgtgtttccatctttcgcattctccattcctagtttcgccctcagtataccacaggcggcgcgggaaagatacaatccccgtgtaaaacaaaagagagccaagggagaaagattctccccccgctctctttgcgatcggtccaaagaggtttaggcaaagcgctgcaggatgagcagcacaaccgccagaaccatgaagcccgcgccaaggatcttggtgtaaagctccatctttccctcgtaactggaagcctttttcttgccgaagaaggtctccgctccgccggcgatggcgccggaaagccccgcggtcttgccctgctgcatgagcaccagcacgatcagagccagacagtcaagccccaggatgacgctgaggatgattctcacaacttccatcttcgtaataccctcccaaatgcttcaggcagcggcaaagcccaacccctgcacaagatgctaaaagactatagcacatttgcggcgggtttgcaagcctttttttccgggttttgcgttttttcgcccggcggcgcgcattctttgccgttccttaaccggcgggcgcgaagcagagaaaacgccccgcgcaaagcggcgaagctgcgcggggcgaaaagagcaaaagggaggctttaagcccaccacatggcgcccttgtcctcgtacatcaggacctccttgaggaaggcgatggccttctgcaggccctcgttgggggtcatgaggctgtcctcgtgctcgatggagatggcgtcgtcgtagccgaccatgcgcagcgcgctcatcatgtccttccaaacctggtagtcgtggccgtagcccacggagcggaagatccaggagcggtggatttcgtcgccgtagtgcttggtgtccagcacgccgtgggtcttggtgttgatctcgtcgatcttggtgtccttggcgtggaagaagtagatggccttgcccaggtagcggatggcatagaccgggtcgatgccctgccagaacaggtgcgaggggtcgaagttcgcgccgatgaggtcggagccgaccaggttgcgcagcttcatgagcgtctccgggttgtagacgcagaagcccgggtgcatctcaaaggcgatcttcttgatgccgtgctccgcggcaaaggcggtcatcttcttccaataggggacgagcacctcgttccactggtattcgacgatgtgggagaagtcgtccggccaggggcaggtgacccagttgggggtcttgtcctccggggagccgcccgggcagccggagaaggtgatcacgcggtcaatgccgagcttctccgcgaggagaacggtgttgacaaagtcgtcgtggaacaccttggcgaccgccgggtccgggtgcaccgcgttgccgtgcgtggacagcgccgcgatctccaggccgtgcttctcgatggtgttcttgaactcggcgatcttcttgtcgtccttgaggagctcctccgggttgcagtgcgccttgccggggaagccgccgctgccgatctccaccgcctgcacgccggagtccgcgaggtacttgcaggcctcgtccaggctcttgtcggcaagaaggaccgcaaaaacagaaagtttcatcggatcattccctccatttccatctggcggagcactccgccacattttcctatattatacaatccttttcgccaaaacgcaaggaggccctttgcgcccggggggcggtccccccggacggtttttttcgaccttttcccgcgccggctttgccgcgggtgagattttatggtatactgatcttcgcaagtaccgcaataaggaggtcagcacatggatgttgcggcttttttagaggaagtttgcgccatccccggccactcgggcatggagggcgcagccgctgcgcgcatcgcgcaggagttctctaagtacacaaaggatgtgtttgtcgacaagctcggcagcgtgcacggcgtcatgggcagccgcggcccgcgcgtgctcgtctgcgcgcacatggacgaggtgggcctgatcgccgggagcgtggcggacaacggcttcatccgcctgtggcagctgggcggcgtggacccccgcaccctgccgggatgcgaggtcacggtctggggcaaaaagcccctctacggcgtcatcggcgcgctgcccccgcacctgagccagggcccgctcaaggccgcggacacgacggagctcgccgtggacgtgggcctgcccaaggaagaggtagaagccctcgtgcgcacgggcgaccccgtctacttcaaggtccccatgacgcgtctgctcaacgaccgcgtcgcctacaagacgtttgacgaccgcgcgtgcgtgacgtcgatgatcctggccatggaggagctgcaaaactacgacctgccctgcacggtcgagttctgcgccaccgtccaggaggaggtcggctccttcggcgccatgaccgcggcttacgccagcgcgccggacatggccgtggcctttgacgtctgccacgccacgaccccgggcacggacccctgggagaccatgcccatggagaaggtgggccttggcatgggcccgaccatccacccggcgatgctgcgccggatgcaggaaacggcgcaggcgctgcgcgtcgacacccagatcgaccccagctccggacggacctacacggacgcggacagcatcttctgcgcgcgcgcaggcatccccacggcgctgctgtcgctgccgctttcctacatgcacacgatggtcgagaccatcagcctgaagtcctgccgcgaggccgggcggctgctggccggcttcctcaagggcgtggacgagagatgggaggattggctatgcttctaaaggaacttacccgcctgcgcggcgtctccggcgacgagggcgaggtgcgcggcttcgtcatcgaccaggccgcgccctactgcgacgagatcgcggtcgacaccatgggcagcgtcgtggcctggaagcgctgcaagaaggagggcgcgcccacggtcatgatcgccgcgcacatggacgaggtcggcttcatggtccagtacgtccgcgacgacggcctcatccgctacatgaccgtcggcggcatcgacccggccgtctgcgtgggcaagcgcgtgctcgtgggcaaaacgcgcgtgcccggcgtcatcggctgcaaggctgtgcacctgcaggagcgggacgagcgcacccgcgccctcaagcacagccagctctacatcgacatcggcgcgcgcgaccgcgacgacgcgctcaaggccgtctccatcggcgactacgcggtctttgactcggagtatgtggagtttggccgcgggtttgtcaagtcccgcgcgctggacgaccgcgtcggctgcgcggtgatgctggagctgctcaagcacgactacccctgcaacgtggcctttgccttcaacgtccaggaggaggtcggcctgcgcggggccatggccacggccttccgcgtgcagccggattgcgccatcatcctggagggcaccaccgccaacgacaccatcggcgcgcgcgtgcacgaggagatctgctccgccggcaagggcccggccctgagctttatggaccgcgcctccatcgcgcacccgggcctctttgcccgcatgcgcgccctggcccaggagcagaacatcccctggcagctcaagcgcggcacgaccggcggcaacgacgccggcagcatccagcgctcccagggcggggtcgcgacggtcgtcgtctccgtgccctgccgctacattcacggcccgtcctcggtctgcgcgctctccgacgtggaaaaccagtaccgctgggtcaaggcctttctcgatgaaggaggtacattctgatgctcaaggatacactgcttaagctccttacgattcccggcccctcgggctttgagggcgcctgcgcggactacatcgagtccgaaatgcgcccctgcgccgacgagatccgccgcgacgtgatgggcaacctcgtctgcgtcaagaagggcgcgcccggcggcaagcgcatcctgctcaccgcgcacatggacgagattggcttcatcgtcaccgccatcgacgaggacggcttcctgcgcgtggccacggtcggcggcgtcaaccccaagatcacccaggccagccacgtggtgctcgcctccggcgcgcagggcgtgctctttgccgaggcgggcagcgacccgatctccctgttcatcgacgtgggcgcttcctcgcgcgaggaggccgggaagaaggcgcagatcggcgactgggccgtcgtgcgcggcgtcgtcagcgacatgggcgaccgcctggccgcgccctacatggacgaccgctgcggctgcgcggtcctgatggagacgatgcgccgcctgggcaagacggacaacgagatcgtcgcggtcttcaccacccaggaggag

SEQ ID NO: 695 - DNA, 32759 bp, Unknown
  16S sequences of unknown bacteria
ctccatctgctgtatgccagattctttacgaaggttctccacgatatcggacttctggaagcggaagagccttttgaaaatctgctgacccagggcatggtgctcaaagacggtgcgaagatgtcgaagtctgtaggaaacatcgtcagcccggcgcagatcatcgaaaagtacggctgcgatacagcgagactgttcattctcttcgccgctccgccggaacgagatctggactggtcggataccggtgtagagggaagctataagttcctcaacagagtatggaggctcgtcttggaatgcatcgaaaagatgccggaaagagccgaagtcaggattgagtcgaaggacgacaagagcctttactatgagctcaataagacggtcaagagagtgacggacagctttgctccgggccgtttcagtttcaacactgcgatcagtgcgatcatggaactggtaaacgaaatgtaccgctgcaaacaggcggaagcgccgaatcacgctctgctcagagaatcggcggaaaagctcgtcctgctcctgtctccttttgttccccatatctgtgaagaaatgtgggaaaaactgggacacagtagcgcggtctatttcgagtcctggccttcttacgacgaagacgctctgaaactggatacggtggaaatcgtcgttcagatcaacggcaaagtaaaaatgaaggcagatgtggacagcagtctgtcgagagaagctctaacggatcagatgctggaggatgaaagcgtcaaggcgctcatcgaaggtaaaaatgtggttaaagtcatcgccgtgccgggcaaactggtcaatatcgtagtgaagtgagagcgctgcatcccggcggatccgccgtgtcgaaaaacacggaccgatatgggattgcagagagtgagccgcgcagcgattcccgctccctgcgggaatcgctgcgcagtccgggagaccggctggcggcgtccgagcggaccgttgcggcgccggccggtgaaaaaaggcgcagaacaggaaaatccgcgcctgttatcagaagagacgcgtggtgccgtcgccggcggaaagggacggcatcgcgcggtaagttcaaatcggggcaaagctctgacaaggcagcttgatcagagtttgcggacgatttcagcacagcgccgaaggatatctgctcttcgggagttttgcgggagattatgattcccgccggatcccgggaacagaatccgacgtctgcggaggcggaagcgccggcgctgtgttacaacgtgtaaaggaaggtaaatttgagaaacagaaatacgagaagaggcggaaaaaacagaggaaacgaaccgtctgtaaagatcattccgctgggaggactgaatgaggtcggaaaaaacattacagttctcgaatacggtgacgaaatgctgctgatcgattgcggcatgacatttcctggcgacgatatgtacggcatagatatcgtcattccggatatgtcttatctcgtcagtaacaaggacaaaatccgggggctgatcgtgactcacggacacgaggatcacatcggagcgatcccttatctgctgaagcgcatcagcggagttccgatttacggtacgccgctgactttgggactgattggaaataaactgaaagaacacggactcacggctaagacaaaggcgattaaatccggagatcatctgatgctgggatctttccgggtggaggtccttcggatgactcattccgtggcggacgcggtggctttcgccattacgacgccggccggcgtcattctccatacgggagacttcaaaatagactacacccctcttcagggggaacctatcgatcttcagagatttgcggagatcggaagaaacggagttctgctgctgatggcagacagcaccaatgctcagagaaggggatatacgccttccgagcagacggtagcggcgacgctggagggaatcttcgctccggcaaaaaacagaatcatagttgcgacgttcgcttcaaacgtcgacagaatacagcagatcatcgatctcgcggtgaaatacaagagaaaagtagcgatctccggccgaagcatggtcaatatcgtagaaatcgcatcacagctgggatatttgcgtatcccggataatacactggtagatatcaaccgaattaaaaatttaaaagatgagcagattgtcatcgttaccacgggaagtcagggagagccgatgtcagctcttacgagaatggcgtccaatgatcataaatccgttcagatcagaaaagatgacatcatcgtcctttcctccagtccgattcccggaaatgaaaagacgatttccaatgtggtaaataagcttctgcagaagggagcgcaggtcatctattcggatatcgcggacattcacgtttccgggcacccttgtcaggaagaactgaagctgatgcattctctgattcggccgaagtattttatgccgattcacggggaataccgccatctggacgctcatgcgaagctggctcagagtatgggtacgccgaaggagaacatttttatcctgagaaacggaaacgtacttacggtatcgaagagcagagcggacgtagcgaaggaagaagtcaccagcggccaggttctcgtcgacggtctgggcgtcggcgatgtgggaaatatcgttctcagagacagaaagcttctgtcggaaagcggcctgatcgtcgtcgtagcggcgatcgaaaaaggttccggactcctggtgtcgggaccggaaattatttcgaggggtttcgtttatgtgagagaatcggaagaactgatcacttccgccagagaagtggttacagaagtgctggaaagttgtcaggacaggggcctgaaggagtggtccgcgatgaaaaacgccgtgcgggatgaactgaggacgtttatctacgaacagaccaagagaagtccgatcatcctgccgattttcctggaagtctgagacgtctgtatttagaaagaggcaaatctttatgaacagtcagaaacactggaccttatcccggcgaatcgataaagtcagaaaagagatggcgaagcgtaatatcgacgcgatgctgatttcgaagacagaaaataagaattatctgtcgatgttttattccagttccttcgatattctcatcacagaagaccggaattatctgctgacggactttcgctatatcgaagcggcttctgagctgaagccgctgtatgacgtggttcaggtgacgccggagtatacgctctatgattttatcgccgaggaagaacctctgtgtctggggctggagttttcgtctgtcacgatgaatgtctgcaaaaggctggaagagtgtctcgaggaatgcgagagcacctttgaggacgccgacggaatcgtggaaaaaggacgcatggtaaaagatgaagaggaactggataagatacggcaagcggcccgcatcgctgacgaggctttttcctatatcctcggagagattcgtccgggagtcagtgaaaaggagatcgcctggcttttggagcgcaggatgagagattcaggcgcttcggggttgtctttcgacaccatctgcgcttcaggagtccgttcttccatgcctcacgcgcatcctaccgaggagctgatccaaaacggcgattttgtcaccatggatttcggctgtgtctatgagggctactgttcggatatgacccggactgtagcggtgggccgggtgtccgacgagcagagagcggtgtacgacgtggttctgaaagcgcagcgtgcggcctgcgaagcgatccggccgggagtgacaggccagcaggcggatgccgcggccagagatatcatcgcggcggcgggatacggacgttatttcggccatgcgctggggcacggcgtaggtctggaaattcacgaagcgccgacagccaatccccgcagtattgaagtactggacaaaaatatgctgattaccatcgaaccggggatctatctgccgaaaaagtttggagttcgcatagaagacttgtccatagtgggggattctgctataatcaacttagtgacgtcagaaaaagaactgattattctttgataaatattggaggtttttatggtatacgcaagcgatttcagaaaaggtatcacgtttgaaatgaacggcgaaccccatgtagtactcgatttccagcatgttaagccgggcaagggcgccgctttcgtaagaacgaaatacagaaatatactcacaggcgctacgagagaagaagcgttcaatccgaacgataaatttcctaaggcgaacatcgaaacgaagacgatgcagtatctgtacgacgacggcgagctctattatttcatggatgaggagacttttgaccaggtgccgcttccttatgaactggtggaagatgcgatcaagtatctgagagaaaacgatgaagctacgatcaagttctacaaaggcaacgcgtttatcgtagaggctccgaatttcgtaaacctgaaggttgtggagacggaaccgggcgttaagggcgataccgctacaaatgtgacaaaagcggctaccgtagagactggcgctgtgattcaggtccctatttttatcgaagaaggcgagctgattcagatcgatacgagatccggcgaatacctcggaagagcgaaggaagagaaataagattttattgagacctttcaatgcaaaaaggagatggaaagtcaggaagatgactttcggtctcctttttttgtatctttatatcatatcgctatttctttcccaccagcagacaggcgtccactgtgatctccgcgatcgtcagtttttttcgttcttctctgtccacatgaaagagcagaggcgtcatatcgaaaagaaagccgagttgttccggccgcagagacatcgtttttttcagcggaatctgctcgatgagacggaaatgtttttcgaaatgacggatgacctgctgattggagtattctttgtttataatctgctggcggacagcctgccggagctcccgcagatgatcttcgccgggaatcactttgaggatccggccttcgccggtgaggattctctgaaattctccgtaatttgcgggggtgaaaatattcagtatacagtcgatactgtcgtctttcaatggaatccgggaaagatcggagaccagccagcagacgtcgtttcctccccgtgaggcgcatttgacggcatctttggataagtccagggcgatgacggcgcggtctgcgagaggagactccgttttttgcaggagttcggacggactatcttctgccctctctgaagaccggccggccggattcctgcccgccgtttctgcacggctgtcccgcatctcggctgcgatgcttttcgcgtaatagccctcgccgcatcccacatcgaggatccggcgcaaaagaggatgagaacgcagataactcaggattccgtccagcacgtggcgatagagtccctgttccataacctccctgcggttttcgaagaagttcgaatcatatcccttcagcgatttctgagcgagggtcagatttacatagccttttgaggcgatgtcgaaacagtgaccggcggcgcagcgcagactgcctgtttcgatgcgcatatcgccgccgcagcagggacagcgcagcagatcccggatcggttcaaatttttttctctgtctgtttgtcatttttttctcctgattgaaaccgcccggatccgcagaaactgccaaagctctgcaagtctctctgcggcggtattttttttattatatcataaattacgcggctgccggcggagacttgtccggatgagaagaaaggccgaaaacagggagatcttttcgggaggatttcgcataccgggagaaggaggtctctttcctcgctccgcccttgcattttatcggccgctgtgttagattatataggaatcgaatcaaaggaaagaaataatgacaaacgtcttatggaagggcctccggtattgcgctgaacggcgttgtataggatgcctttcttttttattctgcgggagggtggatttttcatgggaacgggcaagagaacttcaaagagagagaaacgggcgatgtcggtatcgctgtacgggaatttatttttcgtcgttatcgagctggtcatggcgatcgtcaccggatctcaggcagtgcttctggacgccgtctatgacggcatcgagtttttcatgctgctgccgtcgattttcctgattccgctgctgtacaaacccagcgatgaaaaatatcccttcggtcatatgcagatggagacagtatttctggttattaaagggattacgatgacagcggttaccgtgggattgatctccaacagtatcaatattctgtttcacggcggaagaacggtagagttcgggacagtggcgtggtttgagatgacagcctgcatcctcggcgtcgcggtggcggtctatctgaagcggaagaataagaatatgaattcgcctattgtcaaggtggagatgcagggatggaagatggacagcgtcatctctctgggaatgaccgcggcatttttgctgccgtcgctgattccgtttgactggtttcagaaggccgttccgtatctggattccatcattactatcgtgctttcgatgatcatgcttccgattccgatccgaacagtcgtcaccggcatacgggatctgcttctcatttccccggaggaagagaccgtgcatgatatcaagagtctggtggaaccgatcattctggagagcaattgctccgatatttattatgacatcgtcaggacgggaagaaagttctggatcagcgtttacgtcacattggacagagatgaactttccgtgcggaggtttaagatgcttcagacccgctgtatcgcggcgctggcggaaaagtattccgatttttatttcgagctgcttcctgagatcgaagtcgatctcgacgaggatgggaatataacgccgccggatgcagaagaatgaggcggcagatctgtttttgaaatacgctgtcttctgtcctgcgaaataacctgtcaggaggactttccgtatgcggaggcggcgttgacacagaacaggaatcattttactatatattatagcaactgaaaaaacagggaggaaacaatacgtggcaacagaaaataaagcaaagaaaaaaagcaggggaaaatcggtcattctgattctcctgttgattatcgtcatcgccgctgccggcggcggatattatctgagtacgatgaataaagcgctgtcgccgggatcggataagatcatactcgtggaagtggcttccggagatacgactacagctatcgcagataaattggaggaaaagggggttatcgccagcgcgcagaaattccgcctcaaatcccggctgtcaggaaacgacggaaagtacaaagcgggcgtctatgaggtgagtccggcgatgacggcggaagaaattatggacaagctgatttccggagatcaggagcagaacaggctgacgattccggagggatatactctcgaccaggttgcggaagctgcggaaaaggccggagtctgcacgaaggaggaattcctcagagaaacacagaacggccagtttgagtatcgttttatggaatacgcgggatcgggagagaaacgcctggagggatttctctatccggagacttacttcgttccgaagggcacttccgctcatgatctggtagatatgctgctggcgcagtttgacaaggtgtttaccgacgaatactatgaccgggcagcgcagatgggactgacgccgagagacatcgtcaccgtcgcgtctatgatccagagagagactctggtatcggaagaaggggcgaaggtcgccagcgtcatttacaatcgcctggcggacggaatgaaacttcagatcgacgctaccgttcagtatgctctgggagagcagaagtcccgtttatcctattcggatctggaagtcgattctccttacaatacgtataaagtcgaggggctgccggcaggtccgatctgccagcctcataaatcagcaatcgaagccgctctctggcccgaggagacggattatctgttttacgtactgaagccggacggcagcggaagtcataattttgccgcgaccgatacggaattcgctcagtacagggaagaatatctcaattcactgaagtgagacaggcaaagagcagaggtgagagctgaagatatgaatattacaaatgaagttgtcacccggtacatcgacggcttgtaccggccgctgacgtcagaactggcagagctgcgccggcaggcggaagcggatcatataccggtaattctgagagataccgaacggtttctggtgtcgatgctgacgctgatacggccccgcaggattctggagatcggtgcggcggtaggatattcttcctcctgttttgcacaggtctgcggcgccggtacgaaaataaccactctggaagcagatcccgtgatgtttgaaaaggcttcggacaatattcgtcgtctgggctacggcgaacagatcgaagttctgttcggagatgcaagagggaccttaaatcagctggagccgggctatgattttgtgtttatcgacgcggccaaaagtcattaccgcgccttttacgacggcgctttaaggctgtgccgaaaaggcggtgcaatcgtctgcgacaatattctgatgcgggcgatgacagcttccgacgaatatgatccgaaaggaaagcacagaaccagcatcaggaaaatgagagaatttctggattatattacggcgtcggatgctgcggtgacgtcggttttcgccgccggagacggaattgctctgagcatagtggcgagcgatcaaacggagatcgacgcgggaagcagaggatgaaataacgatgaaaaaaatggaactgctggcgcctgccggcgatttggaaaaactgaaaatcgcgatagattacggagccgatgccgtctatttcgggggcgaagctttcggtctgcgggccggcgccggcaattttacaaaggaagaaatccgtgagggagcgaaatacgctcacgaacgcggaaaaaagatctatatgacggtaaatatcttcgctcataatgaagatattcgtcttcttccggattttctcagagggatcgctgatctggaaatcgacgcttttctcgtatccgatccaggtgtgatcgccgtatttcgggaaattctgccggatgctgtactccatctgagcacacaggcgaatacgacgaattatatgactgcgaagttctggtatgacatgggcatatcccgtatcgtggcggccagagagatgtcttttgaggaactgcgggaatttcgccgcgagattccggaagatatggagatcgaagcttttgttcacggagccatgtgtatctcttattccggcaggtgtctgatgagcaattttatgacggttagggacgccaaccgcggagcctgcgcccatccctgccgctggaattacagtctgatggaagaaaaacggccgggggaatattttcctgtagaggaagaccagcgcggcacgtacgtgtttaattccaaagatctctgcatgatcggccatattccggaaatggtggaagcgggaatcgcctcggcgaagatcgaaggccggatgaagacgattttttacgcggcgacagtcgtccgtgtctatcgggaagcgatcgaccgctattatgcggatcccgcatcgtatcggtttcgcccggaatggctggaagaattgtcgaaggtcagcaatcgtcactttaccacaggttttttcctgggcagacctgatgagagcgcccagaattacgaatccagcgcctatatccgggagtacgactttatcggaatcgtccggtcgtatgacggcgaaaccggcagcgcgctgatcgagcagaggaatcatttccgcgtcggcgatgagatcgaaattttcggtcccggaagcgcgtctttcttcactcagacggtagaggagcttttcgacgctgagagcggcaaaccggtggaagtagcgccgcatgcgcagcagatgctccgcatgaaggttcgtttcccggtaggcgcgtcttatatgctgcggagaaagagaccgtaaggtaagtcgcagaaaaaaatttgtaaaaaatatcacaatctcattgacacaacaagtatgatatgttattttttaaatagaaaaataagtgtgctaattataagttgacaaataaaaaataaataaggccgccgagggtgcatatagatgatacgttatcgtttccgctttgcgggtaattttaaagttacatctgaagttaagcgtaaactttcgtgaatgataaacaaccagcggccttatgctttttcttgaagtctgcatcagcagaagattttccgacggtattctcgaggagaagcggtactattctttttcgctgcttcagttcttcagcgaagaaaagaccaaatttttccatgccacatatgtaagtacctttattctgcataacgcacaagataagccacaaaaacacagaaagggattccccgtgcggggagttcctttctgtgttttttgtctctgcagagttctaaatccggacgaccctcatatgattaatcagggacaaacatttcgggcgcattttagccgcatttcgggtcggatgcgccgctgcagaaggattcgccgcagatttttcaccggtgaaaagaagaatgccgtcttggggcggaagtgatacaggagggagatacaaaagatgaatgaggcagcaggaagaaaagtggcccggcggccatacgcttacggtcagattcgcgggcagcgtcagctgcccgcgttaccgcaggaaaatgtcagggaacgccgaaaaacgggacgtgcactggaagaaatcgtatccggcctgccggacgatatcgcgagaactctgcgtatgatgccggacaagatgagcaggtcattagaggagatacgcttccgggcggggcggccggtgatggtgtatgccggcggcaaagagtatgagatgtatcggtcgggagaaaagaacctttctcaggaggaagtggaaaagatttttcactctctggtgcgccattccgcatactcctatcaggaggatctgagaaacggctttgtcaccttagacggaggtcacagagtagggatctgcggaagagcggttaccgacggtcacggaaacatcgcggggatccgcgatatctcctctgtcaacatacggagaggccaggagatcatcggtgtgtcggatggtatttttcctcatctcatcgatgccagaggacgggtgttgcatacactcatcgtctcaccgcccaaatgcggaaagacgacggttttgagggatgtgatccggaatctgtccaatgggggctacaaagtgggcgtatgtgatgaacggtgtgagattgcaggcgcttccgggggaatctgcgggtttgatctgggacccagaacggatgtgatggattcctgccccaaggatacgggcattctcatgctgattcgttccatgtcgccggatgtgatcgctgtggatgaaatcggaacgaaagcggacgtcgccgccatcgaacgggcgtgtgtgtccggcgtagctgtggcggctactatgcacggagaatcgtttgaagatgtgcttcattctcatgtcggtccttttgtgaaaaaaggcatcatccgccggctgatctttctgacggacacgccggcgccgggaactgtagccgatatcaaaaattcctcagggctgagtctgattcatcccagggaaatgaaatgggagaccgaacgacatgattgacgctatgacagtgaaaatgatgacggcggcagcgctggcggtgtccggggccgccgccgggcaatatcaggcgtctcagctgacaaagagggaagagatgatcgcagaacttatcagcgggattcgtctcttccgcaatgaaatctactatacccacgatcggctggaacgcgtggcgcggaggctgacgtcttcctgttccggctgctgtgtctctctcttttccgagtttcaggatcagctgaatcactgccgcggaagagataccgagacgatgtggcgcagttccgtggaaaatgtgttcggccgccggccgccgctgaaggacagcgatcgtctggcgctgatgtccgcaggactgcggctgggaagagacgatatcgaggggcagtgccgttatttggaaaagacagcagaagaactggaggttcgcctgctggaggcgcgcaaagagaaagaatcccgttcccggctgtataagactctgggactgactgccggatgcgccgccgctattctcgttttctgaaagaacggcaggaaggggtcatacattggatattaatgtagatatgatttttaaaatcgccgccatcggcattatcgtggcggtactgaaccaggtgctgattcgggcgggcagagaggatcaggcgatgatgaccacactggcggggatcgtcgtggtgctcttcatcattatttcgatgatcagtcaattcttttcggcggtaaagacgatgtttatgctctgaaaaaggaggcgctatgtttcagattgcagctgtgggactgatatgtgcggtattgtcgctggcggtccgctcctggcgtccggaattctccatctatatttcagcggccagcggtctggtactgtttgccatggtctattctcagctggaaggcatcatttcgggcgtatcagggctgtttcagaaatccggcagcgcgggagtctatttccctgtgctgctgaaagtgatcggcatcgcctatctcaccgatttttcggcgcaggtctgccgggacgccggggaaaatggcatcgcctccaaggtggagatggcgggaaagatttttatcttttacgcggctctgccggtatttacgtcgctgattcgaatgcttcagatgttacttgaaatctgacggagggaaaaatatatgtacaaaagaagaaaacgggaatccggcgggcggagaaatgagcgaagactgccatgatcgattacagtgatatttttcggtctcaggctgagtcgctcaataccgccggcatggaaggcatcctgcgggcggcggacgtgccccgggaggtggcgcagaatttcagcgtgaaggaaatcgtgctgaacatgttgtcgggcgacgccgcggtcaatcaggagaaagtactggatctgctgaaaaccatgtttttcggagaaatccgggggctggtcagtctggcggcgcagctgatctgtatctgtatcgccgccggaattctcagcagtttcgcttccgggttcggcagcggtacggcgtcggggatgtcctccgtcatctgttcttttatggcggcgggaatctgtctgacggcattttataatatctatcaggggagtctcggcgcggtttctgcgatgacaaatctcatgtcggtgtcgctgccggtcatctttgcagtcaccgccgtatcgggcggggcttcttccgcagcggtgctcagcgctgtagtgacggctgcggtgacggctttttccgcctgggtccgatttattctcatgccgatggtattcgtatcggggattttttctgtcgtcagcagcgtaggaaaacggagctatatcaagaaaacggcgaaatttctcaggacagccgcagttttcggcatgggtctttccattacactatttaccggactgactgcgattcaggggattatgacgaaatcagcggacgatatgctgatgcggacagcccgctattccctcgataatctcatcccgctggtaggcggatttaccgcggactctctcgagatgatcatcgcctgcctcaagagtatccggggagggatcggcgtggcaggagtcatcatattagttcttctcctgatcggtcctcttgtaaaatccgtgtgtgtggttctcatttttcgtgcgacttcgctggtcctggaaccggcaggagatgatgcgatgtctgactgcatgggggaattggcttccgcggctacggttatggcggcgctgctattcctttccagccttatgtttgtcattttcttcacctgtgtgcttcgcttcgttccgtctctctgacgcgccggcgcggaaacgtgcgaatgcgaaaggagagaaccgcagcgatgaggataaatgtgccgagaaatttctgcggcggtgaaaatttgacagatgacgggcggaatgatagggggaaagagagatgagtcaatatgtgcgggaatgggtgatgacaatcgtatttctggtggcggcgtccgctttttttgagggcatttttcccggagggagtatgggaaaatatttgaaatatatctttgcgctgatcattctgtcggtcattttatcgccggtagccgttattttcggctgatccgccattttggggcatggaagacggcaaccgggaatatatatgaagaaagggtgtttacgatgaaaaagtttgctgaaggcggtgaggggaaaaagaaaatgctgatgactgcggcagccgtgctgcttctgatgctgatatctctgctgtttctgaattcgatggtgacggacaaagacggccggagcagtctgatgacgggagaagatcaggtatcctacgatgacgaaggaaagacggcggaggaaatccgcctggaaaatattctggaatgtatcgcgggcgtcggagaagtccatgtcatgatccgcagcagtgaggagagtccgtcggcgtctgtctttctttcaggggatgacgaggagaaaggaggagaggtgaaaggtgtgatcgtggcggcggaaggcgcggaaaacccggtgatccagtcgaaaatcacagaggctgtggccactgtatgcgacgtgccttattccagtgtggcggtgtattcgatgtcctgatccgccgaagagcggagggaaaagccgcatgctgcctgtggagcagcatcggcgtttcgccgcatccagcggacagaagacggtattttgctgaaggcaaacggttaattatgaggaggaatcatctgtgaaaaagatatttgataaagagaaactgaaatcccataacgggatcatttttgtctgtgtcgttgctctcgtctgctgtatcggcgtggtcaacggcaagctcagcgaaaaaggagctttgggcgtatccgcgggatatgaggattatgagaacgaagagatggccgctcacagcggagacgttctggtggacagtctcaatctcagcgcagccgagggaagttcttccgatgccgctcagaacggggataaagccggcggtgacagcacggctgacaaagatgccgccggagcggcgtccggtgaaaagacggagacagtgacgtcggacgacgcatcttccgtcgccggttcggatgaattttttaaagaagcccgggagactctggcatatgacagaaatgagatgatttccgttctcaccgatacgatcgacaatgcaggagaaggatcggaaaagaacagcgcaaaggagcagaaggataagatcatcaaatatatggatatggagaaatcactggaaaatctcattcggagcaaaggatacagcgatgctttcgtcatcgtcaccgataaatcggtcaacgtgacggttcaggcggacagtatcgacgatcaggatgcggcgagaatcctcgatatcgtcatgcgcgagacaggcagaaatgcggacggtatcgtggttcaggcgaagagcgccgtagcgtaaaggctgcgggcacggaatttgcatcgttgtaaaacggcgcctgatctgttatcatatatcacagaaaagttccccggcggatggagacgggatccgggcgggacagaaacggcgtttggcgccggctgcagaaaggagacgcggctgtgagtgaagagctgggaagcattcggataacggataaggtgatcgctgtctgtgcggcgaaagccgcattggataccaaaggagtctatggactggtgtcggatttttccgatacgattcagaagaatattctcggaaagacctctgaatcgcggggtgtgaaaatcagtcagagcgacggagagatcgtcatcgatcttcatattaccgtggaatacggcgtcaaaataccatctgtggcctggagcatacaggaaagagtgaaaaaagaagtggaagagctcaccggtatgaaggtgacttttgtgaatattcacgttcagtcgattcatttcgaggaaagcggcgaataaatacgaaagagcgattccccgaccgcatctgcggggggggaagaaacggtagagcggtgcggcggccggaggaaggcagacacggagtacggatcagcgaagagaagcggcagcggaacatcatatacatcaacggaggagttatggcacggacgggcgaaagagaaaatctgatgaaaatgatttatcagatgggagtacaggaagatttcagcgcagaggaatacgaaaagtttacggcgctgcaggcggattctcagattacggaatattttgtaaacggttatcgggcggcggcgtcaaacctgaaggaaatcgatgagttgatcgaccggtacagcgttcggtggaagacttcccgtcttccgaaagtggatctggcgattctgcgtctggcgctggccgagatctgctatctgacagatattccggtttcggtgacgatcaatgaagcggtagaactggcaaaaaaatacagtacagaaaagtcgtcgaagtttatcaacggcgtgctgggaagcgccgcgcgggatgccggcgtaccggctgattcgtgcgagacgtctgcaggcggcaaagatgagagatgagaagggcgcgatgagcagcggcggagtgctggctttcgataccagcaattatacgacgtcggcggcgatcgcggatctgtcgggagagattctcgccgactgccgcagcctgctgaaggtcagagaaggagaaagagggctgcgccagtcgcacgccctttttcagcatgtagaaaatctgcccgggctggtgcgccgggctgtgtcagagagcggaatcagaagggaaaatatctgtgccgttgcggtcagcgagcggcccagacctgtggaaggctcttatatgccggttttccgcgccggtgtaagcgttgcggaaagcatcgcagcggctctgagagttcccgtctatcggtattctcatcaggagggccatatcgctgcggtctgcggggctctggatgagagtgttcggacggtgtcttttcacttgtcgggaggaacaggggaaattctggcgacgcagggctgccgcccggtctgtgtgatcggcggaatccgggatttatctttcggtcagctcatcgaccgtgccggtgtggctctggggctcggatttcccgcaggcgctgcgctggaccgcattgtctgccggacggtggttcccggttctttaaaatattcctccagggggaatacgaagatcgggcatccggtgaccggacccattcatgtggaaggggcctatgccaatctttcgggtatagagacgcaaattttaagagagatcgggaatttaaagaaaaggaaagacagagaaacggtgtccggaaaaatacgttccctggatgaggatacgcttttttccgggaaagacggggaagaagcgcggcgggagtctgaattatcggcggaggaacgcagactggcggcagaactgttctgccggatggcggacgctcttctgcggctgtccgtcagcgctcttcagtccgcggaaacggataccgtcgtatttgcaggcggagtttccgcgagtcaatttctgagaagagagttggacgccagactcaaaaaacagggatttcgggcagtcttcggcgatccggaaatgagttccgacaatgcgtgcggtatcgcgaggctgggcgtcgcggaatatctcagaacgcatcggaaagaattggatgagaaatcaaaaagaatgacaaaataacggaaagacaggggagcgcatgatctccgggaagcaggtgctttgcggagatcatgcgctctcctgtctctttgtttgcgaaagaagagccgctctctttcgattcttttccgaaagacggaggaaagagcatcgattttggacggctctcttttggctcgcgccgtttccggcgctctgtgttctcaagtttttatactgttctgtatgaagtctgttattcttctacccggatgacgcttccgagggaagagacataagagtgggtatagagctcttcgagggcggcgtccaggacgttcctttccgcctggtgcagaataaatacgagagggacggtgccgtcggaaaattttttcgggaccggtctctgcatcatagaggcgatgccgatgccgtattttccgaaagtagaggagatgctgcccagaacgcccggacgatcctctacgatgagtttgagataatatttgttttttccttcaccgccataaatcacgtcgtcgtaggatttcaggatcggtgtggaatcgaaggcgcagcctttgtcgatcgctctggcgatctctatgatgtcccccagaacggcgcttcccgtaggcagcggacctgcgccctttccgtaaaacatgagatcgtccaccgcgttgcccttgacaaagagagcgttgaattcattgcttacggacgccagaggatgttcgaaaggcaccagggaaggctgtacgtgacactccactgtgcgttctgttttttttgcggtagccagcagtttgatcttgtagccgaactgggtggcgaagttgatgtcgtctttcgtaatggacgtgatgccctgtgtcgggatgtcttccggagcgatgcggatgccgaagacgatggacatgaggatcgacagtttattggctacatcgatgccttctacatcgccggaaggatctctttccgcaaagcctttttcctgggcatccttcaggacgtcttcgtaatccagtccgtattctgtcatctgcgtcagaatatagttcgtagtaccgtttacgataccgagaatttcatcgaaatcgttggataaaagcgcggtggaaagcgcgttcaggatagggatccctccgccgacgctggcttcgaagcgaagcataacgccgttttccagagccagctgctgaagcatatcgcctttggccgcgatagcggctttgtttgccgtaaccacatgcttgccgtttctgagcgctctggccatgtattccgacgcaggctcgatacctccgatgagttcgacgacgatatcgatctgaggattgtctaaaatatctgccgggtcctgtgtgtagactccttccgctaccgtaatgcctctgtctttttcagggcttctgttgagtatttttataatatcgatggatacgccggaggactgctcgattctgcggcagttcatctccagcgctttgtatgtaccgacggccacattcccgatgccgagaataccgactttgatatgcttcattattgccctccgttaaaatgtgagatattttttcttccataggttccgcgttttcgccgagaacagaattgtatgaagaatactgcattcccgctgaagacacagaaaaacgcaacggaaacctcagatacggaatccgtcagcagaattgtacggtatgaacgaataaaataatgaatattataatatatttttagtgcattgtctaatgatttgcgtctgtcattttgtttctcccggggaaaatcggatccggcggggaaaaaacgaagcaggaccgggaaattccgctgttctgcccgcagagacgatgctctgtacagataaattgttgaatcttgcagtttggaggatgagtattatggaagacatgtcaggaggacggcgaaagctgaaaaagatatttatgtttgtgatggcggcggcgctgggagtagcgatcgctgtctgcagcgtatctttcggccaggaacggcgggttccgatttatggcgtggatacggataaaaaacaggttgcgatcagttttgacgcggcctggggcgatgaattcacagaggggatcctcgatattctcgatacttacgacgtaaaggctactttctttctggtggatttctggtcgaaagaatttccggaggacgtcaagatgatcgcggaaagagggcatgacatcggcaatcactcgacgacgcatccggatatggcgaatctcagcgaagaggagatcgctcaggaactcaatacgtcagccgataccattgaatctctgacgggaaaacggcctgttcttttccgacccccgtacggctcttattccgatcgcctgatcaatacggcggaatctctcggctatcagacgatccagtggtctgttgatgcgtgcgccccggtggaagactcggaccgcgtttatctctcttatcccggggaattccatacctttacgcgtcaattgtcagctgcggtttccagtagatatccagatctcttcctctgatttcgatgcggtcgatcaaaagtgcggcggcctcttttttttcgtcttttgtgagttcgccgaaaccgcgcagccgcagggaaggcgcggataaaagatgaccgtagcgggagaggattttcttttcctgttccagctgtgagatgcgccggttgatgtatttcatcgatgtttctgcggcgagagaacagcgccgcatcagattttcgatttccgtctcgatttcatccagtcggcggcgtcctccggagagagtgcgcagggcgtttcggatcagtgaggaaatctcatttatgacgatatactccgtctcttccggccgggcgctgatggaacgcacgttgcagatgtgcagattgtaacgtccgctgcagcaaagataacgccggctgccggcgcgtttgacgctgatagcataaccgcaggttccgcatttcagcaggccggacagaaacgaggcgctgcccggacgggatgttcccacaggaagcgttcccgacagcttctgctgacagcgcagccatgtggcggaatcgacgatgccgctgaaattcgtcagagacagtgtctggcgttccggcggattgactgcgccgctctttgcggagcgccggccggtaagcagtgcggaaaaggtaccgtcgaattcttcttcgctgttgacaacggtgccgatacccgcggtcacgtaataagagaggaccgcgcggtccgcacgagcgtagacgggagagcggagaatgcgggaaacggatttgctgtcccagccggcgggacggacggcggaagcgcatcccgcggcggtcagttcccgcgcgatagcggacaggcttttgccggtgttggcgtagtcggagaatatctttgcggcggcggatgcattttgatcgggtgtaagcgtgggaatactgtgtccgccggagtggattctgccgcactgaaagccgaagggcgcccggcctccgggccaggcgccggaacgtacccgggcatagtagttgtctgtgatgcgctctgcgatggtctctctttccagctgggcaaaagtcatgatgatatagaccatggctttgccgatcggcgtagaggtatcgaattgttcacttatggaagaaaattccacattatggcgttcaaagagttcccacatcgcgctgaaatcgctgacggagcggctcagacggtccagccggtagacgatgacccggcggattttgccgtcggccagatctctcatcattcgcagataaccgggacgtttcagattttttccgctgaatccgcggtcggtgtagactgtcacttcatcgtccggacagcgttcacggcacatgcggatctgtgtttccacggaaatagaatctttcttttccaccgattgtctggcgtagataccggtcaattctccgcctcctgccttttttcggagaggatgggcgtcagcagacggaggatctcggcggcgtccggaggagagagccggcggggatctgtgccgtgatgcgccgcggtatagcagacttcctctccgtcgtcgcgggaaaagtgataattcccggatttgtccgacgtttttcggcagaaaaacgaaaattctgacggttgttttttttctttttcagatttagaagtgtccgggagatccggagatagcacttccggctgatttctttttttccccatgattgttttctcctgtagagtcttatcttcgcctcacttgcggtttcggcggagttttatcggtaatatgtatccgttttttttattgtattggattttgaaagcaaatatgctgatttctgtggtatcataactgagaaaatattattatggaggccagaagatgttaacacttgataaaatataccatgcggcttttgttttgaaaaatgtggcgcgaaagacggatctcataaaggccacgaaattgtccggtcagtgtgaactctatctcaagacagagaatctgcaggagacgggaagttttaaactgcggggcgcgtattataaaatcagccagctcacggaggaagagaagacccgggggatcatcgcctgcagtgcgggaaatcacgcgcagggtgtggcgatggcggcgtcccggaacgggatcagatcggtgatctacatgccggacggcgcgccgatcagcaaagtggaagccacaaagcagctgggggcggaagtgtgtctcgtcaagggagtctatgatgatgcttacgcgaaagcgattcaggtgcaggaagagaccggcgcgacatttatccatccatttgacgatgaggaagtcatcgccggacagggaaccatcggtctggaaattctcgactccctggaaggggtggatgcggtcatcgttccggtgggcggcggcggcctgatttcgggtgtggcctgcgccgtaaaaaatctcagaccggatatcaaggtctacggcgtacaggcggcaggttccgccagcatgtttgaaagccgcagagcgggagaagccatcacactggagaccgcggccacttttgccgacgggattgcggtaaagcatcccggcgatatcacctatcagatggtgaatcagtatgtggacgatatcgtcaccgtcagtgaggacgagatcgccgcggcgattctggctctgctggagaagcagaaagtgatcgcagaaggggctggcgcggtgagcacagcggccgtgctgttcgataagcttccagtccgggaaaagaaggtggtcagcatcgtttccggaggaaatatcgacgtgaatattctcagccgggtgattaccagaggtctcgtcaccagcgggagaaatgtcaatctgaccatcgcgctgacggacaagccggggcagcttcaggatgtgtcggagatcatcgcctcctgcggaggaaatgtggttgcggtgtatcacgaccgttcggatgcgaatatggcgatcaccagctgctatctgaaattaggtctggaaaccagagattttgaacagatccagctcatcgaatcggaactcacaaaagccggttttcatctggtctctgagcgggtgtgagaacgaaagcagaagaagtgtccgccgctttgacgtcggcgggacagtgagaagttgcagatcgaaagatcgaacggtaatcggaggagaagaaatgaaagtattgagcacagacaaagctccggcagcgatcggaccttattcccaggctctcgtcagcggcggtacggtattcgtctcgggacagattcctgtggatccgtccacgggaatgatcgcagaaacgatcgcagaacagacggcccagtccctttctaatattgaaaatattctggcggaaaacggcatgacgatggaaaatgtaatcaaaacatcggtattcctatcggatctcagcgattttgcggcgatgaatgaagtttacgcttcccgttttaaagcgccttatcccgcgagaagctgcgttgaggtggcggcgattccgaaaggctgcaaggtggaaatcgaatgcatcgcagtgaaataaatcagaagaccggcctgtcggccggttttttgattgcggaaaaaaatgattttccagcggggcacacgctgacagtctcgactggaaagacatcagcaccgcacagattgtggaacgggtcagccgcaacgtgaaagacggatccattatattattccacaataatgcgcagcatgtgctggaatatctgccgcaggtattggataatctgaaaaacagcggttatgaaatcgtaaaaataaacgatctgatttatcatgagaattatcacatcgataacaacggcattcagatcagcgacggagataccggcgaaacagacggaacagacggaacagaagccgcttcttcacaggatctgccgtccggcggaccggcggtctctgatgaagcgcaggcgccgcagcgatcgggaactgcgcagccgcaggaaggagaatgatgtgatgaccggtgaggagacaaacagcgttttcctttcaggagaggtgacggaaccgcctgtctacagccattcttccttcggcgaggagttttttctatttcagctggggatcgtgcgcaggagcgggcgtcaggatgaaatccgtgtgctgatttcccggcgtcttctggacatcgccggactttccgccgaaaggggcagttttgttacggtacagggacagatccggacgtataatcagcgcgacgccgataaaatgcacctcagagttttcgtgttctgtcatagaatcggcgggtgcgggcggtccgaatgcggcgacaacagcgtaactctggagggatttgtgtgcaggcagccggtgcaccgcatttcccctctgggaagggaaatctgcgacgtcatgctcgctgtcaatcggcgttacggaaagtcggattatattccctgcatcatctggggccgcagcgcggcgttcgcagcctccctgcctccaggaagcagaatccgggtcaacggccgctttcagagcagagactaccggaagcagacggccggcggagcatatgaaatgcgcaccgcctacgagatttctgtcagcagcatcgagacaccggaggaaaaagaacggaatctgcagataaagtacaattattgaacacaattcccttaaagtaaagaataaaagaataaacaaagaatcatttttgtgttataatattcgaagtaacttgtaaaactaatcaattagagaggatttcaaagacaatgagtacaaagtatctgtatctgtttacagaaggtaatgcagacatgagagaacttctcggcggcaaaggtgcgaacctggctgagatgacgaatctgggcatgccggtgccgcagggatttacgatcactacggaagcgtgtaaccgatattatgatgacggcagaacgatcgctccggaaatcgagagcgatatcattgcttatatggcaaagcttgaagaaattacgggtaaaaaattcggaaatgccgaaaacccgcttctcgtttcagtgcgttcgggtgcgagagcgtccatgccgggtatgatggatactattctcaacctcggcatcaatgatacggttgcggaggggatgattgctcttacaaataatccgagattcgtatacgactcttacagaagattcattcagatgttttccgatgtcgttatggaactcccaaaatccgattttgaaaaatatatcgatcagttaaaggcagagcgcggcgtgaaatatgatgcagagctgagtgcagacgatatgaaacagctcgtagcgcattttaaagaatattacaaagaaaagatgggcgtggatttccctcaggatccgaagacacagttgatggaatccgtcaaggcggtattccgcagctgggataatccgagagccaatgcctaccggaagatgaacgatattccgggcagctgggggacggcggtaaatgtgcagtccatggtattcggcaactggggtgacgattccggtacgggcgtagcgtttacgcgaaatcctgctacaggagaaaaggctctgttcggtgagtttctcatgaacgctcagggcgaagacgtagttgcaggcatccgtacgccgcatactatcgatgagatggctgagattatgcccgaagtctacagagaattcaaggaaatcgcagataaactggaaaatcactataaggatatgcaggacatggagtttaccatcgaaagaggtaagctttacatgcttcagacgagaaacggaaagagaacggcagcttccgcgctcagaattgcggtggctctggtagaggaagggctgtgcacgaaggaagaagcgatcctcaaagtagagccgaagcagctggattccgtactccatcctcagttcaacgcagatgcgctgaaagcggcaaagccggtggctgccggtctggcggcttctccgggcgctgcctgcggtgcgatctacttcaccgcggaggatgcgaaagaagctgcggcggacggtccggttcttctggttcgattggaaacttctccggaggatatcgagggtatggcagcggcacagggaatcctcacctgcagaggcggcatgacgtctcacgccgcagtagtggcaagaggtatgggtacctgctgtgtcagcggctgcggagcgatttccatcgatgaagatacaaagactctgaaggtcgacggacatatcctcaaagagggtgatttcatgtccatcgacggttccacaggaaatgtctatatcggccagattccgacggaaccggcacagatcaccggcgactttgaaatcgtcatgggctgggcggacgaagtcagaaaattaaaggtccgtacaaatgccgacaacgaaccggatgcggctcaggccatcggattcggcgcagagggaatcggactgacgagaacggagcacatgttctttgaggaagatcgaattcctgcagtgcgcgaaatgatcgtcgcaagtaccaaggagcagagagaaaaggcgctggaaaaactgctgccgatgcagagaggcgacttcgaaaagatctacagagtgatgggcgacagaccggttacggtacgtcttctcgacccgccgcttcacgaattccttccgaaagaagaggaagcgatcgctgaactggccaagacgatgggcatcagctttgaagaccttaagagcacggtagtcggactacaggaactcaacccgatgatgggccacagaggctgcagactcgcggttacatatccggaaatcgcggcaatgcaggccagagccatcatcgaagctgcgatcaaagtaaataaagaaacggaatatacgatcgttccggaaatcatgattcctctgacaggggaagagaaggaactgaaatatgtaaaggatatcgtagtagctacggcagataaagttatcgaagaggcgggagcggagctcagatatcacgtaggtacgatgattgagattccacgcgcggctcttacagcggatgagatcgcgaaggaagcggaattcttcagcttcggtacaaacgatctgacacagatgactttcggtttcagccgtgacgatgccggaaagttcctgccggaatactatgaaaagaagattttcgaaagtgatccgttcgaacggtttgaccaaaaaggcgtcggcaaactggttgagttggccgtagaactgggcagaaagcagagaccggatattcatctgggcgtatgcggagagcacggcggagatccttcctctgtagaatttttccatagagtaggactggattatgtttcatgctccccgttcagagtgcctattgcgagactggctgcggcgcatgcgcagatcaagtatcctcgttagtcatgtagagaaactttgttttttcaggcgcttctacctgctgatgcgggtgggggcgcttgttttgttgttcggcagcgggagagtattgcagtgatgagagaattcgaaacttatattctttttatgatcgcggagctgatcggagtggttgtcatccgaaagatgatgtgctgtttcttcgatgctccttttaaggtccagccgatggaatatatgggatatattctttattatatcttccatctgatggcctgtttcctgaaattgaatgcgacaacttatctgaccggtcatatgatccttctgacggcgattaccttttgttattcgtcgggactgggaacaaaattctgtaccgctttttataccgctgcggctgtggtattcagcgacatggtgtttctcttcctgtgcggctgtacggaaagaggtacgcattgtgtctggagctgttttgcatccaagctgacactcgtggcgctgatgaggttcttcacgtcggaaaagcgccgcagttattcctttcgggcgattcctgcgggatatattctgatgatcacggggattccggtggcgtctctgtatcttctgagcattctcgcggacagcggggtttcggcgccgcatctgatcggatgttctctgtgcattatggcggtaaacggcatcaccctcgctttttattttcatacggcggcttattacaaagagcagacacagtgggaaatatttccgggaaaaagtgcgacgggaaataccggtcccgcagcggcttcgatcaacagtctgcggatctttcgccacgacatggtcaatcacttctcggtgctggagtattatttaaaagaaggaaattcggagaaggggctcgattatctgcggaaaatgaaccatctgtgtgagaatcgggtggattttcatacgggaagtccggtggtagacggtattctcggcaataaagtttcggcggcccggcaaaagggtattcatgtatcatgcgatgtctgtctttccggggggctttttcttccggattttgatctgacctgtgttctcgggaatcttttggacaatgcggtggaagccgcgcagcaggctccggataaagagatacgcgtcagtttgagatgcagcggaaagcagctggctctggatatcaggaatacgtttgaaggcagtctgtgcagaggagaagatcttctgatgactacgaagcaggaccgggaaatgcatgggatcggtctgcagagtgtggctcagacagtcaggaaattcaacggatcgatggaactctatcaggaggggagttatttctgtactgcggtgaaattatatgtaaaataatagagaaatcgcggaaatagtagtgtatactgttgataataacgagacggatagttcggccggtgtggaccggcctggagtagtagaggtagcttgaagaatgatagaaaaagttgcaatcgttggcatgggagcgctgggactgatgtacggcgcttttatctcagatcagacggaaaacgacgctgtctttctcctcagcgaggagcggatggcgcggtacggtgataaaattttcacagtgaacggaaaggtggtagctcccgctatgcaggccgaggaatccgccgagccggcagatctggttctcgtatcggtgaaatataacgacttggagtcggcgatggatacgatgagaaactgtgtcggtaaagatacgatcatattgtcgcttctgaacggtatcaccagtgaagagatcatcgcaaaacgttacggtgcggagcgaatcgtacacacggtggcgcagggcatggatgcggtgaaaatcggagatgatctgacgtatacgcagatgggaaagcttcacgtcggcgtgccgcagggaatggatgataaaaatctgaaggctgtcgtacgttattttgagtccatcggactcccttacaagcaggaagaagacatcattctgcgcatgtggagtaagtttatgctgaacgtaggcatcaatcagacgtgcatggcttttgaaacggattacgcgggatgtcttgcgccggggcaggctcatgataccttcatctcagcgatgaaagaagtgattcgtatcgcagacgcggagggtgtcaatctgacggaggatgctatcggagaatatatcgagatcgtcagatctctgaaaccggacagcatcccttccatgcgccaggacagtctgcagaagcgccgtacagaggtggatctgtttgccggcaccgtgattcgtattgctgagaaacacggaatttccgtgccggccaacgaatttctctactgcagagcgaaggagatcgaggcatcgtatcacgaatagtattttcacgacagaaatgaagtaagaatgcaggggagcagagaggagtataaaatgaaagaacaagtaaaagactgggtgatctcgctgatcggcctgacagcggggtcaattctggcagctgcggcgctggagaattttctgattccctttaagattcttgacggaggtctcaacggtatcggaatgatcatcaattttctgactgatctgccgctgagtgttttgatcgtcgtgctgaatatcccattttttgtagtaggactgattcagctggggaaaggttttatcgtcaaatatgcttatgcgatcgtcgtgttttccgtattcctggaatattttaaggatgtttccaacgcgacgcaggattctctgctggcgacggtgttcggcggcgtggtactgggaatcggcgtcggagtagtgatccgatccgggggctgtatcgacggtacggagatggtggcgatcctcatcagccggaagacatctctgtctgtaggacagactatcctgtgttttaacatcgtgatttactgtgtagccgggttcctgttcggatgggatcggacgatgtacagtctgatggcgtattttatcacgtcgaggctcatcgatatggtggagacgggattcagtaaggcaaaatccgtcatgattatcacagatgacggaaagcgcatggccgatgagatctatgttcgtctgggccggacggtaacgacgctggagggagaaggtctgatcagcggaaagaaagcggttctttactgcgttattacacagctggaactgatcgaactgaaaaagatcgtaagagatgcggatcagtccgcttttgtgactgtatcggatgtctccgaaatcgtcggaaaacatataaaaaagaacgacatgctcacggaaaacggtgaaatcctcccggaggaagtgatttcgcaccaggtaccgccgaaggcggcagatgcggcggagatcacggcggacgagatggcggaaggtgcggcggaatcaaatggtgaagcagcgggggtgaaatagcacagagtccctatctttccgctttttgcaaagggcggactgcgtttttaatacagaaaaggaatacatatctatggttactgaattgatgaaagatatttaccgaatcgaggttcctctgccgaagaacccgatgaaattgctgaattcttatctcatccgcagcgacggcaggagtctggtgatcgacacgggatttaaccggccggaatgcaaagaggccctgatgtcgggcctgaaagagctgaatgtggatttcgaccgcacggatctgtttctgactcatcttcatgcggatcacagcggtctgcttttttccgtcaagacagagaagaaccgggcttttgcagaggagcgcgaggcaaaagtggtcaatatgcttcataaagacgaatattgggatcatatctatgaagaattccgaaaagccggcctgaagctgccgaaggaagaagcggtcgcgactcaccccggcgtcatgtggcggccggacggtgaaatcgattttacttacatcacagacggtcagacgatgacggtgggcgattacaatctgcggtgcattgttacatcggggcattctccgggtcatacctgtctgtatgacgaagaacgggaaattctctttgctggcgatatgattttgggcgatatcacgccgaatctgtgctatgaattatatctggacgatcctcttaccgactatgtaaatagcctcaggcttttggagaaacttccgatcaaaacgatctttgtcggtcacagaaatatgctgcaggacatctacggcaggatcgacagtctgaaagtccatcatacaaagcggtgcgctgaagctctgcacacgctgaaaaattacggaccgatggattcctgggatgcggcagctaatatgacatggaagatcgatgcgaaaaactgggaggggtttcctccttcgcagaagtggttcgctacaggggaagcggacgcgcatatggtttttctctatcataacggcaaagtcagaatgcattatgatgacgacggtgtaaagatttatgagtacgtcgacgacgatatcgacggactgatttaatataggcagaggctttccggtttcagtgaaagagagcttctctcgctgaaaacggggatggagatgtctttcgacgctctgcgaaaaccgttctcacccaaatcgcgataacttaccggaccccgcttcgatttctggggcggcggtccgcagagggaaggctatgttcggatatgttacgataaacaaaccggagatcagatttaaagattatgatatgtaccgttcctattactgcggtctgtgccgcagtttaaatagcgggtacggtttttcggcaaggatgacgctga

SEQ ID NO: 696 - DNA, 8604 bp, Unknown
  16S sequences of unknown bacteria
gcgcgcccagagcgttgtacacgccgcggcacagcatctgaaaatcgccgctcaccagcccgctcgcgcacgtttcggcgtcgtttcgcttttcgtcgggcgcctcgtcgtattttttataacacgcggcggtgtccacgccgcttttcggcagcaggagcagcagatgatagcgctctttggcgggaatgggaaagacgcgctcgccccgtcccgcaacgcgcgcaaagccgccgccgagcatatagcccgtatcgctgcccagcgcgtccgcaaggcctttgagcgccgcccggtcggtcaccttatacagcgccgccatggcgtttaaaacgccagcggcgtccgcagaagagcccccgagccccgcgcccatgggaatatccttgtatatctcgatatccgcgccctttgtggaaaaagcggaaacgaacgcttcgcccgccctgaccgcgttgttgcgttcgggcaggatattttcgctgcccagcccgtgcatatacacgttgacgagtctgtcgccgcgcggcttgacgcacaccgtatcgtaaatatcgatactcgccagcacgctgtctatgaggtgatagccgcccgccgcgcccgtgacgttgagcgacaggttgactttcgcgtaacttttcacttttttcgcaaacacgatgggaggcgcctccgttttttcatctcattatagcattttttacacacgctgtaaacaacgtatggtgaaatttcgcaaaaattccataaaaaagccgccccgcgcaactttttacgcggggcggcacgatattcacttttacgaagatttgcggcggtagatgacgatgcgctcgtcgccgcagagcgggtattcaagttccgcgttgcagcggctcacctcttcaggcggttttttcagtttttttgatacttcccaaagcccgtcgccgctttcgggaatgtacacgctgatggcgcattcgttctcgggaatgtccgcgccgccctcgatgccgcacacgtaagagtaagaacggggcgaatagacgcgcacaaacattttcagagtgccctcggcttccagttccccttcctttttctgccgcgcgtacacgccgcacacgatgccgtcgatgcgcacgcggtcgccgcgtttcgccttgtcgcaggagacggggaatgcgaagggaaggctgatctgtacgcttgcaggcagcccctcgccgtcggtaaagagcaccgtggcggacaaaacgccctcggcggtgatctgcccgtcttccgcggtcacgcccgtgatttccagattctgcgcggtcaccgcctgcatattacaggtgaaatcgatcttgcccatgagcgccgcagtgcccgacacccgttcggtggcgagaaacgccgcggtctgttcgtcgtaactcatgctcgcgcgttcgacggcgcattcgcaggaagggctgaacgcgtcctcgcacagcggaagttgctgggtaagatatactttgccgccgatctccaacgcgatctcggcgacgatggcgcatttgtttttgtcctcgtcgcagttggcggaaatattgaccgagcgcacgcatacggaggcgtcgcagccgtcgtgcgattccgcctcgtcgcaggagatctccgttcggaacggaatgagccgctcgtaggaaacgagttccttttcccccgcgcgctttgccagaatgcccagttcgatctcgcccgccacgtcgatcgtaccgttcccgcacacggcgcgcgtcacgtaggcgctctccgaatgggagagtatgtcgcccacgtaatcggtttcgaattcctcctccacttcggcgttttcggaaaacacggcgatgcggcgcacgggcgtatccgccgtcttgacgacgatgccgtcgccgcccgacaggcagttgatgcgcgtggataagaccaactgcgccgaagcggacacgatcgcggagagaatgaccgcctttccgtccaggcgcacttccaccttttccactttgagccgcacttccgcactgagggcgggggcggcctcttccgctacgcacttatgggaaaactccgccgcgcgctccgcgcccgcgatcgcgccctccggcgttgccgcgagtacggaaaaatatattttgccgccgtagcggatctcgcccgacacgacttccgcgcccgtgagggcgacagaggcgttgacggcgaggatcttgttttccgaccagtcgtttaatctgcattccacgatcgactgcgtcgtcagccttttccccgcggaattgatatcgtattgttcgtaacgtgccgaaatagccattttcttcactcctcaattttatgtcattgctattctatgaggcaaaaacacgggttatgcgccgcgcaaaagaaaaattttgtcggcttttgtccgatgcgcataaaaagcgcggcaaagggaaataattcggtcatgattaagccgacacagaacttacaagcgattaaagacaacatccgctccttttacgatacggacgtggacgtgcgcgtcaacctcgggcgcaataagatcgtacaatttacgggcaggctctcgggcgtgtatcccgcgctgttcaccgtggcgccccacgataaaaattacagaggcaagacagcctattcctattcggagatcctctgcggcagcgtacggatcaaaccgcaccattaaagaaaaaacaccgccgtgcttctcgcacggcggtgttttatttatttaaaaatcgtcctcttcgtcggactcatcgtcatcgtcgtcgaaatcgtccagatcgtcgtcggaaaaatccagatcgtcgaaatcgtcggcgatctcttcgggttccgtttctatctcctcgtcgtcgaaatcgtcctcgaattcggcggcaagttcgaccggcagacccaaaggctcttcttcgagcacgagatcctccgcatcgtcgtcgaggtaattgcgccactcatcgtcctcgtcgggctctaagatctcgtcttcctcatactcgctatttttcctgcattcgtcgcacatcttatcgctcaagcgcatataattcacgccgcagacggggcagagttccgtcttttcgagatcgtcgtcctcgtcgaggtcggcgaatttcaatttactgccctgcaattccgcgaggcagacgtcgcagtattcctgtttttccgagtcgatatagttgagttcgcatctcggacatttaatatattttaccatttgttttaacccccttgctgaaagtgaattcggttacagttacattgtatgtatttttctgcggttcgttacagtaaattccgccgcggattaactacgctgtattttagcaataaaaaatgaatttgtaaactgtttttttaatattttttcggtttttctgaaatttattcgcggaaattttttttgcatgaaaaaagacggctttcgccgtctttttcggttttttatcttctctttttgcgcacgatcacgatgggcactacgatcgccgccgccaatacgactactccgacgggcacccaaagcgcaacgtactgccacgttttccagcccgtgctctcgtcttcgtccgcttccttgacgagcagcgcggatttgagcgcttcgtcacgcgcgtccacgtcgtcctctttcataacgccgatacggttatagaagtacgtttccacgttgaacgctttgtcgccgtccttgagttcgtcggtcgcgtacacgcctttctcgcactttacgaattgttcgtatatgacgagcgcgtcttccttgtactcgtctttatagtcttcagtgtagatagtcgcgttgtcgcccgtataataatagtatttcgccgcgttggagatatcgctgaatttgacggcgatatcctcgaatacgtcgttcaccttttcgagtttatcgttgatctcttccagagccgcgttggtttcggggttcttgaacacgtacacatagttgtagccgtaggtagacgcgttggcgaagaacacgaaaccgctcacgatctcgggcttataccaggaagaattgtaatcgacgtcgagatactttgcgggtttgatgacgtcttcgcctgcaagcatggcgttgtagtcttcgggatcgccgttgtatatcacgcggttgagcgcgttgccgttcgtgcccgacgtggaataatacacgtagttgccgtcgcggtacaagagcgtcgcgcccgtcgcgttataggcgacgtagacggtctcctcggcaaaagcgttggaagaatcgcccactttgacacgcacgattgcattgtctttgacatacatataataatgagcgccctcttcgatatagaacatggaactcgcgcccgcggtcgtcgtgttggcggcaagttgcacgtttttgtcgctgtcgttgccttttacggcattccagtcggcagccttgacgtcgccgtccgcgatgtaatacagggcgccgccgtcgccgacggaacttcccgacgcggtcgcgtccgttctggtataatacaagcccccgttttcatactttataagcgaataggtatagcccttgtcggacgcgccgtcattcccatcgacgttgaacacggtgggcgtatcgagtttgccgatgccgtcgaacacgagcgtgccgagattgacgtactccatcacttcgccgctgtccttatcggtgtaatccgccgcaaggtcgatctcgtaagggcttttcgtcgtcgccgcgttgacggtgtagacctgcttgtacttttcctgattggtgcttccctttttgtagccgactttcttttcgacgggcatggtgtaatacacgttgggattggtcacgtcgctcgcatcgaatacgtaggattcgtaaccagccgccagtacggtattttcgttcgtggcggtgttataggaatgaatttccttttcgcccgaatccacgtacagacagtagacggtgccttccacttccacatagcggtatacggtggtgttgtcgctgatacggaaatagtagtcgcgcatggtcgaggagccgtcgagtttggagcgtttgaaatcgagataggaattttccaccttgccgtccttattcttggtggacgtaggcgtggcgtaatacacgtagtcgccgtaaatatacaggcccgaggtgtaatcctgcgaaaccatcaaaagcggcacgaccacgtcggtcttgtcgtaattacctgcggcgaggtcgctttccttgatgcgcatcaaagagcccttctgcaccttattgaaagtattatcggcggtgtattcttcgctgccgttgataaagtagatccattcgcccttctggacgacaaatccgccgttggacgtgacttctcccgaagaggaatagccgtcgagcggtttagaagaaaagtcgccgccgcaacccgcgaacacggcgagaaccatgacgagggcgagaaatacgatcgcgaactttttgacgcttttacgcataaaagtctgactcctttgatgatgagtattttcgtttatccgaacaatatacttttctattatataccaaaacggtgttttaatcaattaaaaaatattaaatttgcgtgaaaaatttcacggaggagcaaaaaaaggtggaaaaattcggaatcttcaatattttatccgcgttgggcaatcttgcggaagaaaaaggcgaaacggcgaaaaaagaagaggaaagcgcgcccgccccgcccgcaccagcgcccgccgaacgcgcgggcatttttaccggcgaggaacgcatgaacaagatgctcagcgtgctggaacgccacgatatgatctcgcggcgcatcgacagccgcaagccgccgagataaagaataccgattgcgcaaacaatcggtattcggatactgcgatatgaatttcggctgttatctcttggagaactgaggcgctcttctcgcctttttcaagccgtacttctttctttcttttgcgcgggggtctctggtaaggaagccctcttttttcagcgcggggcgaagttcgggctgcgcctggatgagcgcgcgggaaatgccgtggcggatggcgcccgcctttcccgtaaagccgccgccgcacacgttgacgacgatgtcgtacgcgctctcggtggaggtcagaacgatgggctgcttgacgatatactgcaaggtgccctgcgggaaataatcttccaaacttctgtcgttgatgacgatattaccgctgcctgcgggaatgaggcggacgcgtgcgatagctttttttcttctgcccgttccccagaactgcaatttcttttttaaattcgcttttgccatgctacctttacctcactaaaataatttaagttcttcgggtttctgcgcttcgtggttgtgttccgcatttttgtacacccgcagttttttgagcatttttctgcccagagagtttttgggaagcatacccttgaccgcttcgtacacggctaaatcgctcttttccgccatcattttgcggtaagggatctctttcaagccgccgatgtagcccgtatgatatctgtaaaatttgtcgtccagttttttacctgtgagaacagccttgtcgctgttgatgacgatgacgaaatcgccgcaatccacgtggggagtaaaagtaggtttgtttttgccgcgaagaattgccgcgactttggaagcaagacggcccaaaggcacgcccgccgcgtccacaacataccattttctctctaccgtttgggcattggccatgtaggttttcattatgttgttctccttaatttgtgtatattttgcgttataaatctttacatacccgaaaggttccggcgctttgaaagcgccccgcggttccggctcaaaaaactgcggtgcgaatcccgttcgccgtttgctacccataaattttagcctatatacaaaatactgtcaagcggttttgatcgggaaaacctctttttttttaaaaaaattataaatattttttccgtcacgagagcgtttcgctcgcgatcctgggcccgttctcgcaatcgtagacgagcggccgcccgcctttgagcaccacgagtcttgccccgaactttttgagaacgggcgcgagcagacggaatttttcgtacaggctgtgcccgtccagcatcaaaaattccagactgaacccggacgtgtaataggtcgcgcccgtagaagccgccgaaacggagtttttctttttgcctcccgacatataatgcgcgagcgtagccatgactttttccgcgttttccgtatcgttgtcgaagtccagcccgccgacgtacagatagccgaacgtaaagccgtattcctcgtgcaaaagcgactgttcgccgctcagcgagggtatggagatcgagggcgccgcggtcgtgaaatactgcgtatcgccgcggaaaggaagatccttccccggcgcgttctgcccgtccatgcgcgcgatcgggcgatagagcgattcggggtactgttctttgatttcatccgtcacgcggctttcgaacatacggcagaccgcttccgcactgatgagcggctcgcccttttccgcgtcgccgcgctcgttggtaaagaacagcatcagatcctcgcccatctgctcgcacaggtacaggtacgccgcttccttatacatccaggcgcgctttttcgaataccgttcgggcgcggcgaaatgcaggcggaaccagccgtcctcttccttgacggaaaagagaggcggcgtttttttcatgtcgaaccccgtttcttttttattgtatgtaaagacgccctttttgagatagggatagaattcccacgtatcggggatgtcgtcggttctgcattgcagcaccgcgtccaccatcacgctgtacacgtcctcgcgcgcgcccacaaagcacaccgtgtacacgtccccctttttaaatagaaacgaatcgctgatgaccgcgcccgccttgatcgtttcgaacagttttttcgccgccttgacctttcccttatcgagcagtttttcaagtttcccgcgcgccgccgcgaacttttcccaaaaaaacgccgcgcgggcgaaatagggaaactccccgtcgatggaatggcggtagcatacgttgtcgtaggagatctcgtcgtaatgcgtggaaatatcctcgtcgccgtcgtccgtataataatggcaggacgggcacgttttggcgatattttcgcgcagtttcgcatcgtattccttttgcggaagcacgaagagcgtcgcgtcgaaggcgagcgaataatcgctcaccgagatggtttctatcctttcgctctcgcccgtgacgtagggcgccatgcacgttttctgctcgtaacgcaccgtttcgaacgcgcggtgaccgtatttttcttccagttcggcaacgctcgaaacgtcgtcgggcagcagataatattcgaattcgtaaaacagccctttcttttcaatcatatctctctcctgataccaacggtttttttcgtattttctctattatatcctaccccgccccgtttgtcgagcgtttttataaaaagagccgcgcggcgatcgccgcgcggctgtattataaattatttcaatctcgctttc

SEQ ID NO: 697 - DNA, 31906 bp, Unknown
  16S sequences of unknown bacteria
caagaagcgcacgtgtctgatgtgtctgctgagaagaaggacgattttcataggctgcttgatgataatgctgctcttatggagcagttaagggaaaagtaccgaaaaggagaaaacgatgccgggtagttacgaaagcgccgatatactttgtccttttttcaggtatacggacaaggtcggtaataagcgtaggattgtatgtgaagggttgtacgatggtggagctcttgcatggatcctcaaaaaagatgacttcaatttccatatcgaggaatattgcaagaagaactacagatattgcgaaatggcagatatgcttaaaaaggcgatggaggacgaataatgggcaaaaataaatttaacgccaagaggatttacatagacggtgagacctttgacagcaggaaagagtataacaggtactgtgaactgaagctgcttgagagaacaggtgaaataagcaatctggaaagacaggttgaatatgagcttataccggcccagtacgagagagtgtgggacaagcgcaagggtgaatacaaaaaaggcaagtgccttgaaaggaaatgctgttatattgcagacttcagatacaaggaaaagggcaaagtggttgtcgaggatgtcaaaggttacaggagcagcggcgcagcatggtccttgtactgcatcaaacgcaagcttatgctgcagctgtatggaataagagttgtggaggtgtaacaatgactgaatacgaaactatattacagctgaaaaatttaagagagcactgcagagtttttagtgctggcggagaaatcgtatggcagaaagatattgaagcactgggtaatgcaattaaaattcttgaaagacagcttgcagacggctgcagcggctgtacattcataaccacactggaatgggaaatgccatgctgcaagtgcaaaagaggcagcatggattactggagggcgagagaatgaaatacgaagatgtgatgaagcagaaaaagggcttcaggatagagagagttgatatggccaagggagaactgacgataatagtatcagatgactggatagacactgtctgctctgctgtagaaaggcagatatcgcagaaagtaaaagagtatgaggacaaatattatagttgtcccatttgtggcaatgtactaatgcataaatggcttaaatatcctgacgaactatgccctaaaagtgacggattaccctattgtttatcgtgcggtcaaagattagattggagtgatgataatgaataactacgaaaatcagaaaacagaaatagacgaaattcttgaaagaaatctttggtttggcgtcgaggaagaaacaaaaaaagttgcaccatgcccgcaaatgagctgatttgagtgtttgtttcacgacgaaagagacagctgtcattgtggtctacgatccatgaaatggctagtttcagaatataaagaacccgaaattgattggtctaaagtaccagttgatactcctatacttgtgtctgatgacggtacaaattgggtgcgtagacattttgcaaaagtaactaacacaggagcaatatgtgtttttagtgatggggcaacgagttggagtgctgatactacgaatcctataagacggtataagtatgcaaaattagcggaggtagaatgatgaaatataccttagaagtaattattactgttcttgaaattctcaaagaaaaagcagaaggcgtaggacaagttgcaatggtatatgaagaccttgaaaaaggcgacaacccgcctactgcaatttattataatggacaggcggaagcatttgaaacttgtataaaactgttaaaaggatgggcaggtgaagataaatgcgattaatatatgctgatagattaaaagaagtgttgaatagaaatttcagccatacaggtggggtagaagtaatgtgtcagataattgacaaacaacctacagcttacgacatagacaaggttgtgaaacaattagataaggcaagtgattgttacgaatgcaacgaacagggtagagaatgtgtgcgaatgatagatttgacagaagctgtagagatagtgagaggtgagcaaaaatgaaatcaatagaaacaaatgaatggtgcataagcaccgatggggagtatttctttgatgatggttataatagcaaagaggaagcgatagaaagcataaaagacaattacaggtatgacggtggatatatcggcagacttgttaatatagaatttgtcgaaaacgatatgtctcacatcgaaataactgatgtgttgaacgaagcgttatttgacgagataggtgaaaccatagaggattttgggttcactgctgaacaggataaagaaatttctcaaatagccgcaaaagctgttattgattatatcaataaaaacaatctacaaccacgctgttataaagttatcgacatagaatttattgagataggtgagcaggaatggaagtagtaattattaagcattttgtaaatgaagaattaaattgggaatgtggatattatctagttaacggaacaatcgtaattcaaaatggtgagcattggagagcaattccgcatatgtataatgagccgattatgaaatgtctatgtgacataacacaaaaaacaaaagacgcaattaaagaagcactagtaaaggcaggtgaacaggaatgaaatgcaataatacacattgcaaacattatgtgtctgcagaaaaatacatacttttcggttggatatgcttgacagatggtggctgcaagtacgcatattgcaagaagaacaagaaaaagggtaggtgagcaggaatgaatgaattaaagccttgcccgttctgtggaagtgatgatgttgaggtagtgcaattgatgcctgatagcagttttatgacagtgtgcagcaaatgcccagtaagtattggagctaaaacgaaagacgaagctataaacctatggaacaggagagcgggtaatgaagatgaacaagaaagaagcaatggacaagctgtacgagcataaaaatatgcttacgtatcagcagtacaggacattcagaggtcagatatgtgctggtgatatagagggtttctacaagggactgaaacggatactgacagaaaggaagaagaatggataagaagtgttcaacgtgtaaatacagaagcgatagaacaagccttaactattgtgattacataggacatacaggtcattccagaggttgtgcagctgatgcaaactgtgacaagtatgagccaaaacgaagaaaaagaaaagtgaaacaggaggaaaaaatatgacatttaaagaagcattggaaaaaatgaaacaggggtatacagttaaaagaccgcactgggcaggtttttggcatctggataccgaaaacgaggtgctcaatatgcacacaaaagagggaaaggtaatcgaaataagagaaactgacagacttttatacacgcttgaaaatattgccgcagatgactggattgtagcaactaatgtcaatacaccgatagctggaggcactgcattgtttgactttggagaagcaataaagcttgtaaagagaggactgaaactttcaaggaaaggctggaacggcaaaggtcagtacatatccatagcagtgggaatatcctatatagatttagatgacactgtgagaaattcagaacataaagatatgggaagtagagcaatagtgtttaacggaacttcaggaactcaagttggctggcttgcatcacaggcagatatgcttgcagaggactggtatgtaattgattaggagaaacagatgaaaagggcaaagattaaaagaaaaaaggagtacatacctgacaagagccagcagagaaagataatggctgcatcgtatatggtgcttgctgaaacatttatctatatgcactgtgaatatggctggggaaaaaagagatgtaatgatattatcaatgcatactggaacacgatggtaagcgtacacgaaaccagcgtgagaaaggcgaagctcacaggaaaaggaatagagcctgcagatgttatgagaaatgctcagtatctggttgacgatgatttgtttaagctcccgataaaagcaaataatgcttatatacttgatgcagacagactggtgatgagctgtatgataatagccttaaacaaccttgctggatttggaaagaaaagaatgagcagatggcttgaagggtatgtggctatggtaaatgaggtgttcaatccaaagcaaagcagcactgtaagagatatagttaagtgggcagaagaactcactgggattaatgttacggtggcgcttgtgtgggaatagtgcaacttagcgtttgcttttttgttgaaaaacttgcaatatatcgtaaaatataataaaggggtaacattgaaaggagctgtttttatgaataaaaaacaaaaagacttatacaccggcttgcatttgatgagaatgaatctcatatcagaattagacaaggggacagtagttccacttaagtttatttatgacaaagtatatgagggtggattgagttcttatctagttaatgaatatgcgggatatgactggacagaatgtaatccagacctagatgattaccttgcaaaagaagcaccgttttatgattatagtgatattaaaaggaaattagggataggttctaatgggttatgttttctcttatcattatgtattgaagcgaaagaaggtgtaatatctgaattgccttctgatgatgagtgattagtatataatatgtattattaatactctactctatattattatatatattatataagccagttatattaatattaagcaggatatatgaagcaggtcttttgattaaggcctgttttttcgtgcgcaaaagtcgagggttagaaatcagcatatcaaatcccgtattataaaaagcaaaggagaagaacgtatgtcagatgttaattggaaagttgattggagcaaaataaaagctgaatatattacagggagtgatacttcctacaggaaactagctgagaaatatggcatacatgagtctgtaataaccaaaagagctgttgcggaaaaatggtatccggccaaaaagaaatacaatagcgaactggtggcgaaagcgataaaaaaatcacaaacgcaggaggttaacagattagcaaagcttcagacggctgcaagctcaatggctgatgtaatagataaggtgttcaaagatgctcagcagttcaatcgccacattgtcatgaataaatattttgatgaagatggcggaatgtctattgaaaacgaagaaaagatttttagcaaggtggacactagagctataaaggatctgactggagctataaaggacctcgctgcagttatgagggatatatacgacatacctacagcaggagaagtacaggcaagagagattgcagcggaaagacttgagcttgaaaagaaaaaggccagcaaagatgaacaggttgacagagatattcacgttgtcattcaaggatacgaaagcgagtggtccgagtgataactataaaaattcccgaaccaaatgaaaaacaaaaactgtttcttgctgcaaagacaaagcacgtggggttcggtggtgccagaggcggaggcaagagctggggaataagaaccaaagcaacgatgctgtcgctgaactataaaggaattaaggttcttattgtcaggcgtacatacaaggaactgtggaataaccatatagagccgcttaaagcaagtcttaaaggaattgccacatacaacaagacagacaaggtgtttacattccttaacggttcaatgattatattcggatactgcaataatgacggtgcccttgaccaatatcagggtgcagaatatgatgtgatatttcttgatgaggcaacgcagcttgatgagtcatggataaagaagatcacagcctgctgcagaggtgtcaacggatttcccaaaagaatatactacacctgcaatcccggaggcagaagtcatggatatattaaacggctgtttgtggacaggaagtatgagggtaacgagaagccagaggactacacgttcatacaaagccttgttactgacaacaaagcacttatggagtcagatccggactatgtggcaactcttgaaaatcttccgccaaagctcagggaagcgtggctttatggttcgtgggacattttcgagggacagttctttgaagatttcatagataatcctgagcattacgatgacaggagatggactcacgttataaatccgctgccgcttgaggcagtcagagctatgaagatatacaggtcatatgacttcggatatgccaagccgttttcctgcggctggtggggagtagacagagacggaactgtttacagaattgcagagctgtatggctgcaccaaagagcctaatgagggtgtaaagtgggacccgaacaagcagtttgctgaaatagcacgaattgagcgagaacacccatacctgaaaggacagcagataataggagttgctgacccgtctatatgggacgagtcaaggggcaagagtatttacaggtttgcggcagacaataagatatatttctcaaagggtgataatcagagaataccgggctggatgcagatgcattacaggtttgcatttgacggcgaggggtatccgatgatgtatgtgtttaatacctgcaaggcattcataagaacaattccgctgcagatatattccgaaacacatatcgaggatcttgatactgaccttgaggaccatgtggcagatgagacaaggtattttcttatggagcaccagattaagccgagaaccaagaataaagaaacaaagccggagtttgacccgcttgatttatataacgaacagaacaatagaatgtttaggaggtattaaatggctgctaagagcgatgaaaaaaacaaaggtataacgcctaaagaaaaaccattaaaacaacctgagggaaaagcagaagcctcagcgcctgcgccagaacctataggagcagaacagattaaaaggttttctgaaatactgcaaaggtacagagagggcaagacaaaccttgataacaaaatcgttgccaatgatgaatggttcagattgaggcagtggagacagatggaaagcagttctgacaaggagaagaatgctgcagagcctgcatcagcgtggctgtttaactgcataacctcaaagcatgcagatgcaatggactcattccctgagcctaatatattgccaagagagtcaggtgacagagaggaagctgcaaggttatcatcaatcgttcctgtagtgcttgagcaggcaggatttgaagaggcatatgataaggcgtggtacaagaagctgaaaggcggtacaggtgtatatggtgtgttctgggacagcagcaggcttaacggtttgggtgatgtgtcaatacaggcgatagatatattatcgctatactggaagccgggcatcgaagatatacaggagtcgccatatctgtttcatgtaaagcttatggataacgaagaaataaaggcagcatatccacaggtaggtgacaggctcggaaagcacgaagaacttgtcaagaaatatgtatatgatgacaatgtggatacaagcgatatgagtcaggtcgtagatgtgtactacaggaaaactgttggcacaaagaaagttctgcacttctgcaagtatgttgacgatatagttctgtacgcctcagagaatgacacagaagtacctacaaagcttgcagctgacccggagacaggagagcttatagaagttcctgcaggactgagcgttgcagaaaccggttggtatgaacatggaatgtatccgtttgtatttgatgcgtgcttcccttgtgagggtacacctgcaggcttttcgtttgtagacgtctgcagaagtccgcaggaatacatagacagacttgatcaggcagtgcttgagaacagcataatagcagcaagaccgagatacttttttagagaagatggacagataaacgagagcgagttctgcgacttcacaaaaacgatagttcatgtgcagggagttattgatgagtctacagcggtgcctattgcatacaaaccgttgccaggatatgttctcaacgtacttgacaacaaggtgaatgagctgaaagaaacatctcataacagagacgttaataatggcggttcagtatccggtgtaaccgctgccagtgctattgccgcaatgcaggaacagtcaggcaagcagtcaagagatatgattaagagctcatacaggtgtatgaaagatatctacacaatggttatcgagcttataaggcagttctacagcctgccgagacagttcagaatagtgggcaaacatggtgaggaacagttcataacctattccaaccagaagcttgtaagacagcagcttgatacaaagtatcctgacggcgaggatatgtacaggctgccggtattcgatgtagaagtcaatgctcagaaagagagcccttacaacaaaactgcatataacgagtttgctttagagctgtacgcaaagggtttctttaatccggaaatggcagatcaggcgcttgcagctttagatgttatggagtttaaagggaagaatgatgtgatgcagaagatacagcagaacggaacactgctgcagatggtacagcagctacagcagatagcacttcagctggctgtgcagtatggtgacccaatggctcagcagcttgcagccatgcagggtgttcagcttcctgcaacacagagtgttccgggcggaagttctggtatacaggcgaataatataggtgacgtgcagagaaaagaacacggaactgtacgaaaagcaagagcagaagcacaggcgacaactcagccgaggtaaaactttgattaatgttgttaaaactgaaactcctgaatcgataaacattaagataaccgggcacgcagggtatgcaaagataggatacgatataatctgtgcttctgtaagtatcctcttttataccctgcacttagcccttgcatcatcgggaagggaagtgcagtttaatgatgaagccggagagatttcggtaaaaagagatgaggaaatagataagattacggactatttctttcaaggttttgtaacactttcagagaactatccgcaaaacgttgcaatttcaactgtagtggagggttagaaaagtgtatgccgtttgtgtttatatataaatacaataaagtgtcgtgactataacacaggaggaacatatgaaaaagtatttattaaacctacaaagatttgcagaaggcggcagtgcagcaggatccgctgcaggagatgccggcggtgcagcaggtgtaggagcagctgataacggccaggtcgctgcaggcaatgatggacagcgggtcactgaaccatcgggaacagaagaaccacctaaaaaatccttcaaggaactgataaagggtgagtataaggacgagttcggaaaagagatagaggctgctatcaagagaagatttaaaaatgaatccaagaagtacgagaaaatgaaccctctgatggaagtgctgggtgaaaggtacggagtagatgttacggattttgatgccatagactttacggaccttgcctcaaagcttgtggaagatgaagcatacatcagagaagaagcaatgtcattgggcattgatgaaaatgtactgaggcagaccaagaagctcgaatttcagaacaatatgcttgaaaggcagagacaggaagccgagtatgaggctgcaagagccgagagtatggaaagacttgctgctgacattcaaagtacaacagccgtttatccggagtttgactttgatacagaaatggataaccctgattttgctaggctgattgaaaccggcagaattgacgtgagaacggcatacgaggttatccataaggatgaatttgcaagaactgcaatgcagtttgcagcaaacagagcagtgcaggatacggcaaaagcagtagcttccgggacaagacctgccgaaggcaaaggcggagctccttccgcagcaggaacattagacccttcaaaactgacatatgaacagtatgaagaaatcaaaagaagagcagcagcaggagaaaagataacattctagttttctcctgatgaataggaggaatttatgaagatattacgcacattaaatctgcagagatttgcagatccgaacactcagacaacattacttaatgcagttggtaatgacctgtcccctgaaatgaaaaccttttacaagactgcgctgataagaacggctaagcctaaccttgtgcatacgcagtttggtttaaagagacctattccaaaaggaaatggcaaaaaggttgagtggagaaagtggtcaaacttcaagaaggcgcttacaccattaacagaaggtgtaacaccggacggtaacactctcaatgtttcctacatcgaggcagaggttgctcagtacggtgactatactaccgtatctgacatactcgaattaactgcagtggaccctgtaatcgttgaagttacagaaaagcatggagataatgcaggacttacacttgataccattgcaagaaatgagcttattgcaggtactcaggtaagatatgctccaaaagtgtcaggcggaacagaaactgtaacagtttcgagataccagcttgataagaactgccttatgacaggaaagcttgtaagaaaggctgtaacagaccttaaagcagtaaatgcacctaagattaacggctcttatgtgtcaatcattcaccctcatgttgggtatgatatttcgggtgatactgaatgggtagaagcttcaagatatgcaggctcaactcagatatttgagggagaactcggtaagttccacagctgcagatttgtagagtcaacagaagctgcggtatttaagggcaaacctttaacatcgggagctgaaacgctgacagttaaaactgcggtagaagcatctaccggtactgctacatcagatgttgcagtaaatgaggcaattgcttcttcggacagaattgcatcagcatcatcgtctgttccagttaatgtagttattggtgatacgaagcttgttgtagtaggtgttactacaggcgcagcaggtgctgcaaagcttactgttaagcagccgcatggtgcaattgcagctaaagataagatttccgcaggagatgcagggaaggacaaccttgctgtatatgcaagcctgttcctcggtaaagatgcatacgcaacaatcgatattgagggcggcggtacagaagttatcgtaaaacctaaaggttcagccggaacagcagacccattaaaccagaggtcaactattggctggaaatcattgtttgcctgcaagagacttattgaggaatacattctcagagtagaaacctgctccgagtattcagatgaggttacagaggcaaactaatcaggaggtaaaccatggcagagaaaaagacaactaatgaagctgcagaagttgaggctaagaaagctgcagaagttgaagctgaagtagaggctaggttaaaagccaaacttaaagaagctgagatgaaagctgttgaagaaaccaatgaaaaacaggcggaggaaacaaagcctgtaaatcctatggatatcaaggaaagattatttatacctagaggaaggaaaggagaggaaaactttgtgcttattacactgaatggcaagcactatcagattaagaaaggcacagaggttgaagttcccagacctgtcgctgaaatctacagggaatcaatgagattaacagatatagccgaagactatatcgaagcaaaaactgacaaagatactaaagatactgatgagtagtgctcatatagagcagaacggggagcattatttgctccctttattattaggagaagcaaatgaagattaaagagatgatagatatggttgataagctgactccaaatgcctatgagactatagacaagattcagtggctcaaacatcttgacatgcagatttacgatgaagtgatatcaggttgtgaggggtacgagcaaatatcaatgggcgaatatgatgttgaacagtatgacgatacagagctgcttgctccggatatgttctctgacctgtacagatggtatctggaagcgcagataggtaaagccaatggtgaaacagcaagatataacaatgcgctgatactgtttcagagcaaatgggaggaatattgcaactggtatatacggcaccatatgccgattgccaagaaggtgaaactatggtaggaggtgaagcatatgctgtttccacagcttaatgaagtggcaacacagagaatgtactgtgaggaatttatgggatacaaccacaacctcagaatacaggacggacagttttatgatatgaagaacctgtcgtctgatgcatacccgttgcttaccacaaggaagaaacgtggcagtgtttttcaaatgacaaagccgcatggcattgttgcaaaagatgctctggcgtgggttgacggcacagacctttattacaacaatgaaaaaatagaaggcatagtacttacggacacagataaaatgatgataggtatgggcgcataccttgttatatggccggataagttctatataaacactgaggatcttacggagtatggttaccttgaaaacagctggagcaatgctgcaggtatatcagtaaccttttcaatatgcaggcctgacggtgaagcctacaatgttaagacaacaggcaagactgcacctgaaagtcctgaaaacggtgacatatggcttgatacatcgggaagtactcatgtgctcaaaatatatgcagccaattcatctatgtggtcacaggttgcaactgtttacacgaagataagtgcaaacggtataggacagggctttaaaacaggtgatggagtctatatagccggctgtgaggcaacaggggagcaggtttctgacgaactgaaaaagcaggtaaaggagcttaacggctcaaagctattgtttgataaaggcgacaactatattgttgtaatcgggctgcttgatcagacctacacacagacaactgttaatgcaggggaactcacagtaaaaaggagagtcccggcaatggattatatcacagaggcaggaaacaggctgtggggttgcaagtatggcgttgttgacggcaaggtagtaaatgaaatctactgctgcaagctgggcgatttcaagaactgggaatgttatcagggcgtatcaactgacagctatgccgcatctgtaggttctgacggtgtatggaccggagctattacacatatgggatatcctttgttcttcaaagaaaactgtgttcacaaggtatatccgtcaaatacaggagcgcatcagattgtggaaactcagctgcgcggtgtgcagaaaggcagcgcaaggtcactgacgattgtaaacgaagtggtttattacaaatcacctatagatgtatgtgcatatgacggctcactgccacagtccgtaagtgatgcttttggcagtattatgtattctgatgcagtcggaggtacgcttggagataagctttatatgactatgaagaatgctgcaggtgtttccgagatgtttgtattcgatacagaaaagggaatatggagcaaggaagatggcataaaggcttccgggtttgcaaagaacggtcaggacctgtactacatagatgctgatacaaagaagcttatgagcataacaggacagcagggaagtttggaagatgattttgagtggtttgctgaaacaggcaatatcggatactcatatccggataacaagtatataagcaggtttaatattcgtataaatcttgagacatttgctacggtgggagtttctattcagtatgactcagatggtatatggcagctcaagggcagaatgacaggcaagggcattaagacatttacacttcctgttcctccaaggcgctgtgatcatatgaaaatcaaacttgagggcaaaggcggtatgactttatattctattgcaaaaatacttgagataggaagtgatatcaaatgataaaggctgattatcccaacaggtttacggaactggatcaggtgaactcatatctgcatcagctggcagaaaaaatcaatctcaattttgccaacactaccgctgaggcgatatggagagatacggagaaagccttgtcagtgctgggcgataaggaagcaagcgcaaaagaaaaggccgatatactcgcaagctattcagcaatgaggtcattaatcataaagactgcggagtatacggttgaaaacagtgagaagataaagctttctatggccggagattatgttgcaaaatcagaatttggagattactttgagaaggcgactgtggatatagagggaacacctgtaggaataacgcagctttataggtatacatcaggcattacaggtgagttcggcgatattactgttagctcacacaatttcataaagaccggccttttatattacgatgagaattcattgcctgtgtacggcgttggagttggtgaacttgccacaaaggttgatgcaaatggtcagacagtgctcgacaggagcaatctgcttgcgacatacacagctgatgagattgcattctggcagaacgcggaaaaggttgcctatataaataacggcgcgctttatatgccggctgccaatatcacaggtggaactttgaatattaataacaagttcactgtggacctttcaggaaatatgaaagcggaaaatgcagatataacaggtaatgtaaagtgcactgtacttgattgcaccaatgctactgttaagggccttgtagtcggtgagaatattactatgggtgaaaatgcagttatcagctggaacaacataaacaataaacctgataatcttgctacaactgatgatatacccgacacatcaaactttataagaaaatatggaactacaattacagacactgcgatatggagtggaagtttaacagctaatgacctgacaattactggtgggagtgttgacattacgactagttcagatgctacgagcattatcaagcttagtggacctaaactttctacaacaatatctcctaatgctatgcaatcaattggtacaaacgaaagagctgcatttagtgccaatgcgttgttatttataaattcttcgactggccatactacaaatatttctgctggtgctataaccgttggtggtagtgctggtgctagtataaaggttaatggatcatctgttattaccacatcagatattagcagttatttatctgggtatgccctttctagtcatacgcattctcaatattatgagtctggcgataatatctatgcaagtaaactgtatgtatcaaacgcggggaatatttcgggagatcctaatgccagactggcagctacttcgccatatcagttgggttattcttcaggttcaagtatgtggtacaagcacgatattaaaccagtggaaaatgaggaattagatccgcaccatttgtatgatattaaggtatatcaatttaaatacaaagatgattatttaaacgaaaatgaccagcgatatggtatagactgcatagggtttatagctgaacaggtcaataatgtttatccgatagctgctgacagagaaacgggcaagccaaggaactgggaaatgagatatattattccgcctatgcttgcactcattcaagaacataaaaaagagatagatgcattgaaagaacgtattgatattttagaaagctgaggtgatgaaaagtgaaaaaatgtgaaggagaagctgttaaaggtatgccggttaaaccggttacgttaattatggacgaacttaaaggtaaagttgttaatgctattaataaaagcgggctggcaccggtattggttgaagccgctataaaagatgttttttccgaggtaagcagacaggcaatgcttcagagagcaagtgaggctgaggcataccttgctgcagttaaagaatttgaggagaaaggcaatgagcacagcgaaaaacaaaaacaagtcaaaaaataaacttaaaagtgatccgaatcctaaatacaaacttaaatccacaggattttcttcgagtggaaccggctcacagtcaaaaacaaagaaatggaaagatatctccgggatacctcatcaggtgacagcttcgttgagggaggcagccaagaatggctatcagcctacaaaagacaagaatgttgtttcagcaaaaggtgattatgataatcttgttgctaataagccgggagatttccagtctacatataaaggacagcttgatactatctacaaccagataatgaacaggcctgacttttcctatgatttaacatcagatccgatgtggcagcaatataaggaccagtatacggcattaggtaagcaggctatggctgatactatgggagcagctgcggggcttacagggggatatggtagcacctattctcagaatgtaggccagcaggcgtataacggatatcttacgcagcttaatgagatgatacccgagctttatggcatggctttaaacaagtatcagcttgagggggaccagctcaatactgcatttaatgcagcaaatactttgtatggcaacgaatatggtgagtacagagataaggtagcagactataacacagacagagaattcctgtatggagtatattctgaccagtacgacaaaggagaaactgctttcaacaacagatatagtatgctggcagatattgcagatacttataacaatgattattacaacaagaataatcttaaccttagcaagaaagctcagaaattagatgaagaccagttcaaatggaataaaaagatggataagctcaactataaccttgcattaaaaaaagcctctagctcgggtagtagcagaagtggtggctcgggcagaaggagaagcaaatccaccacatataaaggttccggagggactgctgacagtagtgagttcgcttcaataaagaaagcctgcaggtcatataaaagtaatgataagttatatgattatgtacagacacttattaaaagtggtaaggtttcagaagctaagggtaaagaattatatcatacatatgcaaccgccaataaaacaggcaaaggtacaggagataaaggcggatataacaagtatactcaggacacatatagatggaaataggagacgttatgggcgattttgttaagaactataaaaaaggtgagaagcagagaaaaaaatatgatgaatatctcaaaaacaatgaccgcaaaaagcttgatgaagaagctgcagctaaaggcagagaaaagaataaagcaagcagctcaaatgataagagacagcaggccagcaggaactatatgcgcaatgagaggaaaacagtcaaacatagtggtagttacggcaagttcggtaagggccagcagtcatttacaagtcgtagcggaagtcagagaaagaaaaagactgcttttgaaagagttaaggattactttactggcgattacatactgaaaaaagataaggacgagtggaaccgatttgattacataacaaatggcgccatgggtgagtggcttggaggcataatcagagctggcgaatatcttggagacgtgacagggcttacaaaagaaaagaatcctcagaaaagaaaaggctctcagcttctgagagaggggagcgagtatatagatacggccaaaaaaggaacaggtaagcttggaaaggtaggaatagatattgcatcgcagggcgtaatgatgggtcttgacagagctgtgacattaggcagaggcagactctcactcctgcctatgggcgttagagcatttggaagttctgtagaacaggctgcaaattcaggcgctgatcttaaacagcagggactctatggtggcttatctgcaggtgtggaaataggaacagaaggattgttctcaggaggttcaaagcttatttatggaggaaaaggtgcactggacagagtgtctgaaacaaccgcaaagaagataactgatgcagcaaaacgttttgtcaaaactgataaaggacaaaatgtgctttatcatgcagttaaagctggccttgctgccaatgaagaaggttttgaagaagtcatagctgatgcagttaatcctattatacagcgaatttcatatgatgataaagctctgaaacagtacggcaatccgcagtattggaaagattctgcgtatgattatgttattggtgcagccttaggcggaattatgggtagcggaggacaggctatagaatacagagctggacgtaatatgagccgtcagcagcaggaagcagaaattaataaaggccttaaatctgatgagtcaagtgaatcttacagctatgcaaatcagcttctgaatcagtcccagaggggcgaaaacatactcccggggcaattctatgaccttgtcaagaaaaacgccgcagcggataacagagcagcgaaacagtataatgatatatacagaaatgcgctcgataatgaaacattcagaaaagcacaggaaggttttgatgaggaagatgttgagagagctaaaggaattgcagcaggcagagaaagcaatgcggcacagcaggcgaaagctgtacttcttaaacagggggtggaagaaactcaggcagatgagtatgcgcagtctataggaaggattgttgctggaacagcaaactatactgatacagaagtttttcagggtaatgatgcagcaaaggacgcttttaaaaatgtaacaggttttgcacttcctgcagacaacgaaagtacaagaaaacagattactcagtatgctgcaaatgcgacatataatatggctgtgaatatgagagctgatattgagagtgaaattgcagctgagaatggtggcagtttcagagccagtgacggaactatagtagaaactcctgtgatgattacatctcctgcagatgttgctacattcagaaagagcgtcagaaaatatactggtgaagtcgctgagaaacttgctgcagactacacaggaactgtatctgcaggcagctatacggctgcttttaatgctttctatgatgcaggtaaaatagcgtatagcaatcctaaaagattcaattttacttgggcaaacaagataaacagcgcatggaaagagtatctgactgccaatgctgcaagagatgcataccttgcaggaattaaagctgcaagaataacggaagaaaaaagagttgctgccaaaactgatattgcaaagaaaggcgaaagcaaggcagaggacaagagtaataagttatccgaaacacaaaagaatatggcaaaggcgctggctgaaaagacagggcttgatgttactattgcagaaaagctgcatagggttgtggacggagcaaatgtacagcttaacggtgcgattaatgtagcaatgggaacgctggagctttcacttgacagtgataatctgggacaggcgctggcacatgaactcacacactatacctatgcactcaataaagagggcgcaaaggagcttagagatgcggttctttcgtggtatgcggaagaaaaaggtatgatgtccctatcagagcttcttgaaagcaagaagcagagatatggtgatgaggttacggcagaggaagaatttattgccgatgctcttgcaggattgttttcaaatgacaagggcgcagaaagctttgctcagtggcttactgataaatcaggctacagcatagagcagcagaagtctgtcctgcagaagcttattgatgtaattgacagcataattgcaaatatcaaagctatgtttacaggaaatgacctgtccaaggtatcaaaagatatgaggcagcttgcaaagcagaaccagcagagggccgagagcgtaagaaagatatacatagatgcgttaaacaaggcttcagaaacctatgcaagtgccgagacaggagcaaacgcgaacgaaagcagtgtgaaatattctaaaaaaggtgaggatagttctattaagaagcaattgcgggcgaatatggaaaaactcaaggatatgaaacctgttgcggatgtggaatatgaaagcataaagaacttgaaccgctctgaaaaagccaaggtcataatgaatgactacaacaaaaaatttaaggacggtatcgatagacaggactttggacatataattttgcgagaagatgaagttacgggaagtttaaagtatttgtacacagacggtgaatttgcagcattcaaagcgctacctcaagtactgaagcgaggtagggtaatagatgaacatattgaccataaaaaaagaaagattgacacagttacaatagcagctcccgttgtgataaatggtacgagtggctatatggcagcagttgtaaaggtaggtggtaaaaacagatatcacgttcacagaatacttatgccggatggttctgaatttgaattcaataaaaaaacagaacctaccggtgctggcatgactacctcgaaaggcagacaggggtcagccatcagtcctgtttctaataaaagcatatcagaaacagacaaaaaaagcaatgagaaatactcaataaaagaagattccaacgacaatagcttatccgagagacagcgggaatatttcaaggacagcaaagtcagagataaagatggcaagcttatggttttatatcatcagaccggaaacgactttacagtatttgatacaaaacacgaaggcgcaggctctggagatagtggaacgccgtatggtatcttcctgaaaccgactgaaaatgatattggtttatcgggaaataagcagatgcctttgtatgctaacattacaaatcctcttattgctgcagatagaggcgaatttgacaggatgctgagcgaaagtgctgagtacaaacaggtaagtgatgagtacaggaaattagacattgactataagaagaaatttgaagatgccaaagctgctttaacagagtatatcacagaatataggagaaagaatcctaatgcgagcagaagtgatatatataacgatccaaagtttgaggaagtctgggaggccgaggataaaataatagaggcatggacagctgaagctgatgcattgtcggcaaaaagcaaggagattataactaactaccttgaggcaaaaggatatgatggagttattctggaagaagataaaggcagtttcggaagaaaaacaaaagcatatattgcactgcattctgagcaggttaaaaatgtagataatgcgaaccctacaataaataaagatatcagatactctattaaagagtatacagatgaagagaaaaagcaacatatcaaagatgcaagcgagtatttcgggtatacacgcaaatggtcggaaacaggatatgttactgccaatggtaaacagcttgatttctcaggcagacatgaaggcggaccgggaggctctcgatatgtggatcatagagatattagagatgcattgagtgaggactatggtggagaagattacagtggcagtatggttcagtttatgtctgagggtaatatacgcattagtcctgaaatcaatggaataaatatgtctgtaatgcctactaaggcacaaaaggagatattatctgattatataagcaagcagcatggtgaggtggtgctggatttagacactactgacggtaaaactgtttccagcacaaagtatccgaaaggaactcattccaataaagtcttagcggatattactgcatattttgaggaaggtaaaaatcctcacgtctccgaactctctaatttccgttattcctttaaggttgataataaaggaaatgtattgtcagaagaacagcaggaatactttaaaaatagtaaggtaagggacgaaaagggcaggcttatagcagtataccatggtacaccttcagcaggatttactgtctttaataagaatcagaattactattccgacagcaaagaactggctggaacatacacaaacaatgatggtatgtatgaggggtatcttaatataaccaatccacttattatagatgcacataatgaaaagttctccggaatacccattaattatattgaggttgacaatcttgatgagcttatggagatatcaggattatctccatttgaagaagatggaatgatgagaacttcaacagctgatatagtttctatggcagaagatgcggttgatgaaggtattgcagactatgatggtgtaatatttaaaaatgtatatgacgaaggcggttatggaaatgcagaagtaggaactataaagtcaaatgtttatgttacatttgagtctaatcagtttaaaaatatagacaatacaagtcctactacggataaggacattaggttctccatcaaggaaactgaccgcagcactcagaaactactcagagagaacaagaaatataaacagcttgttgcagacctgaaacaacagatgaggctgtcaaagggtcgtataccggataaaggcgagattaataagtatgtgaacagactgcgtgcagaatacagctcaaaggttgataaggagcagctgataaacgcgctcacaaacctgtatggctatatggcagagaaagatgccaaagcggatcaggtatgggatgttgcgagaagcattgccaccgatatcataacaaacagtacatacaataaggaaatatccgattatgctaagggaattctaaaagatataaagagtagcaaggttgcattgtctgaaacacaaaagcaagaagtagcatatgtgtatggttcatatactgaatacaaaagaataaataaaggagtgaatacatctgataacggaatataccttgatgaaaaatggcaggaatgggcagaagtttatccggaactgtttgatgctgaactcactgagccggagcagggtgtaaggcttgcggaaatcacaaaggcgttgagtgaggactatgttaatgagtttggctttgaccttactgatgcaacagatatgcttgcggccgaaatagccaatgaagttgcacagacaaatgaaatggttacctttgcagacaagaaaaaacagcagcaggcagaaaagatagctaaggaaaaagcaaagaataaggaaaagataaatgctatcaagcggcagtataaagaaaaatatcagcagggaatggcagagcagaggaaaaaacacaatcagaagctgacagctcagagagacaaagcaaaagagcagcttgcaaggcagaaagcgaaatatgaacagcgtgctgcagacaccagagcaagaactgacaggcgaggcgttaaaatgcagattgaaaaagatgttaaatatcttacaggtatgcttttatcccctacagatatgaagcatataccggaaggctatcagtcagctatagctaggatgcttgcaggatttgatttttcgactacaagaacagacgcatggacgaaaaagtatgggcatatgtcaagaagaatgcttaatttcgcaaacttaaatgcagagcttctgaaaattgctgaaagcggtgagagcgatatagttgtagacagctttataacagaccttgccgaaaagctgtcaaaggatcttgatggcaggagacttgacagtctgaccaatggcgagctgcaggacgtgaaaacgctactcaaggctgtaagatacggcataggaaacattaatcgaacattctctgataatataaggcagaccagagcagaggctgcggataacataatctcagaaactatgcagataaaggataaaaagcacagaagcgaattctttaaaatgtttgacgatttccttaacagttccaatgttaaacctgttgacttctttgaagttatgggaggaacggcaaaggaagtgtttggatctgtagttgacggatttgacaagcatattcgcaatgttgatacggctatggaatacattcagggcgtggctgccaagaaaacactgaatcggctatctaatgataaaatgaaacctgcaaagtttaagctggaatcaaaagaaactgtggaactgctgccgtctcaagtaatgagcttgtattgtctcatgaaacgtccggaggccgttgaacatattacaaagggaggaattgtgcctacaagccttaaatacaaaaagaagtttaagacacaaggcattatagatgataaaagaaaacaaattacttataccgatgcagccagaataataaatagcttaacagaggaagaaaagaatattgcagataaattgcagaagtttatggccgaagattgtgctgcgtggggtaatgaaacctcaatgaagatacatggttataagaaatttgaagatcctaattacttccctatgaaatctgataaagatttccttgagagtagacagaccgataaggctgaacttatgccaaaactatggactgccggctttacaaaagctttaactccgggagcaaacaatcctattatgctcgatgacatatttaatgttgtgactagacatataacagaaatgagtatgtataatgcgctggcaccggcactgctggattttgagagaatatataactacaagcagcgaggcggagacaaaacgtactataatggaaccacagtcaaggaacagataagacgtgcttatggtgataaagcaacaaactacatcaacaagcttatgagagaccttaacaacgcaaataagcgtgaagacaaagtggatgcaaagattcccaataggctgcttgcgaattacaagaaggctaaaataggatttaacttcagagttttcgttcagcagcctacagccattgtaaggtcggcaatgatgattaatcctaagtatctgatagcagcacagggcaagcctgctataaaggaaatgcaggaacattgcccaattgccaaatggaaagggtggggtttttatcagacggatgttgcgccgtcaatgaaggagattctcctcggacaggaaagtaagcttgacaagctgtttatgaacgcatacggaaaagctgatgattttacttggtcatatatttggaaagctgttaaaaaggaagttgagaaaaacaatccggacatcgagtccggatcgcaggagttctgggataaatgcaatgaaagagcgagagatatattctatagaacacaggttgtagacagtatgttatcaaggtctcagataatgaggaacgatgatactcttatgaagatgatgacatcattcatggctgagccaacaacaacattcaatatgatgcgtactgaaaccatcaagacagcaaaagagtggtcatcaggagataaaaaggctgcaacaaaaagaatggctacattgattcctgtgtttataactaatgctgtgggggtatcggccgctgctgctattgcagactatttaagagatgcttataccggtgacgatgacgatgaagataaaaaccttacgccgcttcagaagtatctgaagtatacagcacttaatatacttgataatgctaatccgcttaatatgctaccttttacaagggacatatactcactgttttcaggatatgatgttgccagaatggatatggcagcatttgcaacaatatataaagatgttgaaaggttgcagaaaacctatgagcagggtgaagatgccaagtatacatatgaatactgcataagacagcttgcacttcactctggtgagatatttggaataccggccgcaaatattgtgagggaaattgaaactacaatcaaagctgcatttcctgaggaaggtaaggctcttattgataagtttatgtatgctgatcctgatgatgttaacaggaaaagcaattatgcggcgttgctttctgaggataaggataaatcccaaagcgctcttgaggcaatagaaagagatgctgaaagcagatatcagaagtatattgacgagggcaagtctgaaagtcaggcaatgagcgcagtaagaagcagcctatcaaactactataaaggtgcttatcaggtggcggataccagtgaaagaagtacgataacaagcagaatatctcagataagtgttaatggcagaagcgtatgggaatatgcggatggaaccataaaagatttttctgaatgggatgaaactgaataagtatggtaagtcgagggttagaaagtcctcggcttattgttttattattagaaaaaagagaaaggaggcatgagtatgaagctaatgaccagaggcgatgcgggatatatctcgctgaaaatcaaatcggttgtgatggcagatgtcaaagctatagagtttacgattcataacatcagtaagatgtatcgctctgacggaagtggagaagtcacttatgacagcgataatggagtttttaactttccggttactcaggcagagagtcttgcttttcccgatacgaatgtggggatacaggcaagggtaatgtttgttgatgattttaaagtacaaggaacagacactaagcaggtaaacataggtgaggttttaagcgaggtgattattaaatgagcattgaaatggaaattgttacacctgtagaactggagatgaaagaagtttctatgagaggaccacaaggcccgaaaggtgatattggtcccaaaggtgatacaggccctgcaggaccgactggtcctaagggcgataccggggcaaaaggcgacaagggagataaaggtgataccggagtgcagggtgacaaaggtgaacaaggagataaaggagacactggagtaggtattgcctcgataacgcttaaaaacaccgatgaagcaggtaataatatatacctaataactcttacaaatgagaaaacctatacctttacagctaatagaggccctcaaggtgaaaaaggtaaccaaggcgacaaaggtgataaaggggataagggagacaaaggtgaacaaggcaatactggctctaaaggtgaacaaggagatcagggtgtgcagggagtgcctggcaatgatggtgttgggataaccagtgttgtctataaggaagaaagagcgaatggagataaagtttatacaataaatctttctgacggcaccacctatgatttggtagtccctaaaggagtaaagggcgacaaaggtgatccatttacatatgatgacctgacaacggaacaaatacaagagttggcaaaggatatatctagttttgtaggtattccgacaaagctgtctgaattggagaatgatgagggatttttaaaagagcatcaaagtcttgcaggatatgctaaatctgatgatttatctgctgttgctaaatcgggaagttataacgacctcacaaacaaaccaactattcctagtactgctgaagatgtaggtgcattatcatctgattacaaacctacattttatgttaatgcaacggtaaatgcgtctgatacaaccactacgcttgataaaaccccagagcaaatttatgccgcctataatgagggtaaagatgtgtattgcatagttaatgcaggagcgcatttaattctgccattagttattgcgactggttttacagggggagatttgatgtttaaatcatctttctcacagggaataagtaatagccccgttgattttcaacagattacgttagaacttctttttagttcatcaacaaaaagcgcctggaagataacacgaaccactttaccaactaagacaagtcaacttaataatgacagtggatttcttacgtcagcacctgatgagatttttattgcaactttcggcactacgaccaatgccgaaatagaagcggcgtatcaaactggaaaagttgtgtattgtaaagtggacggtgcatcacaatattttattccgcttataggaagaggtggtgaggattatcatgtatttacttgggcagacccgaacactcttaccagacagaacggaataattacttgtattaacaataagtggagtattagatatattacaattcctgcaataaaggtcatcactgcaactctaaccatagatggttgggaggcagacggtgatgggtttaagcagatagtggctgtaagcaatatccctacaagtgggtatgtctacacagcctatcccgattcgtcacagtataaagtatggaccgaagcaggaatatacgcagatgatgttgcaacagctaacagcattacattccattgcacaaccaaaccaacggtggcagttgtagttaacatcaagaaagagcaggtgacataatgggaaatgtaatcaatatgataggcggcggaaagcctgaggaagaaaagacggtttactgggaaggcgagcctttagtaataactccatctcctgggaaaacaatgaaaagggttactgttaaaaagccagtgttaataagcatagccataacaacaaatccaacaaagatgtcatatgaaataggtgatagctttgaccctgcaggaatggttgttaaggcgacatatgaccatggagcagtaaaacaggtatacggttatacttattctccgaaaacatttacatcagaaggaaatcagattgtaacaatatcatatacagaaaacggagtgaccaaaaccgcaacggtcactgtgggcgtaccggttaaaattgtaccgttcgcaagtggcacttggggacagatacacgatatggtacaggcagctattagtggcaaacttatactgtctaactactgggctgtaggtgatattaaagatgtgactttgaccactggcgaaattattcagttacaaattgcaggttttaaccacgatacatattcagacggcgtaactgctccaattacacttgtgatgaagaattgtttaaacacaatctctaaaatgaacagtagcagtattaacacaggtggctatcctgcgtcagcaatgaaaacatatgtagaaactaatatctacaataaactgcctagtgatttgaaggctatagtagcacctgttaaaaagaaatgctatacgacatacaatcaagcaggctcacttagcgaagcaagctataacgtatggctattagcagaagcagaagtacttgatagtgtttcttacacaataggtaatggcgagggtacaaagtatccgatatttacagataacgctagtagaattaagaaagtaaatgggtctgctgacggttggtggttgcgttcagcttattcgggcaattcgactcgctttgttttcgtcttttcggacggcagcgccagccacagctttgcggtggctggcgctggagtggcagtcggtttgtgtatccgttaggaaggagtgaatatgttttataaattaataaataacggaaggatattagatgtcctgaaaaatcctttatattgcagactgcagaaaaacggctgtttaataacctgcagtgaagcggaagcagacggagttatatcgtcagacggaaaatgggcatatcagacagcagatggaaacaaagacagatttattaccatagttgatatggttgagataacacaatcggaatatgaggaactgtcaaagatttatcctgacccagcgaatgtttcccctgttacagatgaaacttataacagtattattgacgattatacaaagcagttaatcggggaaggagttttataatgagtgtatttgttaaaagccttaagaggctctatggcgagaaatattttataacaatctgatatattgagttcttaaaggaaagcggaaaaataacacagtcggagtatgaatatattacaggagcggaggattaaaatgtgtaatgtaagaaaagtaatgctgtcacagcctatggcaggcagaacggaaaaagaaataagagaaacaagggaaagagccatagcaactcttaaggaaaaaggctatgagatagtgaacactctgtttactgatgaatggtattctgataatgctatggtcaaaaggggtgttgttcagataccgctatgtttccttgcaaagtccttagagaatatgagcttgtgtcatgtggcatatttctgtaaaggctgggaagaaacaagaggctgcaggatagaacacgaagctgcgaaagcctacgggcttgaagtgatatatgaggaataggtgatgagatgacaacagtagcagatataatcataacagttgcagcagtaatgggagcagtggttactatcttaggcgtaatatttgcagcatacagatggtatatgaagatggaacatataggctctgagataagccacattaaagacgaaaatgcagttttgtgcttcgcgctgtccgcttgtcttgatgggctggtacagcttggggcgaaccacaacgtaccggttgccaaagataagctggataaatatttgaataagcaggcgcataagtaatatgaggaggtacatataatatgaagatttcaaaagaaacaataatcagaagcattatgcttttaatcggagtaattaacacagtatgcgttttattgggttggaacccgctggagctcgatgagggcgttatctatgatgcagtatcagccgtatatatggtagtagtaacagcgtgggcatggtggaaaaataattcattcactcacgcagctatttctgcagatcgcgtaaaagaaacaatgaaaaacggcatatcacttgttgaagcaatagaggaaataaccgacagacgtgatccggaagataagcaggtgatgtaatggcgccaaagattaataagaagatatcaaactacaattatactgcctatcgcagcagggacatcaggtacatagtaatccactgggtaggtgcagtatctaccgcgaagaacaatgcggaatttttcgccagagcaaatagaaatgcttccgcccattactttgtagataaagatgagatttggcagtctgtgctggacaaaaacgcagcatgggctgtaggcggaggcccgttctctcaggggagcaaaggctcaaagtacggcaataagtgcagaaatgcaaacagcatatccatagagctatgttgcatcaaaaagaatggcagacttgtcgtagatccaaaggctataaaaaaggctgcagtactggtaaagtacctgcagaggaaatatgatatcccagacagccgggttatcagacactacgatataacaggcaaaggttgcccgggcggatatctgacggataagaaatggaaagaacttagaaataaacttacagattaattttcctttctaatttacaagagcactctctttgtttataataacattgagggtgctctgtgtaagataacaatgttgctatgtagctctaaaattaataacaaatagtgaaatgatggggataaaaatggctgcgacataccctgcgacacatacggttgaaaccgttgaaatcacattgtttctgctcggtttcctaaaccgtgcgtcggaggttcgaatcctctcgggagtgccaatctcaaaccgcttgaaaacattgatatttcagtgacttcagcggtttttgttttgcttgtaatttaccatttgctataaaattatatcactgaaaggtcgtttgagggcttttggggtgggacatctgcggtatatgcttaatgtcttattaattttttaagaaaatgcttgcagggtatttaaaaatcctgtttaaatacttataatatatatatat

SEQ ID NO: 698 - DNA, 5225 bp, Unknown
  16S sequences of unknown bacteria
tcgcttccttgcagtttccgcgcccgaaaatccgcaggattttagcggaaactggaggggggcgcacgaaggccgccgcctgtggcggaagcaggccgtagtaagcccaataagcaagggagttctgctttcatcggaggccgcgaagcggctgaagcctcgaggacacagagcgaagcgaagtccgcagaggcgaaacaccgggccgccgaagacggcacggtgcgaagatgcaggacgaccattgcgaattgaggatggcagtggcggggggcgcacgaagcgcgcgccctgtgggcgaagcagcgcgaagtaagcccaataagcaagggagggccgcaagcgagctctgcgagcgcagcgaaccgaccattgcgaattgtggatagtttactcccccgtccaccaggggctgtgaaaaaacttttggtttttcacagccccagcgtattttgcatgttccccttcctttgcgcataggtattctgatgaagcgaagggagggatgggccatgcatcgcgtgaaagtgcggcgggagcggcccgcggccgcggcctgggccctggcggttttgctcaccgcgttgtttgtattcctcatcgcgcgcggcgcgggtacgcagagcggcgaagaggcgccggaaagcgcgccgcgtcgggcgtatgcgctcacgtttgccccgctggaaacgcacctcgtgcaattcggcgcctatgaggacgcgctcagcgcgcgcattgaggcggcgcgctatatgccgcgcggcgcggcgggatatgtgctggagggcagcctgtaccgcgtgatcggcgcgggatacgattcccggcaggacgcgcagggcgtgtgcgaacgcctgcgggaggaagaaggcatggaggcgagcgtctattccctctcatcgggcgaggtggagctgaccattcagggcacgcaggcgcaagtggaggcgctcacccaggcggaaaccgccctgcgcaacgcggccgcccaactcaacgaaaccgcctttggatacgaccgcggggaactctccagcgaggacgcgcgcaaccgtctcgcgatcatcgccgccagcgcgcggcaggcgcaccaggcgctatcgcaggccgccgcgcatacggaaaattcgtccatcgacgcatttctctccattttatccgatttggccgctgaaacggagcaactttccaatgaaaatgttgccgagggtctttccttttccggcagaatcaagtataattatatcagtgtgcgtgtgaggcacattggcgtgctcaaggccatgggcgatttgcgcgcatagagaactttcgggaggtgcttgcgtgaaagcgacggaaatacaaaagctgctggacgcgacaatcgtgtgcggttcgctggagggcatcgacgtgctgtgcggctgcgggtcggacatgatgagcgacgttctcgccttccccaaggaaaagatggttttgctcacggggctgaccaacgcgcatacagtgcgcacttgcgaactgctggatgtgtgcgcgattgtttttgtgcgcggaaaaattccgggccgcgacgtggtagacgaagcggaggaagccggcattcccatccttgccacgcggctgacgctgtacgacgcgtgcgggacgctgttcaaggccggactgcccgggggaacggggcgcaaacatgagtgaaatgctgtgcgagcgctttgaaatagcgcagggagattttgccacagcgggggaagcgtctggtcggatcaagcgcatcctcaaaaagctgggcgtggatagcgcggtggtgcgccgcgtatccgtggcttcttatgaagtggaactgaacctggtgattcattcgctgggcggccggatggaacttaccgtgctgcccgagcacgtgaagctctatgtggaagacgatgggccgggcattccggatatcgataaggccatgcaggagggattttccaccgcgagcgacgaagtgcgcatgatgggctttggcgcgggcatgggcctgcccaacatgaaaaggaacgccgatgattttgccatttcaagcgtcgtgggggagggcacgaaaattaccatgacgttcaatacctaggatgcggaggagggggatcggcgatggaccggtactaccattctgttacgctggataaggacaagtgcgttggctgcaccaattgcttaaagcggtgccccaccgaggccatccgcgtgcgcggcgggcgggcccacatcatcgatgagcgctgcatcgattgcggcgaatgcatccgcgtgtgcgagcaccacgcgaaaatcgccaacaccaacccgctcagcgccatcaatggctttccttataagatcgcgctgcccgcgccttcgctgtacggccagttcaaaaatctgcgcagcatttcggacgtgatcgagggcctcaaaatgatgggcttcgacgccgtgtatgaagtcgcgcgcggggctgacatcgtttccgtggcggtgatggagcgcatgaaggagccggattgcccccggccgctgatttcttccagttgcccggcggtggtgcggctgattcaaacgcgctttccggaattgatcgataacattgtggacgtgcgctcgcccatggaggtggccgcgtcgcaggcgcgcagcgaattcgcgcgcgaaaaaggcgtggatcccaaggacgtgggctgcttcttcatcacgccctgcgccgcgaagatgacggccatccgcaaacccctgggccacgagaagagcgcggtggacggcgccatttccttcctggaagtgtatgggctgctctccgggcagatcaaaaaggccgtgaagccggaagacgctccatcgccgcgcgccaccagctttggcattggctgggcgcgcacgggcggggaggccggcgcggtgcagcaggaagaatccctggccgtggacggaatcgacaacgtgatccgtgtgctggaggaaattgaggataaccgcctgccgggtctgcgctttttcgagggcatggcctgctttggcggctgcatcggcggcccgctctcctttgaaaacccctttatcgcgcgcaaccgcatccgcaagctggtgctttccctgcccaaggtgcgcccgcaagacgtggtttcgcccgaggagatttcggggatggcggatgaaatcttttgcgataagccgctggaacccgtaaaggtgatgcaactgggcaaggatgtgcgcgaagcgctgcacaatatggagcgcgtggaagaactgagcaaaaagctgcccgggctggattgcggcagctgcggctcgccctcctgccaggcgttggcggaggatatcgtgctgggctacgcttctgaaatggattgcctggtgctgctcaaagagcgcctgcggcaaatggcgcaccaaatggtcgaaatgtcggaaactaccagaaagtagggaaacaaaatgaaagttacacagctcgcagaactcttggacgcaaaggtcgtttgtccggcggatcgcgaaatcgcctgcggttattcgtgcgatttgctcagttgggtgatggcgcatggcaaacaggatatggcgtgggtgaccgtgcaggcgcatctcaacgtgatcgccgtggcggtgctggcggatatgtcctgcgtgatcgccgccgaaggcgtgaaattcccgcccgacgccgtggccaaggcgcaaagcgaggatttggccttgctggaatgcgataagagcgcttacgaaatctgctccatcatggcgcgcgccggcatccaataaatgggccgcccgcggcgcttgaccgcgtatccacttgcggcgcgcaaaacgcgcgccgcttcttcatatagttttaacttgacgttgaaatctttcagtgctatactatataagcattcggaaacgaagcatgtgcccgtagctcagccggatagagtgtttggctacgaaccaaaaggtcgcgggttcgaatccctccgggcacgccatgcgcgaatctttgaaatcgttgcgatttcagggattcgcgttttttggcgtatccgtcgcggatcacttttgcggttgcgatgggcgctttgccgtggtataataaaagtgggaaatggcccgcaaacatggcctgaaagcggaggttcgcacgcaatgaacgaggaacttcaggaatccggcggctacaccgcggggatcgatacggtagatatccgggacgacttcatgttttcttatgtaatgagcgatagcagaatttgcatcgaattgctgcaatatctgctgccagagcataaaattgagcggattgaatattcggaatttgacgatgaagatgaggccgcagtggatggtaaacgcaaagcccccgaagtggttacgcaaaaggcgctggcggaatcgtttagcaagcgcggcgtgcggctagatgcgtatgtggacgatggcgccaacgtgtataccatcgagatgcaaaccacgcggcagagtgcgttgcccaagcgcgcgcggttgtaccaggcgcatatggacatcaaccagctcagccgcgggcaatactatgataagctccgccctggctttgtgattttcatttgcacgttcgacccatttggcagaggactatgccgctattcgtttcggaatgtatgcaaggaagaggatttcgaactgaaggatgaagcttataagctgtttttcaacacgactggcacgcggggagagatcagcgaatcgctgcgcgaaattttgcgctatatcaataaccccgctgggtatccggtcgaaaagaccaaactgccattgatccacaaaatggatcgcgcagtggacatggccaaaaaaagcaaggaatggaggaaagcgtatatgaaatttcagttggcacagcaggatgccgaaaggcgcggagaagcgcgcggagaagcgcgcggagaagcgcgcggggaagcgcgcggcgaaaagcgcggggaagcgcgggaaaagcgggtcacggccaataaaatgctcggcgagcatctgccgctggatttgatttcgcgcgttaccggcctttccattgaggagataaaccatctcaaaactaccccgaatgccaattcatgacgcaagaggggctttatcccagtaggccagctcgcgcggcaacgatctgagcggttgtggggacgccgtccccacaaccgctcagaccactgacaaagcccgtttcaagaagtggaagacgggctataagcctgagc

SEQ ID NO: 699 - DNA, 32759 bp, Unknown
  16S sequences of unknown bacteria
attctgatacataattacaggcattagaatacgccttcatggtatcacagataatttgcttatcagaagtattaactagaatctgttaattagaattgctctcaaagcagcaattatcttaacattccccaaatacactccagtaatgttagtgcaaggataatgttaataacacggaaatgccgcagataaaacttctgaatcagtacgcccaagccaatccaagtacaggttgcgattgttccgattgttgcaataaccagctcaaaaaacagcaaagccggaaaagaggacatatatcctacaatataacccgttagtgcggtaactccgaacatatagatcttcacattgacaaattgcagcatgaagccttttagaaacgatgcggattgctctgtgttttctgaggtcgtcttactgaaagcaatatgaatcgcaagccacaggatataggctgctccaatgtacttcatcacttccattacatttggaagcaaagaattaaccccatatacaaaaattgcacatatgatttgtactacatagtagcctgcaaaaattccaaagaacagcggcttcccttttttatatccatagtttgttacggtatttaatgccagaatatttcccggtcccggtgtaaaggcatttacaacacaataaatcagaaaattactcagtaccgccataggcataatcatcaaccacctttctgctgatattatatcagcaaacagcggtacatatgtaacacctattttatatgattatccatagcctatgactatggattgactggagcatatttccgcaattcttccacatagctttttccaagttcacttaattcctgattttcattcagtacatatccaatatgtattgtttcattttctgcaagcggaacagagatgatattttctccgttcaaatattttgggaaaatgccgctggaaatggtataggccttcagtccaagcataaagttgacaatagcccctctgtcattgacccgaatttccttatccaccggtatggaactgaatagttcctctgaaaaatagacagattcatattctccctgtacaaagtttagccgtggataaggtgcaaggtcatggacggaaactacttttttcgatgccaatgggtgatctttttgcaaaaaaacatgaggctttgctgaaaacagctcggtaaacaccagatggttttcctctatcactttccgcatgacgacttcgttttcatgcgataaataaaggatgcctaaatcacagatacgatttttcacatcatccaatatctgatgtgttccggtttcattgtaataaaaggcatatcgttcttgtccaaagcgcttgactaattccacaaaagcattttccgtaaaagtatagtgctgagaagatactccaaatgtcaccttttccggcagttttgtaatataccgatcctccagtagctccatttgctgtatcacctgacgggcataaccgagaaattcagcgccatcttttgtcagagtaattccggtcctgctgcggagaaagatggtgattccggcttctttttccgtttctttgatggaattggacagacttggctgtgatataaaaagcagtttcgcagcttcggtaattgaaccgacttctgctaccttcaaaatatattttaattgttgaaccgtcatttcttcatcctttttattcttacaaattccgatttatcactctgtatcgtttaacgacatatccactaaagctacaatctgatctcgccgtccatagaccactgctgtaacccatactgcatccttttcctcatcgattaagtagtaaacaagaaagttcttaaaaggcattttacgtattccttttttatgccaaggttcttcctctgtaagagggtagcgtgtcggcataaaatccaactttgcaatttcagactgcaaagtatctgcccattttcgagcagtttccggtactaacagaatgcgggaaatataccgcactatttcttgaacttgctcgattgcctgtgcggtcagcttaacttcgtaccgcatatctagatatcctcatgaattttcgcaaaagcttcatcaacggaaagtcccgtacctgcttttgcctgattatatcctttttccatcatcagattaaattgttcatctgtcatactatctcttgtaggcagattaggaactgttaaggagtacggaacaccgccggtcatgatgatttgtctgtatagggtgtcaatcaagacggaaacaggaagtccaattttctctaaaactgcttctgcctgtcgtttaatctctggttgtacacgagctgttacatttgcactttttgttgccataatacgcaccttcctttctagtattgattatatcatgttgtatagctaatcgccatacaatgttcgcgcactcataaaaattcataagaatttacaattccgactacctctattatactcgcagcttagtaacctcttgaatacttgcccaaaactaaaatttgtagttttgctgtaattgtctgttgcatatacaaagcctccctttcttcgccaaaaccatcatatcatatttctggcgaaaaacattgtctggaaaaaattacgccgctaatgcgggcattcctcccacgacttatagacgtcggggcttcctgcccggcggcgttggtgaaaaaacctgtccgcttctctcttaggcagcattcttgaataataatatccctgtataaaatcacatcccgcatcaagaacagctctgttctgctcctctgtttcaactccctcgcacaagacttcaagatccatactgtgagcgaatttcacaagccccttcagaaacatctgtcctctttcttctgtactgtttataactatttccctgtcgatcttgacgtaatccacaatatatctgtacagatcctgcatagacgaataaccgctgcctatatcatccaaagcgaccttgaaacctgcggctctgcattcctttatattatttcgtatagcctgatcatcctgcacaaaagagtcctctgttatttcgattacagctttgctgtaatcaaaatcataccttcccgcaatatcacaaagcctcgatataaagtcatgctccgctaacgactgtcttgtaaaattgcaggatataaacaggtctttcagtcctgattgctgccattcttcaagctggctgcatacaagtgagaaaagataaaaatcatgctccgtaatcagtcctgtctgtatcattgaatcaatataccttgacggtttgagaagcccctcctgaggatttgcccatcttgaagctgcctctgccccatatatactgccgtctctgtccactacatactgcagatatatatcaaactcgccttctctgatagcctgcgcaattctgtgatgcagtctttccttctgcttattttctctgacaatagcctctgtactcatcgaatacgacacgccggttctgagcgcctgaagatatccctgcttggcattataaattgcggcttcgctgctgcagcttatatcatctcccagagcatatatccctgcatgaaaaatatccctgtactcatctttaccctctgtcacaagcagcagtcttagtccgtccataattatctgtatatgtttctgcgcatctgcagggctgtttttctgaaacagcagtataaatgtgccttttttgattgtcgctgcaaaatcttcaggtccgttgctgtttttgaaatacactgcagcaagctcctctatttctttttcagttgtctctccgtaccgctgcgatacagcttcctcatcaaaagcaatatatgctgtataataaagacttttgagctgccttgtatttatattattaaaacagtccctgtaatagttcatatcccctattgaatgctgccactcatatatacggtcttttttgtcggcttctttctttgccagcagaatcaggaaccctgccagacctaccgcggcaatcatactgagtataataagggctgctttgtttttctgatctttttgctgatattcctgtcctattgtacagtcactaatcagctttaccatatctttatctgtcatctcagacagatatccgcttacctgctttattatattgtccgcagcaatatcagaaaaacctatgcatatcgtattctccccgttttcgtcactgaaacctgtgatttcatattcttttttcatgcagctgctgtttatatcatttttgagatgaatggaaatgatatccgcctgtctgttctttgccagatgtccctgcttatttgatccgcctgcatcaatatactcaaaagtataaccgctctcctgcgctatacggctgtatatttcaggcataacaccttcataccttccggtttcatcgctgtaatactcaaagggatacatgtccgggtttcctgcaacaaaaactttaacggccggctcctctgcatatatgccccacactgccgatgcaaaaaccataacaaagcctgctgctgcggcaaagcgtcttatgtagtttataatatgcctgttcatctctaccagaatcctttcctgaatctattttatgtttatctttttgcgtttgatgcttccccatttcatttttttacttttggagccaaacagagcagtcgctctcacccatgcaagaataaaccgcagacaggtaagttcaaacagacacagaaaaaccgctttaagtgcatcaggcgcacttattctcagttcatcggtatatgctcttgaaaaaaacgccgtaagcgaaagtataactccaaaccctgcatatattaagaaaaacagcaccataaatctgatattcacaaggtctgccgcccatgcgacaagaatcgtcagaacgccaaacacctcgataaacggtgatagcagctcatatacaagaaaatacatgtaggagatgaagctgactgctccgaatttcgaattcataagcatcgccttatgccctgtcatactctgaaaaagccctatgtgccatctcctccgctgacggcagagatcgtcgagtttttcgggaacctgcgtccagcatacggcgtcatttgcatacttaatcctgtaatctatattatttacggtacagtagtcgtgcagcttcaccacaagctccatatcctctcccacagttttgttgtcatatcctcctgcagcaatcaccatatcctttttgaaaagtccgaatgctcccgatattatcaaagagccgttgaatttatcaaatagaatacgcgccgccagaaaagatctgtcgtattcaagcacctgcatgctggcaagaatactgcgcggcattttgtactttttaactctggcgttttccatttcaacatcatttgaaatattaacagctcctcctaccgcaacaatgctgtcgtccttgaggatcggctctgtcaccttcctgagagaatcatactgaagaatagagtctgcatctatacatatgaaataagggaaatttgatgcatttatccccatgttaagcgcatctgccttacctccgttctgtttttttatcagggtaagcggcactttttgcgcccttgattcataaacagctgtttccatccggcaggcgatccggcgtcttatgggcctgttcacctttttcatgctgaattcatttatcaggctgtctgatgtcccgtcttcggagccgtcatcgacaacaattatctcatatgcccgatactccagctcaagtagtgattttaccgtatcagtaactgtgatttcttcgttgtatgcgggaactattaccgttacaggtacagtataatcaaaaggcagtatgcttttgagtttttcctgtctgtgatttttgtaaatttcaagagagcctgatactacagaaagaaacaggaaggttgagtagcctatcagatatatgataaaaaacacgcctacagcatcaagaaaaagtttaataccgtcattcattcgggctttcctcctctctttcttcttctattacattccttatatcaaatctgtaccttaaaatctccgatgcatatctgtcgcttccctcgattatatctataaggtcaagatatgtcattccaagcttttcaaggcttgctgatgaattgtagcggatataccagttccggtttccgagattttttttgagtgtttttactgtctgttctcccggatacaaagccagcgccatagaggctataatacagtattcttcccgcagaccgttatcacagtcagcataaaaaacaagcgcctgttcagcttccttataaaagtatttcccaaaatatctgatgcacgcaaaccttatttcatcatcttgtgattcatcattcataatcgtcagaaatctgtccccgtactctcccgaactgaatctgaagtagttcagcaaagtcaccttcatttctgtggaaaaagtttcaaactcctcccacagttttttttgcagggctgccgcttctcctttgaatctgagaagaccgtcggaaataagcttcctgtgataaaaatgattccctctgtcaatgttctttaaggctttgacaacatactccgtattgcctgtagtatacactgcctgcattgcgttttcacgactgtaaatactgggctgatcaagaagtacaaacagcatccgcacaatctgttccggcggctcctccgaaagaatcccgtatctgcctattatataaggaaaatatgctgcagcgatttcatctttcctcagatatttttcggaaacagttacaaatacactctccagtgatatcaggtattcctttacggtctgtgaatcggcttcacaaattctgtcaatcaccttgttaaaggctatcatattagcctctctctgcagggctgccgtcatgtagttaagatgattctcactcacagattcaccgtttttaatattggaaagctcagtttttatggtttcttcaaagcccctgcttatgcgtgttgtttttatgtctctgcggtgatatacaaaaacactgataatattaaaggctatcattcctgtacatataaacagatatacatatattatcaattcgattttcataagttttactcctccgaaagccataacttctgaagtatataatacgagcttttgagtcgttcatggcaggtgactttgtttccccagcccgaaagcttaactgctgcaaaaggaacacgcccgctgccggttccgtctgatactcctacatacattttatcaattctgatatattcaacgccgtaatttccctcatagtaatcatcatgtatcatcattcttgacggatctgcaaaattgagaagctgccacggcagttttatttcaataaaatcatctccgcacataaaatccgccaatgaatcaaaatcagcacttgcagggtttgcattgccgtatttgagtttcccggtttcgtaaacctccgctgctgccagattgtccttgtatatcagcgctgttgcagtctgaagtatcatgtttacagggacaaactccggtgaatccttatctggaatgttacctttaatatatgtatcataatctttaacattcacagaataggttgaacgaagcgcctcgtatctttcctgaacaagaactctgctgtgtttttctccgtctatgattatcagaaaatcggcaggtctgtccatcagaagattttcactgcggcagtacaggctgccgcttctggctgtaatatctatcggaatatacagtttctgtttcttcagactgatgccgtctttccttacaaggaaataaatgaatttctcatcatatctgacagtcaatgtcatatcatctgttttgagtacaggtttttcacctttccattcagaatcatcaccatccacatagcatatggatttctccgtacccggatcaaatgacagcagcccgaaatactgttcattcgtctggtagtccgaccaataaggcgtcctcctcagatcaaccgcatacattgtattccatgtacgtttgaaccactcatcctgccatgagaacacgcagccgccggcacagcctgtatccataatatcgttgtaacattcgacaagggcttccccctgctctttttcagacatattgccctgatttctgccggtgttgtaatcccgctgagccataccgcgtccggtggaaacaccgaattccgagattaccacaggcatgctgtgatgtgcagtaagcattgagagatatgctttatatgtattaagggttccgtcatcgcttttaaatttatttctgtttttaattcccagttccgaccagtcatcaacatataacagatagtccggataatacggatatacatgatacgatacaaactgtcccgcgagaaattcttctgttgtttttatatgctctacatccacatatgcacatttcatgaaaaagttttttacattctccggatattcaaagggatctgttgtcggccagtttgaaaacgcaatgggtttctgggttttgtatttactgctttcatattctatgactttgtcgcccgtaccgcacagcatcgcctcgaatgcggttgcgtcatcatctgtatacatatatctgcccttatactgtgtatattttttattgccggcatatgtatcatcggtatatgcaaccgtaacgtcttcccattccacaccaagtatatatcctatcacccactgcgatatgtctttgcggtaattgccatgccccgcacttgccatactgctaagcgaaagttttttctgtccatgcacaacgtctatcatggtcttgcaatcatccaggaatttgtcgtaaaagtcattgtcgaaagcatccctgtgagagttctgaatatagtcgtttacccatactccatgtatcacataaagaggatctttattgtccttgttgtattcatagagggcttcataaaaaatatcctgctgtactgtatatattcgtatggtgtttgctcccatttccttgatatatccaaaccatctgatgtatgtatctttgtcaatggcaaaatctgtagaccactgtcccggttcgccggagcccatattaacgccttttatttcaaagggctcataaccctcgcctttatttatatatatctttttgtcctcggcttttacaaatgtagttacttccccgcccggattaaagtcgataaaccatccgagcctgtaatgcacattattgataatcatcaccagaacaaccactgccgataataccgccagaaattttttcataatgtctcctgttttgcttaattggcaacttcattgaattttttaatctttgatggggctgaatactgcctgagggattcaatattatcgtccatccactcgcctcgttcttttataaatttcttcatttgctctatactctgcccgtatgttctcggattacggctctgaggcctcagcatatcgtgttttttgttaaagctgtatccccatttctcataattgcgttcaattgcagggccgagatagctgacggtatcatcaatataccggttgagatactcctcactcagaacggtttttctgagctgtctgtatcttttaatgcacagttctgtgaaatcctcgtctttcatcagcatgaaataccacaggcagttttgcatctcgaaatgctgtgaatccatctggctctgctgataattgtcacatgccgaattgaaatcccatatacacatacgaaatctgccgtctgcgtctttgtatatgtatgtagacagccatcctgcatcataattacaggtaaattcgttgattatgaagtagtctgcaaatgattcggcatctatcagtctgctgattccgtattttttatcattgtaatcgtaagaatataaggttttttcaaatgccgaaaaatctttttttattttttcataaagtcccggcgtcagtcttttttcgcccggataaacaatttcaagtttatgacgtgtcctcagcgtatatgtggtaaagcttttgagctgattgtattcattaccgtcaaggcgatccagcagcaatacatagccggaaagaaaattttcctccggatctgctgaaatattaatacgaccggcatcgtctcccgcagtaacagcctccgtcattacataaacgcccatatattctccgtcaataacaagctcgcagaatctcacatttggcgcatagtccatgatttcgcctgcaatattgtaccacatataatttctgataagtgttttgtcaagaaaaggtccgtgaagcacccagtcctcatgcgcaaccatacccataatactctgagagtttttggttccgtcaggtttgatcagttttatccgatagcccgctttgtcgaatcttctggaggaatttcccctgacatgaattgtaatatcactcgatacggcagggctgtcggtaatatgattatttttgctgtcgctgtcatacacagacatcttcgcggttattctgtcactgccgtcagcagcttttgtatagcctacagttttgtcattttttataacagctcttccgggaattgtctgattccctgtactgatgctcaccagcggcagatgagtgcacagttctttttctgtatgtctgcaggagggttttgtcagggcctcaagatgctgatgatatctgtagtttccctccgtctcggttaaagccaccgccacaatacacgccacgatcataataaggcatgctgtgatgcctataattttctttttcatagcctatgtaaaacgcaccctcctttctagtaaacatctatgttaattagatatctcgtcattttgcattactatatttacatattgcacttctccgacagtgtatatgcttcctgttatatcggggtggcttttttctgctgttttgagcatcctgcttgttatttcaaatataagctccgctgtttcttccgtagtgttttcaacccgaagaacagccttgcctccaaacatcttatatataagtgatttaactaccatctgacgatttcttgatgcccgcacaataagcagcatgcggctgtcatttttgatacatcccagaataagtattataacaaatacaataccgctgcctatgcctgctgcagtgtaatctcccacaccgcagcatatgccggcaataatggcccagaatatatatactgtatctcttgagtccttaattgctgtacgaaaacgcactatagacaaagctccgaccataccaagagaaagggctatattattgcctattacagtcataaccgttccggtcagcgctgtaagtatcaccagagatgcattgaatttcttactgtatattgttcccctgtgggatatatagtaggaaatgaagataaagaaacccagcagcgccgccactgcaatgtttgttgttatctgctcccatgtcaggtcgcccggctgtgtaactatgcttaaaattttttctttcatctgatttactctcctttacaatctcgtcttataccctgtctgtcttgcaagcacgtatttgcttgcagatatctcgctacggttgatgctgtttatcattcttcttatatattccagcagaaatccgttgtatttaacctctaaaatcacattgtatctgtccattacgggattcatatcaagcctgtccgaaaaaaggtcaaagcagctttcggttgcctcaatattactgtcaaacgtaatcctcgttttgttttcttttgccacaaaggcatatcggttgtactgcactatcgttttgggtctgtagcatttatagttcataaggccgtagcactctgccgcaaagacatccccgtatccaagcagcggtgaatagtccccgcccgaaagcctgacagcatctgcttttgatacgcgaagggacctttttaactgggaatctccctgcttctgtttcatctcaagcattgcgaaatccgattccgtatcatagatgcgcagtcttattttacgccttgtttcaatccctgcaagcttgtcgtcaaagtcctcgtcaaaaacagtatcaaaatacagggttcttatcatatatccgtccgctgcactgtgcgcatcaggtttgagaacctgactcagcatatgcctctttttgatgtattcatcaaggcttattaaaaatttcttttctttcctgtatacttcgttcaccgttttctcccaaataaaaaagaccgcaagttaacccctgcagtcagtcaatcatatggtgttcctccccatttagacacttaactttgcgtccctgcctttcgacaggtttgcctaatataatacaatataccacttttttctgcaaaattcaatacaaaatccataacttgtcctttactataatttatgtttgttataaaatatctgttgtgagttcgaaaccatcctcactataaacaaaactaaggagaaaactatgaaaaacaaaacaacctatcttacttacgctgcccttatagcagcgctttatgtcattctgtcgcttgtgtcgaatatgttcggtcttgcaagcggcgctgtgcaggtcagaatatccgaggcactgactgtaatgccggtatttacccctgcggcagttcccggtctttttgtcggctgcattgtttccaatatccttacaggctgcgctccgtgggatatagttctcggaagccttgcaacactgattggggctgtattcacgcgtatgctgagaaagcacgacatcctgtgtctgctgcctccgattgcggcaaacacattaatcctgccgtgggtactctcacttgtatatcattttgagggttccatctggtattttgcagctactatttttgcaggagaagtgatttcctgcggaatactgggatatctgcttaaaaagatgcttaataaatatgatggtactataaaatggcagtaaacacactgccattttttaaatccgtataatcagaacatactcagctgatctgtttcaggcataccctcaagcacgcccatagctttgaggctctctatattcgagtttgaaattctggttctgctcttaagctcctctatggtttcaaacggccttatcctgcactcgtccgcaagagcttttgccgcagtttcacctattcccgaaaccgccataaacggcagcagcactctgccctcgtgctcatagaacttagtgccgtctgatacgccgaagtttataggctcaaactcataacctctgctgtacatctcataggcaacctcaagaacagtcatttcatcctcttcttttttggtcgcattcttgcccttggcaagtatctcatctattcttgcaagtatcgcccctgagcctttgagtacaacctctgaattgaaatccgcaaccttggtggtaaagtacgccgcataaaacggcaccggatagtaaactttgaaccacgcaattctgtatgacatcataacataggcaacggcatgtgctctcgggaacatgtacttgatgcgctggcaggactctatgtaccagtccggcacattattgtctttcataagctgtacacgctcctctgtaacgcccttaccctttcttaccttttccattatgttaaacgcctctttgttaggaagcccttttaatatgaggtagttcataatgtcgtctcgggtcgagatagcatctttgatggtcgtatctccgtttttaatgaattcctgcgcattgtttatccatacgtcagtaccatgggagaagcctgaaattcgcactaaatcaccaaatcttgacggctgtgtgtcatcaagcatctgccttgtgaatttagttccgaattcaggtattccgaagctgccatgaacaaacctgtaatcagggtccttgatatcaagggcatcacagtttaagaatatgctgtttaccttctcgtctttaagctgcaccttaagcggatccacacctgtcatatcctgcagatgtcttatcattgacggcacatcgtggccgagtatatcaagcttcagcaggttctggtctatcttgtggtagtcaaaatgcgtcgtaattatatctgtagtcgtatcgtttgccgggtgctgcaccggacagaactcataaatctcgtggtcgtcgggaacaattattattcctcccggatgctgacctgttgttctcttgacacctgtacagtttgcggcaagtctttcgacttcaaacttgcttacgtctatctctctttcatcgtaaaatttctttacaaagccaaaggctgttttttcggctacagtacctaccgtacccgctttgaatacattcttctcaccgaatatatctcctacgtatttgtgcgccgtgccctgatattcaccggcaaagttaaggtctatatcaggctccttgtcgccctcaaatccaaggaaggtttcaaacggaatggtaaatcccagctggtccattctggcgccgcatttcgggcaggccttttcgggcatatcaactccgcagtcatattcagcgttgtctccccactcaagatatttacactcagggcaaacataatgaggaggcagagggtttacctctgtaatacccgccatagttgccgcaaaagaggatcctaccgaacctcgtgagcctacaaggtatccgtctgacagcgacttgtttacaagcatctgcgcggacacatacattacggcatatccgtttcctattattgagttaagctccttgtcgagtctttcctgtattttagggtcaacattgtcgccgtaaatctcgtggagcttctcggcgcaggccttgcgcagagtctcctccgctccgtctatatgcggcgggaatttgcctttaggtacaggcagtattccgtcatctatgctgtctgctatggcatttgtgttagttataactacctctcttgccctgtctgctccaagatatgaaaactcctcaagcatctcgtctgtagttctgaaatacagaccctcgccgctttcggcatccttgtatccctgtcccgcaaacagtatgtttctgtatatggcatcctccgggtttgtatagtgtgagtctgtggttgcacacaccattttgccgaggctgtccgctatggctatgatgcgcctgttgacgtctttgagcgtctcattgtcgggaaagattttcacatcctccaccagatatctgttgtttatgaggggctggatttcaagataatcatagaatccggctatttctctgatttcatcgtcggatttgccctgcttgaagccgcagtatacctcgcccgcctcgcaggcagctcctataattattccctctctgtgtttttcaagcaccgatcttggtatcctcggtcttctgtaaaaatagtcgagatgcgaaagggataccagcttgtatatattcttcagaccctcctgggtcttggcaagaagtatgatatgatatgttcctctcgccttgtagtcgatattgccctcctcatctataagaccggtatcgtccagcagatagccctccattccgtatatgactttgattttgtcgcctgccgccgaagccgcatcggggaaggactgaaccacgccgtggtctgttatggctattgcggggtgtccccatttgattgcctgctttacaacctctttggcgtcattgagaccgtccatggagctcattttggtatgaagatgaagttccacgcgcctgccgtcctcgcaggtgtcttttctttcttttatttcgcctttttctatatccctggctttaactataaggacgttgtcgtatgtatcccactctgccatacctctgattttagcaaaagtacccggcgttaaatgctctgcaagctcctccgctttctcgtccggcacaaagcatttgacgcacatagttgttctcttgtcggtaaccagtatggttgcaagcttaagcccctctctgatagtcctgtcggaaagcttgaaaactatgccctctatggtaacctcgccgctttcctgagtaacctcaagcataggcattgcctctgaattgatgcgtctgcccataatcttgttgccctctactacgtctttttctttcggctttcttctgaagcctccgccaccgccgccgtaggacggtttttccggagctgcttttttaggctttggaggagcctccatggcttttctgacagcctctgcctctatgcagcatatatcgtttacgctctcctcatatcgctcctgatgattgagaaatgatacggagcaggttatcccgaaattatccgaaataagctgctcaaatgtatgtccaagctcccggttgagctgctcgcacatagtctgtcccactgcaaatatattcagtatatctcctgtcagctcgaattcatcggtaactatggtcttggtcataccgtgatatttgccgtttactatggctatcatatgctctatgaaatgtcttatgatttcttcatctgtctgtatcacattatcatagacaaattcaagcttcacatcctttaatgccggcacttcgcttttgactatggctctgattttgagcacgtcttcgtagggcataacgaaattagcccttatgtctatggtaagtattcctgtttccttagacataacggctctctctattgaaaatccgtattcacttttggggtgtctgcccagccgttcccagctgatgctgttttcaataaggtttttcatattctatgctatctgccgaagaagctgtctgcttcggctctccattcaagttcttctttgttgtctgtctcatctaaaactattccgtgaactctcttgtcgtgagtatttgccacaacggttacaaatgtagtatatcctgtcgccttgatttcacctgtttcctctgatataagatccacgtgaattgtaatgcttgtcctgccgcatcttaccagtgtgctgcagtagcttattatctcaccgggctcaactgatttgttgaactcgaatttgtgacagtttttgaacagcagtccgtgtctgtcgcctgtttcggctgccgccgcgataaatgatgcctcaaccatccactctatgcctcttccggcatacaggtttttgtgatgatttaaatcgtccatttttatcatatgtgatgctctataagttttcatattccataaccatccttgctgtttcttcgactatttcgctttctttaacttttttgattatctctcctctgcggaagataaggccctcgcctctgccgcaggcaactccgatatcagcctctcttgcctctccggggccgtttacggcgcagcccataaccgccaccttgagcctgcctctgccggctctggcctcttcaagagcagaaagtcttgcctctatttccgtcgctattctttcgaggtcaacctcggtcctgccgcaggtagggcatgacctgatatcaattgccccctctcttaaatcaagagctttgaggatttcctttgcagcaacaacctcgcgaacgggatctgccgtaagagacactctcatggtgtcgcctatgccgtcaagcagcagagcgcctattcctattgaggatttgataattccgctgtttacagtccccgcctctgtcactcctatatgcagaggataatcggatttcctgtctacaatgcggtaggcctcattgttcatcttaacatcggaggccttgagggataaaactatatcgttaaatcccagctgctcaagaatttcggcatttttaatggcgctctccgcaagtccctcggcgcatactccgccgtattctgcaagtatttctttttcgagagagcctgagtttacgcctaccctgataggaataccggcgctgcgggcagcctccgccacctgccttactctgtccgtatcccctatatttccgggatttatccttatcttgtctgctcctgcatttatggccgcaagggcaagggtatagtcaaaatgtatatccgcaaccagcggcgcgtcaattctttttcgcactttggcaaagccctctgccgcttctttcgtattaaccgtaatccgtattatatcgcagcccgcgtctgtgaggcggcggcactgctcgattgtggctgcggcatctgcggttttggtatttgtcatcgactgtatcgaaacaggggcatttccgcctattgcaacgcccccgcaaatcacttggtttttcatcaggatattatccttcctatatcgttaaaggttacatatatcatcagcgcaaacagtaatataagtcctgcaaaatggaatttgccctcaatctcgtctgtaacacgcttacctgttatcttccttatgacaaggaacagcactctgcctccgtcaagtgcaggaaacggcagcaggttcattatggcaaggtttaaggatataagggcggtcagatatgcaacataaacaaagcccattttggaggtttcatttacaatggttacaatacccacaggtcccgaaagctctttgactgccacatctcccgtaaacagctgccctatgactttaatcatggtaactcccatagaccaggtgccctttgctccgtttaccaccgcttttgcagggttatgagtaacctgcgtggttattccaagcttgttgcgcttttcctgcttgtcatagtatacagctacagggatatcctctgtaacaccctctctgtctaccgtaagagttatctcctccttgtcggtttcggaaattgtcgttattatctgctgccagtctttcataggctcatcgtctattgccattatggtatctccgggttttagtcccgcagcctccgcaggcagtccctctgtgacgcctccgacagtgttggtggcactgcccgatacaagcgctatgattatcatgataaccagcgccagaactgcattcatcgtggctccggcaacaaatacgaagaatttctgccagccgctttttttgttcagcgcgcgctcatcgtccgagtcctcatcctctccctccattgcgcagtagccgcctatcggaattatgcgcagggcgtagagggtttcttttccctgctttttgaatatcgcaggtcccatgcccaaggcaaactcgtttaccttgacattacaaagcttcgccgctataaagtgtccgaactcgtggataaatataagcagcagaaatattactattgcataaattactgtcatttcattacccctgtaaaatatttattacggcatttcttgccgctctgtcagcctctaatatgccttctaagtctatattatactcaggattgtgctgattaagcacttcctccagtgtgttttgtatgtccgtaaatttaattctgttttctaaaaacagcttgactagaacctcattggctccgtttaatacaacaggatagctgccaccctctctgattgcgtcataggcaaagccgatacatttgaatacctccatatccggtttttcaaaggtaagctgccctgcctcaaacagatcgaggcgcgggaagtcgtattccagtctgtcaggatacgaaaatgcatatcctataggaactctcatgtcgggaagtccaagctgcgccataaccgaggtgtcctcaaattccaccattgaatgaactatgctctgagggtgcaccagcacctgtatctgctccggtgcaacgtcaaagagccatttggcctcgattacctcaaagcccttgttcatcattgtagcagagtcgattgtaatcttgctgcccatattccatttaggatgatttaaggcctgctccagtgtaacgttttgaagctgctgcgcagtatatcctctgaacggcccgcctgaagccgtcagcagtattcttttgattctgttattgtcatttccctgcatgcactgaaatatggcgctgtgttcgctgtctacaggcaggattttaactccctgctgccccgccatagacattatgagctgtccgccggtcacaagggtttccttgttggcaagagctatatctctgcccgctttgattgcataatatgtaggcacaagacccgatattccaagaagcgagtttaataccatgtcacagtcgcatgatgccgctgcaataagtccctcaaggccgtacattatttcggtatccggaaactcctctgcaagtctgtccctgtcttctttcctgcctacagctgcaatttcaggggagaattttttaatctgctccctgattgcctcaatgcgggtgctgcatgtaagcgctgccgctttaaatttatcggggtttctctcaattatatcaagggcctgtgttccgatggaacctgtagagcccagtatcgctatttttttcatctgtctatacctgcatgataacaagaattatatagtaataaaccatagggcctgtaaaaagcacgctgtcaaatctgtccataataccgccgtgtcccggtatcagattaccgtagtccttgatgcccatttttctcttgaatatagacgctgtcagatccccgaactgtgagattgcaccgccgagaatacccattataacgcagtgaagcatcagctcctttgcgaatatcaggctgaatacaaggctgagtatcacgcttcccagcataccgccgacggagccctctatgctttttttagggcttatcttagggcaaagcttgtgtttgcccagggtcactcctgcaaagtatgcaaatatatctgtaccgaaagctgtgataaatacaagccataccagtattctgtagtccgcaagctggtctatcatcgtaatgtggaatgagaagaataccacatagaaaagtcccataattgtaaccagcccgtcctcaagctttctctcctcgattttgaacagataaagaagcgaagctataacgcaggcaaagaaccaaaccataaaccagtgatagtcaagaggctctcccagatgccctccgcaagccgccagatttataatatacagaagcaccgctcctccgatgcctatgggaagacttgcgtgtatatccatcgctttaaagcccctgtaaaattcgtaaatcgccattattcctattgcaaggcagcagacccataaaatccagccgccgaaatatattacaagaagcagaggcagcattgccagccctgcaagtattctcgttttcataatcatctacctccaaaacgtctgtctcttccctgaaattcctcaagacatttttcgtattcctcctgcgtgaagtcaggccacaatacatctgaaaatacaaattcgctgtaggctgcctgccacagcaggaagtttgaaagtctttcctctccgctggttctgattacaacgtccggatccggaacgtcatacataccggtataaagctgcgaggaaatcatatcgtaatctatatcctccggcgctatcagtccctcctgcgctttggccgcaatagccttaactgcgcggagaatttcctctctgccgccgtagttaagggcaatattgaactgaagccctgtgtttgatgccgtaagctccagtgctttttcaagtcttgcttttgcatctgcggggattctggagtaatcccccagaatttttattctgacattgttcttatgaagctctttgaggtcattgtcaatgtatattacaagcagtctgaaaatccccgaaatctcctccaccgaacgcttccagttctctgtggagaaagcatacaccgtaagatgctcaattccaagatctgaggaacgtcttacgatttctttcatggatttcatacctgcattgtgccctgcaaatctgggcagttttctctgtttggcccacctgccgttgccgtccattataacggcgacgtggcggggcattcgtgttttgtcaagcatattcacctcatacaagtagtgtggccgtttgcacgagccacactacagggtttattaaacttccataatttctttttctttgttggctacgatttcatcaatgtccttaacagccttgtctatttttttctgaacatcttcgagttctgctttaagatcatcttctgtaagctcgcctgctttttcctgttttttgagctcatcgtttgcttctcttctgagattccttattgcaaccttgtcttcttcgcccatcttctttacggtctttgtgatttccttacggcgttcctctgtaagaggcggaatcacaagtctgattgtcttgccgtcgtttgacgggttgaagcccaggtttgctgccattatcgctttttcgatatccttgactgttgacgggtcgaaaggtattactgcgattgttcttggatccggcgctgaaatgtttgctatgtttttgataggcattgtgctgccgtagcattcagcctgaacctgatccagcagcgcaggatttgctctacctgctcttactgagtttaatttctcttttaaaacttctatgctcttgcttattttttcttcaaggtttttctgtacatttacactcatattttacctccaaatatctgttattctacaagtgtgcctattgtttctccatatattgctttgagaacattgcctttgtctgcaatgccgaatacatggattttgatgttattgtccatacaaagcgatgccgctgttgaatccataactttgagttccttttcgagaacttccttatgtgtaagtctgtcgaatttaactgcatcagggtttgtttcaggatcgtctgaataaaccgcatcgacttttttggcaagaagtataacctccgcctcaatctcagccgctctcagcgctgccgctgtatctgttgagaagaacgggttgcctgtgcctgcgccgaagattacaacattgccgtcctcaagctctttgatggctcttcttctgacatacggctctgcaatctctatcatctctattgcggtctgcactctggctttgagtccgactctctcaaatgcgtcctgaagtgccatagcgttgattacggttgccatcatacccatgtagtccgctgttgctctgtccatgcttgcgctggtcctgcctctccagaagttgcctcctccgacaacgatggcaacctgaacgccaaggtcgtgaacctctttgacctgctctgcaactgtctgcagcatatcgtcattaagtcctgtcctgtccgctccggccaaagcctcgccactgattttcaaaagtacccgcttgtatttaggttccattgtagttctcctttgctcgattttaaaaggacactttatgtgtcccttaattatatcatatatgtattatcagttccaatatatattttcgctctcaaaaagttttctaaagcagcggctcaagtccctcattatctaaaatgatatttatatccataacccttgtaatgccgttgtttatcgcaattataatccgggcatctctttcgtttttcggatagaggactccctctttcgcaatttttaaagcgcggttgcattcgctgacatccattcccgcacctatgcaaagcgcaattatcttatccctgctgggatttctgacaccgtttacaatattatatacataatttccgcttatgccgctccgctccgtaatctcaggcacagtcagattgtgttcgcctatgtactcattgaaataccgggcaaagctgtcatagctttccgctgtgtacttatccatatatttttttacttctgtttcatctttaacctttttaagaatgttttcaagtcttgccgttgtttcctgtgatttcatattctctccatatatattttctgtaaaactctttattatgatataatgcatttcacagcgaggaagacctgccgcaagcatctcacaaattgagccggggcttcaagagctgatgaaatacacatatcgcctaaggctgccaatatgatataataaattcaggataaaatcaaatacaggagcacagaatatgaattcagaagatatggctatactttcattctatgaagaaaaagcaacagtttcagataaatcagaggtttttcttgtacagcacagagagaccggaagattttatataaaaaaacatctttcaatatatgacagggagctttacacatcacttaaagacatgaacatacccggcatcccccggatatatcatatcgccgaggacggaaaccgactgattgtaatagaggaatacataaatgggactccactctcctcattcatatccgagcacggtccgttttctgcatgcgatgccgcagatataatcagcaatctgtgcgatatactcagcgttcttcacagctgcacgcccccgattattcacagagatatcaagacctcaaacattataatttcatcagatatgcaggttacacttattgatttcaacgcctcaaagaaatttgacagcgggaagaattacgatacatgcctgatgggcaccgccgaatatgccgctcccgagcagttcggtttcagtcagtcagatgcaagaaccgacatatatgctctcggaatacttctgaatatattaattacaggctgcttcccgaaagatgtgctgtgcagcggttccgccgcaagagtagtaacaaaatgcacccaaatggaccccgcccgccggtattcctctgttttacagttaaaatccgcgctgcggtatatatcagatacgcctgtgaagcacctctatccgtttctgcctcccggtttcagaactatgacatggtggaaaataattatagctttaattatgtatcctctgctggcaaccttatgtctgtcactggatttaaaagactgcaattcagttccgcagctttatacagaaagagcgctcatcggcgcatggatgatttttaccgttgctctctgctgcaactatcttaatcttgcagacagatttcctcttactcgaagcagaattcagttagtcagacttctcggtatggctttatggtcttttgcagcgtttgcttctgccgcacttatttctgtagcgattttttcataatttctattgactctcccctttaggggggaggtcatataatcggtgtatgaaaggaggacaattatgtgcacaataggacagttttcccagataggcaaggtttcggtcaaaacacttcgctattacgacagcatattcctcaataggcgatgcctacgctgccgttatgaaatggattgaaacaaacggctataaaatatcaggcgctccctttgatatatatatcaaaggaccgcgagaggcatcatcacctgatgagtttgtaacggaagtatatttcccggtaaaaaagaagctgtaatgatgaggacagcagaccgacgcctgctgtccctataacttctaccttgtccagattcttttgccatatctgcactgctttaattctgcctgcgctgtcaggttgccctcattatcatatatcataagctttgccttgtaataatacttcgcatcttttttacctgtcgtattaatataggtattctctgtctttgatgttctgactgtaagttccagcttaagagccttttctttaaaggctttatctgtttcctccttagtcggaggtattttagcaaaggttacctctaccttatctccagtcttaagtcccgtaagcttattgtctgtaaccgtaaattctttaccgtttacagttacctttgaaatttccataccgtcatcaggtgtaatcacaagggttcttccgctgttttcaaggctggtcttaccgccctctcctgcaaaacattattaacaacctgttcaaggtctgctgttttcagcttaaggccgtttatgccaatctgtcatcctaccaaagtatgaaacggtgaatttttttgctgatactaatcatatttttaattcttcattccatcctgcgccgatatgacatcgcttttgctgtatttattcaggaattcttcaatcgctttcctgcatttagcagtatccgtcagatagctcataccgtgataagcttccggcactgtcaccagatatttctcggctctgcaagccttatagttttcataggtaaatcttggcggtacgaagcggtctgcttcaccgtgaacaaacagtatcggcaatttgtttattttcatagcctcaagggtagaatattctctgaaatcaaagcctatgcaaatctttgcccacagatttacactgtcaagcagcggtcttgcaggcacctttgccctttttaacacctcgcagaattcctcccatggagaagtaaacccgcagtctgcaattatacctttcacgttggacggaagctcaagccccgacgccatcagcacagtcgttgttcccattgaaagtccgtcaagaaatatcggctgctccgatggtattcttgatgcaatgtactgcgcccatttctgacagtcgtatctttctcttgttccaaagtatatatatctgccctcgctgtcgccgtgagctctctggtttactgccagcagcgaatagcccagattatagtagtattcatatacacagccaaagtcaagactgtaaagggagccgtagccatgcattaaaattatggttccctttggctccggatgctcgacatagcaggcggtgagcttaagtccgtcataggaaagcagagatattacctccggctcctttgatttaaaccacgcgattcccgaaagcacctgctcctcatattttttgagagcaggatacgcctctgccgggtgagcctcatcaggtcgtttttttctgacgcaggcatacctgaacagaaaatatgcagcagtccagtatgctgcaaacaatactatcagtatgccaataatccatttcataaaccgctcatctccttttcagtgtccgcagatattcctttgttttatcgtcaatctgcctgctttctgttgccttttgtattgatttattgtgtgtccatttatccagtctttcttccgtcagataaggcagcgccgcattatactgccatacaagcgccatactgaaataccacgctgtcgccatatttatatagtattcctccgaccgtatatctgccacaagtgaaagcatctgcttctcaaaatcagttttgagataatccataagggttactatcccaaaacgaaccgtataagtttcagcagaacccagccactgctttatcttctcatacacttccgctctgtgtttcttaaataccttaggcgtaaagcagtcgcaggtcgcccagttgtctatatacggaagaaaccgctcaacctcagccatacagtcgtcataatctttcatctcgcatatgaggaaagtatggaggttgtcctcttcatagtatttatgcggaagctgcaatataaaggcggcggcttcctctgtgcctgcaagctcctttgccagcttcctgagcgcaggagttcttactcctataaccttttcctttggaacgtcaggcataaggcggctttgaaaatctctgtagcctgtatcctgcaattcaaatagtctgtctgttatcatatttattgccccttttcatttgtctgaaacaattatatcacatccgaaaaatcaaaaaaactgcttcagaagccacacaatatgctcctgagcagtttagtccgctattcctactatgcctctgaaaaagccagtctgtaactctccagatattcgtccacagctcttgcaaatgcctctctcagactgtggattgtttttgccagatattcgatggaatagtacgtctgcctgtttgtcactttaccggaataggtgttggttgcaaggtcataattgatatctccctgaaatcccttgtattccatttgtgtcaggctaagcatttttacattactcatacaaaactcccctttatagtaagattctaaccgtttactatttccctgattttgtacttgctaatatactaagcttgtaatgttactctatttgagaggctctcccggatggtcctccgcccaaattctgtttgccgtctgctcccacttgtctgcaacagggatacatttggcagtaagatccgaaacgtcctccgggtgcgccagatctgtagaatgcgctcctgattccttaaccatattctcaagcgcatgctgattgtccagcagcggacaaggtctcagataattctgacagaacggctgctctttatgataacacataaacagcggtgactgcaatgcttcaagcaaagttttttctctgatatttgaatcagaataatgtatgaatgcacaaggttctatatctccgttggcattaatatggaagtacgaacgtcctcccgcaatacagcccttgacatattcgccgtcattccagaaatctattgtaaacagaggttttgtttttctgaattctcttaccttgtgatacatatattccctctgttcgtctgtaaccataagctcaggcaccgcatcaatgccgacaggcatataggtgaagaaccagcagaattttgctccccacgcaatcatctgatcatagtattcttccgagcctattgtcttgtagttcttgctggtgtagcagcaggaaattccaaacggaagcctctttgacttgagtatcctcatagcctcttcaaccttgccaaaagtaccgtcgcctcttctgaaatccgtatcctcttcaaagccctcaacgcttatcgcaggaatgaagtttttaactctcagcatatcgtctgcaaatttttcatctatcagcgtgccgttggtaaagcatgtgaactggcagtcagggtgcttctcacacagcttaattatatcgtccttgcgcacaagcggctctccgccggaataaagatacacatatacgcccatttccttgccctgagttatgatgctgtcaagatcctcaaaggacagattcagcttgttgccgtactgcgcagcccagcagccggtacagtgcagattacaggctgatgtcgggtcaagcagtattgcccaaggaatattgcagttgtatttttctctcatttcctttgcttttttgccgctcagaagtgaaccgttgaggaaaaagttcctgtaggttgccttgagcactccctcatcaatctcatcaaacagtcctgttaaaagccggttccagttgttctcagggtgcgccgccatttccttgaaagccccaagctgcgctttgaatgaaccgcccatatcaagcttttcggcaacctgcgccgctctgagtaaattcttttttggattttttgccagtatgtcgtaggctttcataagccctgcttctgttaagctctgtttaattcccatttcgttcttcctcccattgttaccacataatagttaaatatcttctgtttttaaaacatacctcttaaaaatattactacctctctaactctaattatattcatacatattgctttttaaattgacaattttaagacaatgtcgcaatttcggggaaaacacatagttttttacggcttttttattaattgtattcaaaactcctgcaaatatgtccctgtaaaagaaaaacgcagtcatcaaaactgcgcttattcaatcaatagaatgtggccagaacattgtcaggcatatccgtatattcaattttacttacatgtattaccggtactctctgatcctcttttttgtttactgcaatatgcacagtgccctctatccttgcccatttgttgtgctctatctcatcattacactctgctatgcagcgcatgcctgcaaactctatatcctccgcacagcaggtcataagaggtctgcctacaacaaatctgtccttgccctctatgcccttggacttcaccattgcggacaaaatcatggtcttgcccttgtacacgtcaggctccgccattatatcctgataccagtaggcataatctctgtcctccagctcaatggtgtccgcctcaacatcaaacggcagcggatcttcgatttcatcaacctgtatcttgcctgccggagactcatatattatctgggcgtttctgttggcgtttcttacggtcttgtgaaactccataacatcatagtcctcttcgaagcggttgaatatgaccatatcggtgtatttgagcttgtcgtaaaccaggtttcgcatattcatattatatgctgtgaagctgcctgaatccacaaaggtcatctcctgacatattatccagttgtcaggcatagtcagataaagatcttccatcttccacatgccgttgtattctatcaggattttttccggcttgtatttctcattgagcatcagaaaatattcctttgaaacagaagcctcatcttctatatattcaatgcttatctccgtattatccgtaaaatcgggctctacctcgccctcctcgcagagtatgcacaggtttctttcacctgccgtaaactccggctctgccatggattcattcataaatgtggtcttgcctgattcaagaaagcctgtaaacagatatacaggcacctgtcttttccattttctctctagcatacgaacatcttccttatcttttcttcatcaaggtcagtacctattacgcatgccttgcctgtaagctgcgctccgccggttctgatgtctttttcgcccggaatatagtcaaagtgcagccagcttccgtcctttgcctcaactatgcccttggctctcaatactgttcccgtttcttctatatggtcgagtatgtcgctgatttcttcctcgtcaaatttgtgtatggtctcaatgccgcagcttgtaaacacctcatctgcgtgatggtggtgctcgtggtcgtggcagccgcattcacagtcatgatcgtggtcgtgatgatgatggtcatggtcgtgatgatgctcgtgacagccgcactcctcatcgtgatgatgttcctcgtgctcatggtgatgatgatgttcatgttcatggtcgtggcagccgcattcgcagtcatggtcgtgatggtgatgactgcattcattcatagcgtctaaaatctgtttgccggaaatgctgtcccagtcagtagttataatctgggcctcgtcattgtgctctcttatcaggtgaagagcctctttaagcttgtcctctgccattcccttggtgtggctaagcacaataatatctgcattttctatctggttattaaagaactcgccgaagttcttcatatacattctgcattttttggcatcaaccacagtcactcctgctgcaatgtcaatctcctcgacctgctccgcagcctctttgacatcgctgagcttgcctactcccgacggctctatgattattctgtcaggcttaagctcctgcgccacttttttgagggcctgcgtgaagtcgcccacaagagtgcagcatatgcagcctgagttcatctctgttatctctatgcccgagtcctcaaggaagcccttgtctataccgatttctccgaattcgttttcgactattacaagcttttctcccttgtatgcctcatctgcaagctttttgataagtgttgttttgcctgcgcctaaaaatcccgaaaatatatctgtttttatcatttgtaattacctctttctaaagcttatacttaaatattatcacattttcggaaatttacaaataggctgcgggattaattttgttctttgttgtggatacaacattctgcctctctcatatattgtataattcttttcggaaaggctatttatcatatgataaactttgatattacatttattcgcaatacaccgctgttcaaaaaaaataggcggggaggagtttaataaaatacagcacgcccttgccgtcaggcgcccagcccgacgattccagtattctgcctgcaaatacagcccatgttgaaatagggataagaacgcaaagaggcgccaccggctctttcgataagagtcataatacttcccataagtccgcatacgataataagccagccggtatcctcgtccatcattacctctgtcatcgagccgcttaaattccacagaatgtccgcaggatttacaagtatcagccccactattgatgccagaaacagcgcttcaagaattcttttggtagtgaatatgtatactatcagaaatactgccggtatacacgacactattgtaggattttcaggatcgacaggcggaagcagcgcagctgctgcaaacgaggctgcaactactgccagcgctatgattatagttcgcggtccgtgaaaattctaaaatttattttttaaccgattacccatgagcatctcctttcattcctattatatttttcaaacccgataatatcacaaaaagcacagaaaaagacaccggagatgtttttccggtgcccttgagagttgtgttatatacgctgatcgggtagtttttgccagcttatatatcgtgatttaattatgcaaatacaaagcccgctatgaggaacaatattgccgaaataacggcggccagaactccgaatgtggcctgtgtataggcgtggtcgaagttgttgcagcctgtcgcagacgatgttataaccgtacagtctgagtagaagcatacgtggcttccgaatacgcctgcgcttaatactgctgctactgcaagcggcatatttacgccaagttctgttgcaagaggaactacgataggaagcgctataatgtacattccccagttggtacc

SEQ ID NO: 700 - DNA, 11302 bp, Unknown
  16S sequences of unknown bacteria
tagtgcaagatacatttatgagccgccgtttccgggtctatggcagccccgacgtcatcggcgttgaattggcggcggcgctcaagaatgtcatcgccctgtgcgctgggatctgtgacgggctggagtacggcgataataccaaggcgcttctcatgacccgcggcctgacggagacggcccgcctgggtgtcgccctgggatctcgcccggcgacgtttgcgggccttgccggggtgggggacctgatcgtcacctgcacctccatgttctcccggaaccgccgggctgggattctcatcggccagggcaagacggcccaggaggcgatgaaggaggtcggcgcggtcgtcgagggctattacgccacaaaatctgccgtggagttggcccggaaggcgggcgtcagcatgccaattgcagaggaggcctaccaggtgctctacgaggacaagccggcgagcgaggccctgtttgatctgatgcaccggcagaaaaacaacgaagtcgaggacgcaggctgggagcagcctacgccgcaggcgtgatagaatttcaatttacaaacctaggggccttgcaaagcccagaaagcaacaaagcagccggtgccgcctgatgcgcggtaccggctgcatgtttttgcgcccctgcaaaagatggctgtgggcgcggcgctggatggcgttgtgatcgcgggcagcattttctgctttgacttctggggtcatctctcctctttgacagcaatgatctcgccgacaaaaacaatatgtggctgccagctgcccttgaaatctggatatacctctggccgggcggcgtaatccgcttgtacttccggtgcgagatctttcttggaaaactggtgctgatacagctttttgcagagaaatgttaaattggcttcctggaacgtcacaccttgcccgaatgcgacaggcgtcagaccggccacggcgaccttatcgctattccggccagaatgggacccgaggtaacccaacgcttgcttacggctttggggataaaagctgacggtgaacgtgtcgctgctttttaaaaactcgctggtgtaacgggccggatgcacataaactgtgacagtcagccgggttttgcctgcgcgcccccagaggttccccaggctgccccagccgattgtgcaggtgttataatgcgccagcgaaccggcggtcacaagcgcccactgctgcgcgaataattcgaaaactttgtagtctttttccttgaaattttccatatgggtcaccgtttaggcttcgcgctttgtgatgacgggtttcccgtcttgatccagcaggggcgtcataccgccggaatatccgcacatgtgatataaataattgacccctgtttccgtgtctacccaaatttcagtctgctctgccatgcctccctgagaatagacttttttcaatcttttttctttcgccatttggttttcctccgtgagaatccgtgctgtttcaattgtatttattattataccacgaaaatcgtggcattgtatagcgttttgcggtgtacaaggctgtttttagtcattttccacacaaagcaagccggagcatcgggcctgcgacgcttcgattcggcacgctttttttgccgtttttgtgcggcgggggagaattgtgttgaaattttcacaagcagccggaaaaaaatagaccgtgcctgtgtgaatgtgtgcaaatcgtacgaaactgacaggataatattgaaattcattactgtttgtggtaaacttacctacaagtttgttgattttatgttttttgcgaacaacgatcgctctgctgtaagcgggcggtgagataggagagagaaaatggcaaaatacaaacgcagagacggcacccttgtgccggagacggacccgatgcacctaatcacgccccatatggtccccaatcgatgcgataacgaggcggtgctgacggagctttttgatatgacggcagtcgaggcgtatcttgcgaagaaaaatgccgacgggccggagtttaaatatacctttttccatgtcatctgcgctgccatcgccaaggtgctggtgctgcgcccgcggatgaatcggttctacgccggccgccggctctatgaccggaacgatatcctctttgcctttgtggtgaagaaaaagtttgaggacaatggtgcagaggcgctggccatcatcaaggttgataaggacggcgagatctccccagtggagcagcttcacggaaaggtcaaggacattgtctatagtgtccgcaaggaaaacaagaccgagggtacgacggagaaaatgggcatcctgacaaaactgccccggggcctgcttcgcttcgtgatgagcttcttgaattggctggattaccatggcaagtaccctgcggccctgatgaaggacgacccgtattttgccagcgtctttgtctcaaacctgggcagcattaaaatgcacgccaattatcatcatctggtcaactggggcaccaactctatatttgtcgttatcggcgagaaaaagctgacgcccttcttccaaccagatggctccgtccagatgcgcgatgcgctggagctgggactgacgattgatgagcgcattgcagacggtgtctattttgccaagagtatccacctgctgcagcgacttctgtcccagccggagctgctggatgaacccatccagaccccggtggattacgaatcagaacttgtatgatacagcgtggtttgtacacatcgcttgattaaggaggagaacatgatggaagtgaaagccccgtggcttgccaattacggtgatattcccgcgcatcttgcgtattttgaaggcaccatgtttgaattggtggaggcggtcgcccagaagtacccgaagtacattgccttcgattttatgggccggtccacgacatatgccgaatttgtctctcaggtacatgcgtgcgccaaggcactgaaatatattggaatccggcccggcgacaaggtcaccatctgtatgcccaactgcccgcagacggttgtgatgttctacgcggtcaacctggtgggggccatttccaatatggtccacccgctctccggcgaaaatgagatcgcattctatctgcgggagtcccagtccgtggcggccatcacgctggaccaattctatggcaagtttgctgccatccgcgacaaggtcgagctcaaccatctgatcatcgccaagattggcgatgctctcagccccgccatgaaggtgggctttgccctgacccaggggcggaagattccgaagatcccggcagacgcgccggtactctactggggcgacttcctgcgtcaggggaaaaaattccgcagcacttaccgggccaaacagcagaagacggatccggcagtcattctctactccggcgggacgacgggcacgacgaagggcattttgctcagcaacctgaatttcaacgccctggcggcccagattatcgcgacaaacccgatgttccggccaggggataaaatgctggcggtcatgccgatgttccacggcttcggcctgggcgtgacgattcactctatgctcggcaatggcggccgctgcctgcttgtgccgcgctttaccccggagagctacgccaagcttatggtgaaggaacgctgcaactttgtcgccggtgtgccgacgctgttcgaggcgctgctgcgtttggattgtatgaacggtgccaacctgagctgcctcaagggcgtattctccggcggcgactccctctccatcgagctcaagaaacggttcgacaaatttctctttgaccatcatgctacgatacaagtgcgcgagggctacggcacgacggagtgcgtcactgccagttgcctgacgccgctgcatatggcccgggagggcagcatcggcttcccgttcccggatacgtattacaagatcgtaaagaccggcacccaggaggagctcccctacggggaggagggcgagatctgcctggctggtccgacagtcatgctgggttatgtcaacaacccggaggagactgcccagaccctgcagcagcatgacgacggcctgacctggatccacaccggcgacctgggcatgatggacgccgacggctttgtctacttccgccagcgcatcaagcggatgatcatcaccagcggctacaatgtctacccctctcagctggaaaatattctcgatgccaatgagatggtccatatgagctgcgtcatcggcgtgccggatccgctgaaaatgcagcgggtcaaggcttttgtcgtcctgaagcctggcatcgtcgccagcgaagagcggcgggcggcgctgatggattactgccggaagaatatggcaaagtatgcgctgccgaaggagattgaattccggacggagctgcccaagaccctggtcggcaaggttgcctaccgggagctggaggaggaagaggccagaaagcgggaacaggaggcaaaatgatggatctgtttgccaagtgttacgagacctttattcaggatgagatccgcgatatggggctctacccgtatttccatgccctggaatctcgtcaggacgtcaccgtgatcatggaaggcgcacggcgcatcatgctgggctccaataactatctgggcctgacggtggagcccgccgtcatcgaggcggggatcgcggcgctgcgccagtacggcaccggctgctccggctcccggtttttaaacggcacgctgcagctgcatctggagctggaggcggagctggccgatttcctgcatcaggacgcggcaatgaccttctcgacgggctttcagtccaacctgggcgccatcagcgccattgccgggcacggagactatatcctctgcgacaaagagaatcacgccagcatttacgacggctgcaagctgtccttcgcccggatgtatacgtttaagcataacgatatgcaggacttggagcgtctgctggcggcctacagccccaagggcggcattctgatcgtgacagacggcgtcttctccatgaccggcgagatcgccaacctgccggagatcgtccgcctggcgcggcagtacggcgccagagtcatggtggacgatgcccacggcttgggtgtcctcggggagggcggccggggaacgcccagtcattttggcctggaaaaagaggtcgacctgtatatgggcacgttctccaaatccctggcgagcctgggcggctatgttgcggggcccgcgcggatcatcgactatatgcgccatgcatcccggccgtttatcttctcggcgtctatcccgcctgcctgtgcggcgtccgccctggcggcgctgcggcatctgaaggcgcatccggagctggtgcagcggctgcaggacctttctgagtatgccagagctgggatgcatcgccgccagatcccgatgatcgaggcggagacaccgattatccccatctatacctacgagccgggcaatacgctccgaaaagcaaaagaaatctatgaggcaggggtttatgtcaacccggtcctgccgcctgcctgcaaccccggcgaatgcctgctgcgcaccagctatatggccagcctgaccgaggcgctcattgatgaagcgctggatcagattgccggcgttttgaaggaggcgtgagggcatgggaaagatcgtgatcgtgaccggcggcacctccggcatcggcctgcatacggcagcctacctgcaaagccagggctgtaccgtctatactgtcagccgtcgcccgtgtgacgacgcccggtttcatcatatctgcgcggatgtgacccaggaggccgatgtggcccgggcggtcaaaagcgttctggacgaggcaggccgcattgatattctggtcaataacgccggattcggcatttccggcgcggtggagtttacggaccttgccacagcccggcggcagttggatgtcaatttctggggcatggccgccatgactcacgctgtgctgccagtgatgcggcagcaggggagtgggcggatcgtaaatctcagctccgtcgccgctccggcggccattccgttccagacgtattattccgtctcgaaagcggccatcaatgatttcacgttagcgacggccaatgaggtgcgtccctttggaatcaccgtctgcgccgttatgcctggggatatctgcaccggctttaccgatgcccggcaaaaaattccgacaggcgatgaaatttatggcggccgcatcagccgctccgtcgccgggatggaaaaggatgagcgcaccggcatggcgccggaggcggccgggcggtttgtcggcaaggtcgcgttgcgcacgtcccataagccactgtataccatcggctttgtctatcgctgctgcgtgctgctgctcaagctgctcccggcgaggatttccaattggcttgttggaaaactctatgcaaaataagaaaaatgaggtataatgctatggaagaaaccatccggcagatttttgtcgacgaactgggctgcgaggtggcggcgctgacaccggaatgccgcctgcgggaggatctgggcgtctcttcgctggagatgctgggcgttgtgttggcgttggaggatcaattctctatcaccatcgacgaggcagacctgcctggcatcgccacatttcaggatgtcgtcgcgtatatccgtgcccatacctgaccgcgcagcccggagattggagggacattttgcgccaatttatcaaaaaatatccttatgttctctgggtcttgtatttaccggtttatctggtgttgttttttatcgtggagcaagtcatcacgacagactactgggtctcttattgcaaggtggacgactggattcccttttgcccggcgtttgtggtcttttatgtcatgtggtacccgctggcgatcgggacgggtctgtatcttctgtggaaggacccgaaggtgttccagcggtatatgtatttcgtctccatcgggctgacggtcagtctgctgatctgtctggtgttccccaatgggcaggacctgcgcccgactgcgttgggcaacgatattttctcccaaatcatgcgtctgatctatgcggccgatacgaataccaatgtgctgcccagtatgcacgtcgtcgggacctgcgcggtcattgctgcgtggtatcatacagaggtgcagcataaatgggttcgcccggcgatcttgatcctgggccttctgatcaacgtttctaccgtgctggtcaagcagcactcgtttttggatatcattgccggtgtggtgctctcggcggtggtctatgtgatctcctatcggctgctgccggtgccggagttggaacggatccaccggtgatacctctggtatagaaccacaagcaggcggcgcgcagcagagctttttgcagcgcgccgcctgcttgctgcttggtcagcgtttgcaatcatgaaaattgtgcaatatagataaaactgagagagaataatagcaaaattgacaaaaacacgatatttctattttggggcttgacaaattaaaagtacgttggtatacttgtattacaaccgacaaagaaaagcgttatacgccttgtgctcatgtgttgttttggttgtaccacggggcactgcaaattgtgtcattgcagtgccccgctcctgattctttgcctgccttcgtgcgggtaaattttttcgcaaaaaatggaaaaaccgcttgacaaatccgcaaaatgtggtagtatatagatgttatcaaaagtgcatattgtgtttgccactttcgtggaattgggtgagaatcccagcgagtcggtcactgtgataccgtcaccgtacggttaagtcagatacacgggcaaacataacgtttctgccctaaccagaaaacgaagtatattatttgcttttacctgacggggcgttcctcccgccaggcatttttgttattgttttgcgtgttcccaataacaaactcctgttcattcttgtgtgttttaccttcctacctattatctctgataccctgagatagaaacggatgccacattgataacaaccaaaggcagtgcagaagtacccccctgacttctgcactgtccttttttatcccgctgccggggcttgacatttcctgcttggggccgtataataaaagtgtatatctgtccaagcggcagcacgggaagcgctggtatgttaaaactggtatgttaaaaatagggacgttgcagccggatgcaaagacgcagcgctgaccatagaaatggtcaagtgctgcttttttgttccggcgtatattttagaaggcagaaggagcgtattatgctgcaaatttcacatctgacaaaaacctacggcaagaaaaatgcggtcgatgatctgagcttggaaatccggccaggcgagatctacggctttatcggccacaacggcgcgggcaagacgacgacgatgaaggccgtcgccgggatcctgcagtttgatgcaggggagatccgcatcgatggcaagtctgtccgggaggacccgctggcctgtaagcgggaattggcttacatcccggataaccccgatctgtacgaatttatgacgggcattaagtacttaaattttatcgcggatattttcggcgtcagcccagcggcgcggcagacgcgtattgcagactatgctgcgcgttttgaactgacgcaggatctggcccagcccattgcggcttattcccacgggatgaagcagaagctggccattatcgccgcgtggctccatgcgccgaagctgattttgatggatgagccgtttgtcggcctggaccccaaggcggcgcatctgctcaaggggatgatgcgggaggcgtgtgcgcagggcagcgcgattttcttctcgacccatgtcctggaggtggcagaaaagctctgcgataaggtcgcaatcatcaaagaaggcaagctcatccggtccggcacgatggaagaagtcaagggcgacgattcgctggagcaggtgttcctggaactggaggcggaaaaatgctgaaattactgctgaaaaagcagctgacggaaatcttccgcagctacgtttacgacgccaagaaaaaccgggcccgctccaaggctgggacggctgcgtatatcgcgctgcttgtactgttgatggtcggtgttctgggtgggctgtttacgatgctgtcgttatctctctgcaatacgatgcacgcggcggcgctggactggctgtattttgcgattctggggctgctggcaatcttcttgggcgcgtttggcagcgtgttcaatacctatgccgggctgtatctggccaaggataatgatctgttgctctcgatgcccatcccggtgccggtgctgatggcgtcgcggctgctgggcgtttatctgatgggcctaatgtattccggcgtggtgctgctcccggcggtgatcgtctactggatcgtcgctgcacccagtgctgcggcggtggcgggctcgattttgctggtgctgctggtttccatctttgttttgaccctttcgtgcgccctgggctgggtcgtggcgaagatcagtgtgaagctgaaaaacaagagcttcctcactgtgctggctgcgctggttttctttggcctttactattttgtctatttcaaggcccaggcggtgattggcgatttgcagcagaacgcagcggtctatggtgcgcaaatcaaggggtcggcgtaccccgtctatctgtttggcagcgtcggcgccggggatggcatcgcgatgctgatcgtgacggtcgttgtgctggggctgtttattctgctgtggcggctgcttgcccggagctttttgcagatcgcaacggccacggggggaactgcaaaacgggtctaccggcagcgggaggccaagcgccggagcatcagcgcggcgctgctccagaaggagctaggacggtttactgcaagtcccagctatatactcaactgcggcctgggcattttgatgctcgtggcgggcggcattgtgctgctgtttaaagggcaggctctggtctcgcttttggatgcgcttctgtctggcacgcgcggtgcgccgacgttggtgctgtgtatgctcctgtgcttcctggcgtccatgaatctgatggcggcgccgtcggtctcgctggaggggaagagcatctggatgctccagtccctgccggtgacaccgtggcaggtactgtgggccaagctctctttgcagctgctgatgacggcgcttccagcgctgttctgtaccatctgtgccatgatcgtatgcccgatgacggcgctggagcggctgctgcttgtggtggtgccgctgttgtatgtagcgatgatggcgctggtgaacctcacactgggactgaagatgccaaacctacactggaccagcgagatcacgcccatcaagcagagcggcggcgttctgctggcgatgctgatcggctttgtctatagcctgctgcaggcagggtatttcctggctgccaaatggatgagcgcggccagctatctgggctgctacgccggactgacgctggtcctagcggcgctgctgctgggctggataaaaaagcgcggcggcgcgatctttgccgcgctgtgatggcaacttgttcgtttcttcttttataaattccatgcgcccctgcctagtctgcttgactgggcaggggctttttgcgcgatagatggaaaaaatttccgaaaaggcattgccaagtcggaaatcggcattgccgccgcctgggggatacgataaactaaaaccagatacatggaaaactgtagaaacgacaaaagggaggaaaacaatatgagaaaacggcttttggcttgtttccttgctctgtgcctgtgcgcagcgttgctgccggcctctgcattggccgcctatacagcgccagtgcagctcacatccgtccatgcagcggtgattgctccccaggcgggcatggcggtagagcaggctgcggtgacactttcggattcacatgactatattgcgtcctatgaatggaaagaggtggccgctgccgggagcacgacagctatcagatggatgttctgggagcatacctttgatgctgaccgctggtactgcctgaagctcacgttggctgcagattttggctatgtgtttgccgatgatattgcactggaaatcgaaggagcggcgcagaccagcgctcaaaagcgcggcgacgacttagatatctatgcctggtacaggctgggagacccgaaaacgaccacga

SEQ ID NO: 701 - DNA, 18979 bp, Unknown
  16S sequences of unknown bacteria
aatctctcattctcggcgctgaaaggaaagaagtaatccatggataagaagaaaaacaacctgtacgggacggacgaaaaagaaaagacacctgcagcagatcccgtgaattatatgaatcatatggcagagactgaaaatcatgtcgtatcggctgcggggatccgggcgatcaatgtggttaccagaggcgaacggatgaggcagtaccgaaggcggccgggatcgttttttatgctgtttcttgtgaccgcagcggcggtgattaccgtcgccgcactgctgctgctggtgggttatattctcatcaatggaattcctcatctgaagctttcgatgttctcctgggaatataccaccgaaaatgtctccatgatgcccgcgatcgtcaacacttttacgatggtcgggatgtcgctgatcatcgcggttcctctcggtctgttttccgcgatctatctggtggaatacgcgggccggggaaataaactggtgaaattcatccgtctggctgcggaaactttggccggaattccctcgatcgtctacggtcttttcggaagtctgatgttcggcgtatctctgcacatgggatattcgatgctcgccggtgcgctgacgctggcgatcatggttcttcctacgattctgcggaccagcgaggaagctctgatgtccgtatccgattcctacagagaaggaagtttcggtctgggcgcggggcgtctgagaactgtgttccgcattgtccttccttccgcggtgccgggaattctggcaggtatcatcctcgccatcgggcgcatctgcggagagacggcggcgctgatctatacctccggcacggtggcgggtattccggattctgttttagactcgggccgtacgctggcgatccatatgtacgcgctgttctcagaaggtctgtacatggatgaagccaatgctaccgccgtagtgcttctcatcatggtagtactgattaactctctgtctgcttttatcgcgaagcggttcggaaccaaagcacagtaacggtgtgctgtatcagatgcagaaaggattgaaatcagaggataatgacaatggataaaatcaaaatcgagaatcttgaattatattacggtgattttcacgccctcaaaacgataaatctcgatctgccggcaaatcagatcactgcgtttatcggaccgtctggctgcggaaagtccacacttttgaaatctctcaatcggatgaacgatctggtggagggctgtaagatcacgggaaagataaccctggacggggtggatctctaccgtgatatcgacgtcaatgatctgagaaaacgggtggggatggtgtttcagaagccgaatccgtttccgatgagcgtctatgacaatatcgcttacggtccgcgtactcacggcattcacaaaaaatccgtcttagacgaaatcgtagaacagtctctgagagatgcggcgatctgggatgaactgaaggaccgtctcaagaagagcgctctgggtctgtccgggggccagcagcagcgtctgtgtatcgccagagcgctggcggtgcagccggaagtcatcctgatggacgaaccgaccagcgcgctggatccgatttccacatcgaaaatcgaagatcttgcggaacagctgaaatcggactatactgtcattatggtgacccacaatatgcagcaggctgcgagaatttccgataagacggcgttcttccttctgggagaagtcatcgaatttgacgatacagaaaaactgttctctatgccgcaggacaagagaacacaggactacattacagggaggttcggctgatgagaatacgtctggaagagcagctgcagcagcttaatctggagatgataaagatgggtgtcttatgcgaagacgcgatcaataactccatcgatattctgtttgacgcgggcagcgatgcagaaaaaaagaagcgcaagtataaagaagtgagaagagcggacagcgaaatcgatcacaaagagcgggaactggaagctctctgtatgaagattctgctgcggcagcagccggtggcttccgatctgagaatcgtgtcctccgtcttgaagatgatttcggattttgaacggatcggcgatcaggcttccgacatcgcggagctggctcagtatatcataaagtcggatttgccggaaaagatcaagatcaaagatatggcgtccgagactgccacgatggtgaccgactgcatcgacgcttttgtaaataaggatctggaaggatgccggaatatctataaacacgatgatgtagtggactccatgtttaccgagatcaaagacgagattatccgtctggttcagtcggacaatgtggacggcgaattgtgcatcgatctgctgatgacagccaagtatctggaacgcatcgcggaccatgcggtcaacatcgcagaatgggtggaatattcgattaccggtacgcacggagcggagccggtcaggtaagagctggcgcggcgcgctgccgaagcggcttcggcgctggagaagatttcagagagagcggaaaggaaggcggaatgatttacttagtggaagatgacaacagcataagggaactggtgatttacacactggcgaattccggctttgaggcgcagggattcgatctgccttctcaattctggaaggcggtagacaaaaaagttccggacctcattcttctggatattatgctgccggaggaagacggtctgatgattctgaaaaaattgagggacaacccggcgacgaagcgcacgccggtgatgatgctcaccgcaaagggcagcgaatacgataaggttctcggcctcgattccggggcggacgattatctggcaaagcctttcggtatgatggaactcatcgccagagtaaaagctcttctgaggagaaatgagacgtccgcaccgaagaaagaagcctatcgtctgggatctctctacgtcagtccgaaggaacatatcgtcaaagtcgacgacaaagatatttccctgactctcaaagaatacgatcttctctgttttctgctgaaaaaccaggggctggtctttacgagggatcagattctgtcagaggtctggggctatgagttcaacggagaaagccgcacggtggacgttcacattcgtacgctgcggcagaaattaggaagctgcaacacactgatcgagacagtgcggggtatcggttataagatgggcgggaaaagcaagtgacgagaaaaatattccagtcgattatcggcgtcgcggtagccgtccttttaggcagcgtactcatcgtcatgggcgttctttactcttattttgaagaggaatcgatggatcagctgagaaacgaggccgcttacgcggcttcgggaatcgaaaccatgggagtggaatatctcgacggaatttcaaagcaggatgacagcgtccgaatcacgctggtggccgccgacggttcggtcacttacgacagcctcatggacgagcgttccatggaaaatcacagagagcgggaggagatcaaagctgctgtggaaaaaggagaaggcagcagtgcgaggtattcggataccatcgatgagaagacgatcaattacgctttgcgccttcctgacggcagcgtacttcgcgtatccagaacacaggtctccatctgggttctctttcagagcatgtcgcagatgatcgccatcattctggcgggcgccatcattctctcctgcctgatcgcttaccggctgtcccggagaatcgtccgtccgctgaacgaaatcgactttgaacacccggagaatacggaaaacttagcggattatgaggaaatcaggccgcttttgaataaacttcacttgcagaacaagatgcttcagaatgaaatggatgaacgtgaaaaaatgagacgcgaatttaccgccaacgtctcccatgagctgaaaacgccgctgacgtcgatttcggggttcgcggaaatcatgagagacggtctggtgaaacaggaagatatcccgcggttttccggaaagatttatacggaatcccagcggctgatccgcctggtggaagatattatcaaactctcgcagctcgatgagaaggaactgatgtatgagtgcgaatccgtggatctttcacagctgatcgacgaagtcatttttactctgacgcctgaagcgggtcgcagaaacatttccatcgcggcggaggccgcaccggtaaaggtcaacggaatccggcagatcctgatggaaatgatttataatctctgcgataatgccgtaaagtataaccgagaggggggaagggtgctgatctctctgggtcaggacggccggaaggtgcgtctcagcgtaaaagatacgggaatcggaatcccggaggaagaacagacccggatctttgaacggttttaccgcgtagacaaaagtcactccaaagaagtaggaggtaccggactggggcttgccatcgtaaagcatgcggcggcacttcatgagggaaagatcgaactgcacagccggtttggagaaggcacggaaatcatcgtcaccctgcccggggagacggcagaataattccggtccggcgaaccggaactctgccgttcggtttcatccggacggccgcataaggtttccggttccgtggtttgatacgtctccgagaaggcgggatctgtcagaaagtgccggcaaaagagcagagggctttccaaacgtcatctgagacgggcggaaagccctctttctatataaccgccgtcgattttccctgtaaggactttcatttcagattttccgcgggggcagtcatccggcagcagaagtctgagaagagatgcgttgccgcactgaaatcttcacatgttcggatcagatgtgcccgctcaaacttccctgagattccggttgccggacgaccggctgaaggaagcgaagggaaagaaaaataatatttaccttgattaattatattatctaagttacgattatatcctgacctgcgtcagaatttcctggcgcaggagaaaagaacggaagctgcagggcagagaatgtcgcgcatcagtctgcagcagggcaggtatggagggaaagacgaaaggtatacagattatatgaagtttgaaaatttaaatatttcatccgagattctccgaggtctggaggagatgggattttccgaggcgacaccgattcaggaacagtcgattcccgaagttcttcagggaaaagatctgatcggacaggcgcagacggggacgggaaagacctgcgcttacggtattccggcagtgcagatgaccgatcctcatgcgacggcgcctcaggtactgactctgtgtcccacgagggaactggcgtctcaggtagcagatgagttccggcgtctgacgaaatatatgcaggggattcggattctcgccatttacggcggacagagtatcgagaatcagatcgcagccctgaaaaaaaagccgcagattatcatcgggacgccgggacgtgtgatggatcacatgagaagaagaactctccggtttgatcatctgaaaatgctcattctcgacgaggcggatgagatgctgaatatgggattccgggaggatatcgatacgattctctccgaggtgccggaagaaaagcagatgcttctgttttccgccaccatggcgccggagatcatgaagctgacagagacgtatcagaaagatcctgtctatatccagatcgccaggaaggagctgactaccgatcttacggagcagcgctatatcgaagtgcgggagccgtcgaaaatcgagctcttatgccgtctcatcgatgtgaacggcatcacactcggtctggtgttctgcaataccaagcgccgcgcggatcaggtgacgtcccgcttgcaggaccggggctatgcggcggacgctcttcacggcgatatgaagcagcatgaacgggagcgggtcatgaataaattccgaaaggggatcacgcagattctcgtggctaccgatgtggcggccagaggcatcgacgtcagcggtgtgcaggccgttttcaattacgatatcccggaggatcccgaacagtatgttcaccgcatcggaagaacgggcagagcgggaaatacaggcaaggcctattcctttgtcttcggcagagacatgtataaactgcgggaaatcatgaagtatacgggttcttccatcggccggatgcgtccgccggcgatcagtgaagtcgagtcggttcagatcggcaatgccgcggaaaaagctgcggaactggttcgccggggcgcaggcagcaaatatctggaagtcatccgacagatcgctgagaagctgaaaagtgcggagcaggctgcagagagcggttccggcgcggaaatttcgggatctgagacagaggaaattctctcagacggagttttttcggagactgcaatttctgcggaaaaccgggaagaacatacggcggaggcctcttcgaaaacagccgcagatgcgccaggatatccggagttggcggcggctctcttctctctggcgttcagcgaactggaagggaaatcctatcagcatgctgattttgatgaacaggaattctcctatgacaagatgaatatgactcgtctgtttatcaatgcggggcggacagacggtctgagagaatcggatatcgtcaaggcggtggcttccggaacttctctgagcggcaggatgatcgggacgatagagcttcacaccaatttctcctttgtcgatgttccggaatctcacgcggatgaggtgatttcgtctatgcgggattaccagctgaagggcagaggtatttctttcgaacgggcttccaaaaagcgcagaggaggttcttccggaaagaagaagggcggccgcagaacggatagcggcagccgcgacagaggcgacagagagcgtgcccggacgaaacgccagaaccgtgagagcagcggttattttatggaaaacaatgattcggataaaggacgtcagcgcggcaatggagacgcttatcgaagacgaaattccaaattttccggaaagggccgcagaagaaagtagcggcggccgtggaacaggcgagtgaagacggaggaagaattacgtctgccgtgtctggtttcggctgcggacggattcggaaatcagctggcaatctgaagaaagatcaggctgtgagagaagactgcggaagcagtcgtctttcgcggcttttttctctttttgaacaacaatgtgtttacaaaagtcccggaatgaaatataattgtatacaataaagcgatatgtatgttatgtatgctttaaaacatgtattgagatgcggggcaaaagcggtcagccgctttgcgcgctgcggaacggaagccgccgcacagctgcggaagcttgcgttttcactgttatttcacgttcaggaggcgtttttatttaaatgggaaagacattagcatataaaatactggaaaatcatctgatcgaaggaacactctctccgggagaggagataaaaattaaaatcgatcagacgctgacccaggattctaccggtacgatggtttatcttcagctggaagctatggatgtagaaaaaattcagaccgagctttctgtcgcttacatagatcacaatacgctgcagacagggtttgaaaacgcggatgatcacgagtttatcaagagtgtggcgaagaggcacggcgttcttttttcaaagccgggcaacggaatctgtcaccagctccacatcgaaaatttcggtattccgggaaagacccttctcggttctgacagtcatactccgaccggcggcggcatcggtatgatcgccattggcgcgggaggcctggatgtggcggtagcgatggccagaggaacgtattctctggtgacaccgaaggtgatcaatgtgaagctcaccgggaagctgaggccgtgggtttccgccaaagacgtcattttgtatgttctgcagcagctttctgtcaagggcggcgtcggaaagatcgtagaatacaccggcgagggcgtgaagacgctctccgttacagaccgggccactatcacaaatatgggtgcggaactgggagctaccacttccgtgttcccgagcgatgaaaatacgaaagcgtttatggaatctcagggccgtggcgatgatttcgttcctctggcgccagatacggacgctgtctacgacgaagtcctggaagtaaatctctccgagttggagccgctggcggcaaagcctcacagcccggacaatgtggattccgttaaaaatatcggaccgatcaaaatcgatcaggtagccatcggaagctgtacgaattcttcctatacagatctgatgaaagtcgcggcgattctcaagggcagaaaggtcagcgaaaacgtcagtctggttatttcgccgggttccagcaagattctggcaaagttagcttccaacggcgctctggcggacatgatcagcgccggcgcgagaattatcgagaatgcctgcggtccgtgcatcggtatggggcagtctccgaaatcttccggcgtctctctgagaactttcaaccgcaactttaagggaagaagcggtacgaaggacgcggatatttatctggtcagtccggagacggcggctatttccgccatcgaaggcgtgctaaccacggggatgaattcagaactggcagagattccgccggtgaacttcgatttcaacgacaactttatcgtctatccgaaggattccaataaagagaataccccggtggctatgggaccgaatattaaaccgtttcctctcaacgtggctctcggcggcgctctcaaagcggaagtcgtactctgtgcgggggacaatatcaccaccgatgacatcatgccgtcggattccaggattctcccttatcgttctaatgtgccttatctttcgaattattgtttcgaaaatatcgacacggagttccctgcccgctgcaaagccgcgggaaacggcgccgtcgtcggcggtgaaaactacggacagggttccagcagagaacacgcggctctcgttcctctgtatctgggcgttcgcttcgtcatggcgaagtcttttgcccgtattcaccgctccaatctgatcaacagcggaatcatccctctggtctttgcagatccggcggattacagcacgctgaagctgggcgataagctgatcatcgaggatgcggcggcacaggtggaaagggaggaaattatcgtcagaaatgagacgacgggaaaagaatacagaatgcttccgaatctttctgagctggaaaaaaagatgattctcagaggcggaaagatcaatctgatcaaaagcgaagaatagaaggggacgcggaaatggattatacagaaaaatttgaggaacttgtaaaagaacagctgaaacgtatcgagaagctgaaaaatgaacctccggcgacggatttttccaaactggataagatcatcatcggttttgtggacggcgacggcatcggtccggtgatcatgagagcggcgagaaaagttctggatgagattctcgcagaggatgtggcacagggcagaatcgagatgcggaccatcgaggggcttactctggaaaatcgggcggctaaaatggaaactctgccggatgacgtactggatcagatcaagcagtgtcacgtctttttgaagggtccgacgaccactcccaacgagacgatgaatatgccgaatctggagagcgccaacgtagctctccgccgggaactggatctcttcgctaacgtcaggccgatcagcattccggaaaagggtatcgactggacattttaccgggagaatacggaaggcgaatatatcgtgggaagccgcggcgtagatgtttccgacgatctgtgcatcgactttaaagtgacgacgacccaaggaacggagcggatcgcccgcatggcttttgaattcgccagagccaacggaaagaaccgggtcgaatgtgtgacaaaggcgaatatcgtaaaaaagacagacggacgttttctcgatgtcgtacataaagtcggagaagaatatcctgacattcgggtcgaagactggtatattgatattatgactgcaaatctcatcaatgaggatctacagagagattttcaggtcttcgtactgcccaacctttacggcgacattatcaccgatgaagcggctcagattcagggcggcatgggtacggcgggcagtgcgaatatcggcagtcagtacgctatgtttgaagcggttcacggcagcgcgccgcgcatggtggaggaaggaatcgaagaccgtgcaaatccggagagtctgctgaaagctgcggaactgatgctgcgtcatatcggttatgcccaaaaagcagagcagctgagaagagcggtggactccgcggcttccgatccgtcacttcggatgacgggaacaagggaaggcagctccacagatgatttcacggaagctgtgctgaaggcccttaactgagagcgataaagctgtcacatgcagaaggaggaacagaaaaggtgtattataagaacacgagagacgacatagtatcgggacttccgcttgcgatcaatatatttatcaagctcagagaagagatcttgcagggattgctgaaaaacggcgagaagctcacagagcagagaatctgcaacaagtataatgtcagccgtacgccggtgagagaggcgttccgcctcttggagcaggaaggcctgatcgagatgattcccaaccggggggcttttgtcacaggcttcggagatcaggatgtggcagacatgtatgagatgagaaaggtatatgaagttctggcttttgaatgggctgtggaacggatcacgccggaagagctggaagagatcaaaaacgcgtatgaactcatggagttttacactcataagaaagaatacgaaaagacttcggagcaaaatactcattttcacgaactgatctacaaagcatctcacaacagactgctgacgcagattctgaccagttatcagtattatacgaaacaatttaaggtgggaagcgaggccaattacgatcacatggacgatcttttggaggaacattacgaaattctgcagtctctggagacgaaagatgcgaagcgcgggatggcggtgatcaagaaacatctggaaggatcgaaagagcgagcgggatacggcggatttaaaagttacgaagtgtagaggtctccttttttccggcggtaagataagatgaaaaaattaaaaaaacaagatgtagcaaaggttttggaactgctgaaggatacttatcccgacgcgggctgtgctctggattttggcagcaattatcagcttctcaccgcagtggcgctgtccgctcagacgacggacaaaaaggtaaatcaggtgacggaagggctgtttcaactctgtcctacggcagcggagatggcggaattcgacgaagaggagttgcagaggatactgaagcccatcggcatgtataagtcgaaagcgaaaaataccatttctatgagcagaatcctgatggaaaagtacggcggagaagtaccggaggatcaggctctgctggaggaacttcccggcgtggggcgcaagacggcgaatgtagtgctgtccgtcggcttcggccatcagaggatcgctgtggatactcatgtctttcgggtctccaatcgaatcggactggtggatgaaaaggacgtgttatccacagagaaagcgctgatgaaagtcataccggaggatcagtggacggtgaatcatcatcggctgatctggcacggccgcacactctgtacggccagaaagcctcagtgcggggagtgtcctctgctgggaatctgcctgcagaagatgggaaaatagcaacaggaaaaatatagaaggaaagaagggatatcaaaatgacgaagacaatgtctttttacggatgcgataccggacagctcgcggaggaatatggcacgccgctctatgtggtatccgaggattttatcagagagcgctgcagagagatgaaacaggattttctgcaaaggtatgagaacacgaaagcggtttacgccagcaaagcgtttcaggttctggaggttctgcgcatcgtggcgtcggaaggtctcggcctggacgtggtgtccggcggagagctgtacgcggcgcttcaggcgggatttgaccccgccctcatcgaatttcacggcaacgcgaaaagtgaacaggagctgagggcggcgttggaagccggagtgggaacgatcgtggtggacaatctgtctgaattaattctgctggatcagctggcgggagaagcgggcagggtacagtccgtgctcctgagagtgacgccgggcgtggacagccatacccatgagttcatttccaccggtcagctggattccaagttcggttttacggtggaagagatcctcggaggtgtggcgaagcaggcggaggattctccgaatatcgatctcaggggatttcattatcacgtaggctctcagcttcacgacaattcttctcatattatggcgacggaaatcgttctgaatatgctgtctgagctgaaagaaaaaaacggctacgaggcgagggagatcaactgcggcggcggattcggcgtacattatgccggagatccgcagagaacgacggtttcctattttatggatcctgtgatgaagctgatcgaccggttttgttccgagcacggtcttgtgcggcccacagtgacgatcgagcccggcagatgggtggtaggagaagccggcatcactctgtatgaggtgtgttccgtaaagacaaatgccgcgggccgtacgtatatcggcgtagacggcgggttcccggacaatccccgcccggagctttacgatgcgaaatacgaagtggaggcggtggaaaagcacggggagccttacgatcagctggtgaccgtagcgggtaagtgctgtgaatccggagatatcgtcgcctgggatgtcaagctgccggaattagagagaggcgaccacatcgcagtgctgtgcacgggagcatataatcatgctatggccagcaattacaaccggataccgaagccggccgtggtcatggtaaaggacggaaaagcgcgtcttgcggcgaagagagagacgtatgcggatctgatccgtctggaaatctgaaagaatctgaaatccggaagaggaaaagccgcgaagcggattcgaattccgggaaaacggatgaatgaaaaacggaaattcaagttcagagttcgggttcatccgcgagaaaacagataaaggagtgaaaggggttcaggtatttccgcctgagcccctttccggtatcatcgttctctcggcgatttgccgggtgaagcggagacggaagcatggaaagacgaatgaaatcctatctctgtttgcggatgcagacagaggaaagcctcatgcaagtgttcccaaaatctgtgattttgaagaacatgcggcagcctgtcttctcggcggcaggtgagtgaggacatacaaaaagagaaagcttgagccgcggctgatacggagtgagactgcaccgatgtctttttcctttggatcgcgcggcgccggattttaccgcagcggctgagataaaatctgctgcggatcatctgttgagcgaggcgaagatatcggaatctttagataggaggaatttcccttgtactggtatgaaattgaaagtaatctgattccgctggaacaggaaccgccgccggagcggccggccgtcgtactgcttacttcggaggaattattccggcagccgcagttgtccggactggagagggcgcttcgacatacgcccgccgcccgcgatgtcagaatatgcaaagcagaggcgcgttctgattacctttcgggaacactgattctgccacggatgacaaagagcggagtgcgtctgacttacggctatctgatcacccgcgcccgagtcgtgctggtagatgacaccgggtcgcttcagtcacatttaaagcattttgtaaaagagagactttttgtcggacagggaaccggacgctttttttatgaactgctggaacagctgattgccaaagatcttcatcatctggaagagattgaggatcagatccaaatgctggaggatgaagttctttccggagaatttgaacgtttcagcgcttctatgaccggactgcgaaaaagcacgatggcatggtttcggtattattcacagctgggcgatgtggcgtgcaggctgcgggaaaatcagaacggatttttttccggaggggaacagcaactgtttcatatgtttgacgaccgagtcggccggctgcgggaggaatcccggcttcttcgggaatattgcgctcaggtgcagaccatgtttcagtctgagatcgatatccgacagaacaggacgatgaagattctcacggtagtcactacgatttttctgccgctgtcactgctggcgggctggtatggcatgaatttccggggaatgccggagttgtcatggcggtacgggtatcccgcggtgatcgctgtcagcattgccgttgtatttatcagtctttggatctgtaagaaaaggaaattctggtaaatactattattccggagggaaaatagaccgatgcggttcctgcgccttttcctctgcgccagcccggctgccggtgtgcggaaatggaaaaaccccgctccggagaagattgatcttctccggagcgggggttttctataaagagtttgtttggtttctatagattttgttaagtttcgataaaaatttataaatcatatgataaaaaatatctattgtattgtcataacaagtaaaattctgtaaaattattcgtccagacctttgcgtttcatcacaaattcacggaagttttccgccgccggcgtgagataggactcccggtttgtaatcatgtaaaaacgtctctcccaggaagggcgggaaatctgaagaatccgcactctgagctggtggagcatatccatataaggtacgacagcgatgccgaatcctgcggaaaccatcccggcgaccacctggtcttcatcgatttcatagaccacattcggagaaccgccgactttttcatagagatcgtcgatgatccggcgaagtcccgagtgttttttaaagtgaatatagggatactcgacggtatcgctgagatccaccgtataccggtccgacagaggatgatcctccggcacgatcagtaccaggtcctggcggtttaccggaatacattcgaaatttccggaagcgggcgctgtcgcaaataccacgtcaaaacggcgctcgtccagaccgtcgatgagtttctgagaaacatcggaatcgatggtaaaggtgatcttccgttccgggttggctttctggtacgaggcgattaattccggaataaacgtaattccgagagtccgcagaattcccaggcgaattagtccgtcccccttcgccgccagacgaagagattccactccggaatccagtgtggccagtgcggccagagcgcattcgaagaactgctgcccgtagacagtgagactgacgcgccgtccgtttttttcgaaaagccggatgcccagctctttttccagctgcgccatggcgttagagaggctgggctgtgtgatgcacagtttttccgccgcgcgggtataatgctgctcgtgagccagttttacaaaatatctgagatgaaataagttcatatgttttctccgaaggtcaggtcctctgctgcagttacggctcttttcatgtgtatttatcagaacaatttatatattaacacaaattatggatgaaatctattgatagagaatatctatgccaacatagcaattacaaatttgtgaaaaaattatcgctgtgatactttagagacgaaccggggaacggaactccggaaacagaactgagaatggccgatcacagtctgataaaaagcattggaaaatacggttcgcagaaatccggaaagggttgggcagccggcggaagagagacagctttcctcagacaggagaagcggagcgacaggaaaaaatggaaaaggagacgagtgaaatgaacatttcaggcagcacgacaatgctcggactgattggaagcccggtaggacattccaaatcgccggaaatgtataattactgttttaaaaagtacggctgtgactgtgcttatctcgcatttgacgtgacagaacgggaagtcgaaaaggcggtaaacgccgtccgcacttttcagatgagaggagctaatgtgacaatgccgctgaaaaatgcggtgctcccttatctggaccagctgacgccggctgcgcagatcaccagatccgtaaacactatcgtcaacgacggcggtgttctgacggggcactgtacggacgggaagggatttacagcgaatctcgcttccggcggattcggagtaaaagataaaaaaataacgattctgggcggcggaggagtctcttccgcggttgcagcccagtgtgtgctggagggcgcggaggaattatccatctttaacagaaaagataaattctgggacagactggagaggtatgccgaaacgctgagaagcgaagctccgtcctgcagcgtaaatatatatgatctggacgatgaggaagctctgaggagcagaatcgattccagccacctccttgtaaacgccaactgcgtcgggatggcgcctttggaaaacgagagtctgatcaaagacagcagcgttttcagagaagaccttacagttgcagatgtagtgtattctcctgcggagacgaagcttctccgggaggcgaaggcgtgcggctgccggactttcagcggtctgggcatgctgctccatcagggcgcagaagcgtttcggctttacacaggactcgagatgccgctggaggagatccgccggcttctttacacatgataaattgattttgcggaggaatttatgacaacgaatacagcaacgaacagcagcagaaaatattaccctacggcgctggcgctttacatcacatattttgtactgggcatctcggcgtcgatcatgggtcagtacaaacagaattttgcggatctgtggggcgcttcccagctgagcgacggatcctacgacgtgtccggagtcgtagcggtaatcgcggctatcggtctgggccgcctgctggcttttccgatagcgggtccgctgtccgaccgtctcggaagaaggctcagcgcccttatcggatgcgttctctacgcgatctttctgatctgcgtcacttttacatcgaatatgtatctgggatatgctctggccatcatcagcggtatggccaattccttcctcgataccagcatcactccgtcctgtatggaaatctttaaagaaaagggaaccgtggcgaatatgtttacgaaactctctgtttccatcgcacagtttgtccttccctttctcatcggctttgtcgcagtgcgcgggcttccgttcaacacgctgtttctggcgactgcggccatcatcatcatcgacggtattttcctggcctttctgccattccctccttttgagagaacgataaagatcaaaggagaaaaacagaagaaggacaaaatgaaatttacgccttctgccatcatcctgatctgtctcgggtttaccacatcggcgactttcatgatctggctgaactgcaactttgaattgggaactctctacggtctggcggatccgtctaagattcagtccgtctattccgtaggcatcatctgcgcgcttttcgtcaacgcggcgctgatggcgaaagggctgaaacccatccgtatcctcctgatctacccttgtgcggcctttgtcacgctgggtatgacttacttcattcaggccccggctatgtgtcttgccgcgggattccttctgggctttttcgctgccggcggcgtacttcagatcgttacggcagttgccaacgaaatgtttcctaagaacaggggcgtgatcacttccatcgtaatgatcgcctccagtgtggcaaactatgcggtgctcaacgtagccagccttctgacgaaaatcggcggaacagaaggtccgcggatggtagttctcttcaatatggcagttacgctgatcggaattctcctggcggcagttctcacccggagattcgataaagactcggaacctcaggcataatcgccggagaaaagaggcggcgtacccggaccggcggccgccggtccgcaggatgctataaaattcctgacagaataaattaaaaaagaaatatgaacaatccggggaactgacagtatttaaaaagcaaaatattagaaaataaagaagaaaaaggaatatgaaaacaaatcaacttcagaaaaatatatttctcatcggttttatgggatccggcaagacctccgtttcccttcagctgtccgacatgaccggcctgaaaaaacaggagatggatcagattctgactcagcgggagaagatgactgttgcggagatcttcgagcgaaaaggagaaccgtacttccgggagcaggagaccgtgcttctgaagcagtttggcggaggcgatcctcagatcatttcctgcggaggcggtgtggccatgaaagaagaaaatgtaggaatcatgcgtgaaagcggaactgtagtctgtcttaccgcctctgcagacgtaatttacgagcgggtgaaagacagcagagagcgtccgattctcaacggaaacatgagcgtggaatacatacagcagctcatggaggcccgccgaccgttttatgaagcggcagccgatgtgatcatcgatacctctcatatgcggatcgaccaggttgcggaagcggtattgtcggccgta

SEQ ID NO: 702 - DNA, 32759 bp, Unknown
  16S sequences of unknown bacteria
cggttttttcgcggctttttaacttgtgtttaccggatgcggaaaaaagttcatatttctctttctcttttttcacaaagaaaagtgcggaaagactttacatatacggggccgatattgtaaaatagatacaaattgagcaatgacccaaaaaaacgggagcgtgattggcatgggcttaaagtataaacggattttactcaaactgtccggagaagcgctgtccggcgagcagaaattcgggctggattacgatgtggtacaacgcatctgcgagagcataaaaaaatgcacagagctgggtgcagaggtagctatcgttgtaggaggaggaaatttctggaggggccgcagcagcgggaaaatggatcgtacccgggcggatcatatgggaatgctgggaacagtgattaacgctttggcgctggccgacgcattggagcagttggaagtgccggtgcgggtacagaccgctatcgcaatgcagcaggtggcagagccgtatgtgcggggccgcgcggtgcgccatctggagaagggacgggtcgtggtttttggctgtggaaccggtaatcctttcttttccaccgacacggcatcctctttgcgtgcggcggaaatcggcgcgcaaattatgatgaaagcaaccatggtggatggcgtgtacgataaagatccccataagtatgacgatgcggtaaaatacgatactctgaccttttccgaggtgctcaataaggaattggcggtaatggatatgacagcggcttccatgtgcaaggataatcatatccctgtgctggtttttgatattggccagccggataatctggttcgtgcggtgcagggggaggatatcggcactttggtaacggaaggctgagaataaaagatattagtgcggcggccggttcggcagccggtcggagccgggctttttggcggagagggcggcttgcggatcgaaaatagaaaaaccgccagagaaagggagcgtttttttatgaaagagcatctgaaattgtacgacgagaaaatgaccaaaacccttggtgcgttgaaccatgagttttccgctatccgggcagggcgggccaatccggcggtgctggataaagtgcaggtggattattatggagttccgactgcaatcaacgctatggcggcggtgactgtttcagagggacgtactctggttatccaaccgtgggataaatcgacattgaaaagcattgaaaaagcaattttggcctctgatatcggaattaaccctgccaatgacggcaatgtaatccgtctgactttcccacagcctacggaagaacgacgccgggaattaaaccgtcaggtatccaaaacagcggaggattccaaggtggcaatccgctccgtccggcgtgacgcaatggaaaagtataaggctatgaaaaaaagcgcggaaattacggaagacgatctgaaaggatacgaaaaggatattcaggatctgaccgacaaatactgtaaagaaattgataaaatggctgaagcaaaagaaaaagagatcatggaaatctaacaaagatttggtacggatgaaaaaggcataggctcagcctatgccttttcgacgaatatcgggtgccgcgccctatgtccggcggccgccttttcggggcgtataggagagttgtatttatggcagaggatcagaagggttctttttcggttccggcgcatatcgccattattatggatggaaacggccgatgggccaaacagcggggtttgccgcgtaatgtcggccacaggcagggggcaaaggtgtttgagaatatctgcggctattgccagaaaatcggcgtaaagtatgtgactgcctatgccttttccactgaaaattggaaaaggcctcaaagcgaaataaacacaattatggaactgctgcgcagttatctgaaggaagcctccaggcagacaaagcggaatgtgcggctgctgtttttgggtgatcggacgccgctggctgaagatttgcagcggcggatggaaaaagcagaacgggaaagcgaaaaaaatacggggatcactgtctgcgtcgccctcaactacggcggacgggcggaaatcgtgcatagtgcgagggaattggcacgaatggcatccagcggaacactggacccggacagcattgacgaggaactgttcgggaggcatctttatacaggagggatcccagatcccgacctgctgattcgtcccagcggcgaacttcgcatctctaattttttgctgtggcagctggcttatacggaatttgtttttcaggatgtgctttggccggattttaccccggcacatctggatcaggccattgcccaatatgcaaaacgaaacagacgatttggaggcatttgatgaaacagcggattgtaacggctgcggtaggcctgacgattttttttgccgttttggcattgtatcatactgtttttttaaatatcagcgtggcggttattatttttttggcgctgtacgaaatgttccatgtgaccggcgtgtgggaaaataaggtgctgtccaccgtctgcctgctgtttggctgcgcgctcccgtttttgaatgtcgaacagacccgcagttggctggtatgcggagaggctgtttttgcgctggcactttttggtatcctgcttgtttatcacgaatcgctgcattacgccaaagttgcaacggcttttgctgcaaccagtgtgatcgcctacacgaccagtgttctgatctggctgcggcaaatgagcgaaaccgcgctgatagggatttattatacactgttggcttttgggttggcttggctgaccgatacgggcgcctatcttttcgggattaccatgggaaagcataaactggctccgaaaatcagcccgaaaaagactgtggaaggcgcagtgggcggcgtggtgttctgtgttgccacagtgcttttgctgtcgctcgtttatcagtggatctgcagcagtgtttggggcgtttcgctttcggttgattactggcggcttttgctgctggtgccagttggtgctttgatctcaatgttgggggatttatccgcctcgctgatcaagcggcagtgcggcgtaaaggattacggttctctgatgcccgggcacggcggaattatggatcggtttgatagcgttttctttgtcttgccttttttggttttatttatccggctgttcccgattgtctgacagccttttggaggatccgcatatggagcagaaaagaattaccattttgggttccaccggttcgattggaacccaggctttgcaggtggtccgccgcttggggtaccgggtggaggctatttccgccaacacaagtattgatttggcagagcagcaggctcgggctttttcgccccgctatgcggtgatgatggacccgcaggcggcggcggacttaaaaatccggctggctgataccaacacgcaggtgttgtgcggaatggaaggtctgtgccgcattgcggctttgccggaaaatgatttggtgctcaactcggtggtgggtatgatcggtctgcggcccactcttgccgctatcgaagcgggcaacgaactggctcttgccaacaaagaaacactggtggcgggtggtcagttagtgatggaagcggcacggcgcaaaaaggtgcgtattctgccggtagatagcgaacattcggcgatttttcaatgcttacaggggaatcctaaaaaggatgcgctgcataaaatcattttgacagcttccggcgggccttttttcggaaagaagcgggaagagttggagcaggtgacggtgaaacaggcattgcgtcatcccaattgggtgatgggcgccaagctgaccattgattcttccacattgatgaacaagggtctggaggttattgaggccagctggctgttccaaaaatcggtagatgccattgaggtggtaatccaccgggaaagcgtgattcattcgatggttgaatatgcggatggctcctgcattgcccagctgggagtgccagatatgcagattcccattcagtatgcgatgacctatccgaaccgggtgcccagcggggtgaagcctctttcgctggcggattacgggcagctgaccttttaccgtccggatctggagacgttttcctgtctgcgggtttgcatggacgccctgcggatgggcggactgtatccctgtgccgccaacgctgccaatgaagaggctgtggcgttgttccgggaagaaaaaatccgatttttgcaaatcggcgagttggtggaaaaagcggcttttgcccagcacatgccgttggaatatacgctggaggatgtattttgggcggagcgggaagcccgccgctttgtaagggaacacggcagataagttgggcggactttctcgtattgcggaaaaagaaacgcactagaaagctaacatataggcccgaactgttccgtccggtcgtttttagggaggaagcaaacagccgcgctgcgcggcgaaaggggatttgagacttgggtattattttgacgattcttttgttcggcgtgctgatttttattcatgaattcggccattttatcacggccaaactctcaggcgttaaagttaacgaatttgcgttgggtatgggcccggtcatttggaaaacccgcaaaaaggatacgcagtatgcactgcggctgctgcccatcggcggatttgtcagcatggaaggcgaggatgaggacagcgaggaagaagggtccttttccaaggcgcggatctggaacaaaattttgattgttaccgccggtgcgctgatgaacctgattttaggatttttgctgctggttattgttgtcagccagcagcaggccattggtacgaccaccgttgcccggtttgaggatggggcgaccagcagccagatgctgcaggtggatgataaaattctgaaaatcaacggctcgtcgatcaacattgattatgatatcatctataccatgatgcgggattccgatggcgctgtggatatggtggtattgcgggacggccagaaaatagagttaaccggtattccgttttcaacggaggaaatggaagacggaaccgttaccacgactcttgattttaaagtgtacggaagggaaaaaacggttgggggagtgctgcgccaggcatttttttataccggaactgtggcaaagctggtatggacatcactgatcgacattgtcaccggcaggttcgggatcaatcagctgtccggaccggtgggggtagcatccgccgtgggagaagcaagctccatgggactatcttcctttttgatgctggcagcgtttatcaccattaaccttggcgtgttcaaccttttgcccatccctgcgctggacggcggacggcttttgtttttgctgatcgaggcggtacgcggcaagcctatcaaccccaaatacgagggatatgttcatgcgctggggtttgtgctgttgtttggcctgatgattattgtgacttttaacgatattgtgcggctcttccgagggtaaatttgatcatccagaggtgaattccatgattcgtgtttccaagcaggtaaaagctggaaaggtgctcattggcggagatgcgccggtgagtatccagtctatgttaagtcggccagcggcggatgtagagggaaatatccgccaggctctagatttggaaaaggccggatgcgagattgttcgggtggcgattccggatatggatgcggtgcgtctggtggatgccattaaaagccagatccagatccccttggtggcggatatccatttcgattaccggctggcattggaatgtgtggcggcgggaatcgacaaagtacggatcaatccgggcaacattggggataaaagccgtgttcgggcggtagtgaaagcgtgcaaattcaaaaatattcccatccgcattggggtaaacagcggttcgctggaaaaagaactgctggaaaaatacggcgcacctacggcggaagcgctggtggaaagcgcgatgcggcatgtgtccctgctggaaaaaaatgatttcgacgatattgtgatttccattaagtcttctgatgtaaaaacaatggtggatgcctatcgactggcggcccagcggtgtgaataccctttgcacctgggtgtgaccgaagcgggtaccgaacggatggggctgattaaatcggctgcgggaatcggttctttgctgttggacggaattggcgataccatccgtatatcgctgaccgatgatccggtgcgggaaattgccgcagccaaggatattctcaaagccatcggactgagggaggaaggggtgcgcattgtatcctgtcccacctgtgggcggaccaatattgacctgattgctctggccaatcgggtggaggacaagttgcgagactgccccaagcccattaccgtagcggtgatgggatgcgcggttaatggtccgggagaggccagagaggctgacattggcattgcaggcggcgtgggagaggcgctgctgtttaaaaagggaaaaattctgggaaaattcccggaaaaagatattttaaatgttttgttgtccgaaatcgaaaagatgtaaaaacaagaaaggggaaaggttatggattccaattgcttcggcgcgctgttcggcggcctgtgctccaatttgccggactgtatggcgcaggcgcaggtggcgtccatgaccgtttcccgggaaaaagcggaactgcgggtggggctgcggatggcctccattgcaccgaaagcccggctgtatgaagtgcaaaagcaactgtgtgaaaagctgcggctgaaaaaatgcgttctgtctccccaatatgatgtatcgctgctggacggcagctatatagaacaggtagtggaggaactgcgccaccgcaactgcttggtcaatggttttttggacggggtgagcgctgattatcagggcggcgtgatgcagattcatttaaaacggggagggctcgctctgttgcaaagcgccggaagcgaccggcggattcgtgagatcctgcggcaggagtttggcgcggacatagaagtggtgtttgacggcgtgactgaactggaggaatattctaaggaattcacccagtccgcagaggaaaaccgccagaagattgtaaaaatccaacaagaaaagcagcaggcggtgcaggagaaaaaagcggcgccggtcaagtgccagaccattgcctttgacacaggagacctgccgtttgataaggattctctggcggtggtcaccggacgtgcgatcaaggaaaagccggtttcgttggattctattgatgcggagagtggtaaagtcactgtttggggcgatattttcgcagtggacagccgagaatctcgggatggttccaaggtgattttggcgatccattttaccgattataccagttccaatgtgatgaaggtcattactgaaaaggaaaaagcggcgatctatgaatcgctgaccaaaggcaagacggtgctggtacggggagaagcctcttacgataaatatgatggggaaatttccatccggccgtacgacatttgcaccgtgaaaaaactgatccgacaggatcaggcggatcaaaagcgggtagaactgcatgcccataccaaaatgtccgctatggatgctgtggtaaccgccaaggatttggttaaccgggcatatgagtgggggcacaaggccattgccatcacggatcacggagtggtacaggcattccccgaggcggcgggcgccgcggcggcaatcgccaaatccggtggggatttcaaggttatttatggggtggaaagctactttatcaacgatatgatcccgattgtcaacggagaaaaggatatgccgctgatgggttcctacatcgtttttgatctggagactaccggcctttctgctgggaacgaccggatcacagaaatcggtgcggtgaagctggaaaacggggaggtactggactcctttaatatttttgtcaacccccagcgccccatccccgaaaaaatcacgcagctgactggtattaccgacgagatggtggctgacgcaccgctggaagaagaggcgctgcggcaattttacgctttctgcggcggggaagatgccgtgctggtagcacacaatgcgccgtttgacacgggatttatcaaagcggcggctagccgctgcaaaatgccgtatcggtttaccgcgatcgatacagtgcccattgcgagaaagctgtttccgaatctgcgcaatcataagttggatacggtggccaagcacctccagctgggtaattttaatcatcatcgggcctgcgatgacgcgcgcattctggcagaaatctacatcaagctggcacagatcctccaaaaagaaaaggaaatccaaagcatccagcagattaataccggactgtccggggtggattataaaaatgcctactcctatcatcagatcattctggtcaagaatctgacgggtttaaaaaacctttaccagctggtttccaaatctcaccttgactattattataaaaagccgcgcatccccaaaagtgagctgatccgttatcgggaggggctgattttgggaagtgcctgtgaggcaggcgagctgtttcgggcggtggtagatggaaaaagctggggcgaactttgcagcattgccaagttttacgacttcttggaaattcagccgattcagaataatatgtttatggttcataatggtaccgccaaggatgaagaacagcttcgcagttacaaccggaccattgtacggcttggtgatacgttgaagattccggtatgcgccacctgtgacgtacatatgatggacgaaaaggacaacattttccggcagattctgctggcaggcatgggctttaaagatactgaccaacagtcgcctttatatttgcggacgacggatgaaatgctgcgggaattttcctatctgggcgaggaaaaggcctatgaggtagttgtgactaaccccaacagcgttgccgaccgggtggagaaaatcaaaccgattcccgacggcacttttacaccgaccatcgaaggggcagaagaagacctgcagaacatcacatggagcaaggcgcgggaaatttacggcgatccggtgccggatctggtagccaaacggctggaccgggaattgacttccatcatcaagcatggttttgcggtactgtatatcattgcccaaaagttggtttggaagtcggtggaaaatggctatctggtaggttcccgtggatcggtgggatcttcgtttgtggcgacaatggctggtatttcagaggtcaatccactgccgccccattacgtctgcccctactgtaagcacagcgaatttattaccgacggttcctacggctccggattcgatctgccggccaaaaattgcccggagtgtggtacgccgtatcaacgggatggtcacgacattccctttgagacttttttaggctttaacggcgataaggcgccggatatcgacctgaacttttccggcgagtatcagaaccaggcacaccgctacacggaggagctgtttggcaaaacccatgtgttcaaggccggtaccatttctactgtggcagagaagaccgcttacggttttgtgaaaaaatatatggaagagcggggacgggttgttcataagtcggaggaacttcggctggcagccggttgcgccggagtcaaacgaacaaccggccagcatcccggcggcatggtagttgtgccaaatcaatttgaggccgccgattttgcgccgattcagcatccggcggatgacgcgggttccggcattttgacgacacattttgacttccattccctgcatgacacgattttgaagctggatctgctgggccatgatgtgcctactctgtataagcatctggaggacatgaccggtgtaaaagttatggaagtagatacctccgatccgaagatcttcagcctgtttacctcaccggaagcgttgggtgtgacggaggaggaaatctcctgcaacaccggttcgttggcgttgccggaaatgggaaccaattttgtccggcagatgctcattgacgcgcagccaaagacttttgcggaccttttgcagatatccggactgtctcatggtacggatgtatggctgggaaatgcccaggaactgattaaaaatggcacctgtaccatctctgaagtaatcggtacccgtgacagtattatgatttatctgattcaaaaaggtttggaccccaatatggcgtttaaaattatggagattacccgaaagggcaatgcgccgaagcttttgaccgacgagcacaaaaaggccatgctggaacatggcgttccccagtggtatatcgacagctgcctgaaaatcaaatacatgttccccaaagcccatgctgcagcctatgttattgcggcgatccggctggggtggtataagatttattatccgctggaattctacgccacctttttcaccgttcgaggtgaggattttgatgcggacgctgccatcaagggaaaagcggctgtcaagatgaaaatggacgggctgaagatgaaaggaaatgaacgcactgcaaaagaagaagagcagtacagcagcttgcagattgtcaacgagatgctggcgcggggtttatcctttttaccggtagatttgtttcgatcgcatgcgacccaatatcaggtggaggacggaaagatccggctgccgtttaatgcgttgaaaggccttggcgtcagcgcggcccaaagcttacaggaagcggcggcagaaggaccctatatttccaaggatgaggtacagacccgcgcgggcgtgtctaaagcggtgatcgaaattctcgatcaatctggcgctttggacggcctgcccgattccagccagatgacctttttttaaaaaaggcggtttgctgtatcagatggattgcgacgaatggaatattataaagatggcataaagggctggctggaagaatgagaagaaaaagagccggtgaaaaggtttttccttttcaccggctcttttatgctgtttttggtgtaaaaaacagtttttataccaaccaacgaaaacgatggacaaatctggagactcagatattttctgtcgaccggaagatagcttttataaaaacgaggattatttatgaaaatcagccattgataatgctggtcggatgtccatccagatcattttgtagattttggatctgtaaatctactgtggcgggcgggcttcctttgtcagccatgcaatatggccggtgatgatgcagtggggcagtccaccaaaggaatgcggcagacgggcgtttttttcacaatgtccaaagcggcggcataaagcttgcgctgcatcagcgcttcgtacagcgcctgctcatcgattagcccgctgcgggagtgttgattagaatagcgccatcaatttgttggactttttcagcggtttccaccaggaaatcagctctgcataaagaagatttggaatgtgagactgtccctcaaacacaacggctttcatggggttcatcctttcgatatttcttggctgatagggttggaacgggaggaagagagaataatgcaattaattgtatacaagcatattgggttttcgattttgttaatcctttttcgatgctcatcaggaaaaggggccaagaaaaatactttggtttgaaccaggaaagcggcagcggaatagaatgttaacgagttgaaagaacaggaagccggcgatcatcggttaaaagtgttttgccggaaagattgacgccctgtgccaacgcagtggcttttcttgattcggacaaaaagaaaatgacgtacctttttcagaacaggggggattgaaatggaggaaatattaaaagtagagcggatttcccaaacttatcaggctgaaaacggagaattaacggcgctggacgacatcagcttttcagtagaaaaaggggagttcgtcagcatcgtcggaccgagcggatgcggaaagtccaccctcttgtccatcgtggccggaatgattcggccgacatacggcagagtccttttacagggagaaccggtagaagggatttctccgcacattggatatatgctgcaacgggataacctgctggaatggagaaatatttatcaaaatgtggtgctggggttggaaattcggaaaaaattaacccgggaaaacgcagaatatgccaacagtctgttaaaagcatacggcttatgggaatttcgggacaaatatccgtctcagctttccggcggcatgcggcagcgggccgccttaatccgaacattggcagtaaaaccggatatctttcttctggatgaagcgttttccgcactggattaccagacccgattggctgtaactgatgatgtacggcgtattttgaagttggaacaaaaaacaaccctgatggtgacccatgatatttcggaaagcatcagcatgtcggaccggattatcgtactgtcaaagagaccggcacatatttcccggatcatggagatccgttttgctgatccggagttgacgcctttgcagcgccgcgaacagcaccagtttcaggaatactttaatacgatatggaaagagcttgatgtccatgtataatcaaacggctgtgttgccaatttcaaaggagcgggccgcttatctgcaaaagcagaagcggaaaaaatatatgattcggacaatacagatttcagttgtcatcattctgctggcgatgtgggaaattttggccaatatcggggtgattgacagctttattatgagccaaccatcccgcatggtaaaaacattgctcaatttaggcgaaaacgggcttttgacccatctgggcgttacctgtatggaaacgctgataggatttttgctgggcacggtgctgggagttggtctggcggtgctgttgtggtggtcgaaaacgctttctcgcatttgtgaaccgtttttggttgtactcaacgctctgcctaaaattgcgctgggaccggtttttatcgtctgggtcggcgccggaatgcaggccatcattgtgatggcgctggcaatttcgttgattgttacggtgctggaaatgctgaatggttttttgagcaccgacgaggaaatggttacaatggtccgcacatttggcgcggaccggcggcaggtatttaccaaggtagtgatgccctccaatctgcatacactttttaattccatgaaggtcaatatcggcctttctctggttggagtcatcgcaggggaattcctggtctccaaagcggggctgggctatctcattgtctatggcggccaggtctttaagctggatctggtgatgacgagcgttgtgatcctcgcagtcgtcgccgctttattatatcaatcggtcgtgattaccgaacgggtaatcacccggaaaatgagccatagaaattgattttggaaggagtatcacgatgaagaaaagaatgagcaaattgctttcccttttttgtgcggctgtgttggtcatgggggtttttgccggttgcagcacacagaaaaaactgcaaaaagtcacggtaagtgaggtgacccattcggtattttacgccccgcagtatgcggctatcgagctgggattctttgaagaagaaggcctggaattggaattgagcaacggtgagggcgccgataaagtcatgactgctgtgctttccggcagcgttgatatcggttttgccggtccggaggcttgtatctatgtttacaacgagggcaaagaggattacatgcaggtgtttgcccagatgacccagcgcgacggagcctttattctggcgcgggaagcggacgaaaatttcacctgggaaaagctgaaagggaaaagcctgctgccgggcagaaaaggcggtgtaccgtatatgacgttggaatatgtggtcaaacaacacggcatgacccccggtgttgatgtgatttttgatgacagcatccagttttctgctatggcaggcgcctttatcagcggtactggggattatgtagcgctgtttgagccaactgcttcctctctggaggcagaaggagcaggatttatcgttgcgtcggtgggtgcggaaagcggggagatcccctataccgcctactttgcgcagaagagctttatcgaaaagaacgaggagctgatccagagctttaccaacgccattgccaaagggcttgcctgggtgcaggaacatacggcggcggaagttgccaaggtaattcagccgtctttcccggataccgatttgaaaacattggagacagtggtgcagaactataaggatatcgacgcttggcgcgctgagccggatatgaaagaggaatccttccaaaaactgcaaaccgtgatgcaggaagcgggagagctggaaaaaaccgctcctttttcagaattggtgaacaattcctttgccgaaaagacaaaaaaataatctaagccgtcaaccggcctgcccgatgcctgaaaacggttcgggcgggccgctttttttgtgcgggagtgttccatacaaaaagcggatgagaggaaaaaacgaatatgccgctgggaaaataaaagaggaaagtgcggaaaagtgaacttttgaaaaaaatttgtaatggaatgaacacatttttctgttatactgacctcatataaggaaaccggccagatggcagaaagaaggggagcacattgtataaaattctggtggtggatgacgaaaccaatatccgaaagcttatcgccaaatatgcaagctttgaagggtaccaggtggaagaagcttctaacggagaagcggcggtaggattgtgccgttccggcgctttcgacttaattgtaatggatatcatgatgccgggaatgaatgggctgaccgcttgcgaaaggatcaaagaattttccgacgtaccgattattatgctgtccgcccgcggggaggaatatgataagatttacgggttccggatgggaattgacgattatgtggtcaagccgttttctcccaaagaactgatgctgcgtattcaggcggtgctgaaacggtgcgctccgccggaagtggcaaagaaaaaagaagtgtatcagtgcggcgggcttacagtggattttaccgcccgtgtagtctgcgtggacgaagaaccggtgaccatgtctcccaaagagtatgatctgcttttttatatggttcgcaatcggggaattgcattgacgagagaaaaattgatcaatgaggtgtggggatacgattattatggcgacgcgcgaacgctggacacacatatcaagcttttgcgcaaaagtttgggaccgtacagctccagtattgtaacgttgcggggggtaggttatcgttttgcgatggggcaagattagtataaaaggaaaaatcttctcctgccttgcagtcttttccatttgtatcctgattgttctgtggttgctgcaaacggttttcctagatgagttttatcagatgattaaagaaaacgaggtgcgcagttacagccagaccattgcggataatattaacctcgaagatctgacagaacttttgaatcaggttacggaatcgggggatatctgcgtacatctgattggggcaaacggtgaacagattcaggagagcggaaagtttcgctattgctctctgcaggagatggacgcaacggccagagccgttttgttccggaaagtccaggagaaaggcggaacaaaaatggtgtattttaatgcggcaggaaaggagaacttacccgctccgtttgcggagctggccgctaaggaaaaaaagtacccttggcaggcaaagcctcttttctcagtgtatcaaatccaacaaagtctttcttatttccaaattgccgaaaaactggacgggacgcaagttatgatcgggattaacgcgcgaattacgcctttaagcgcaacggtacaaatgctgcggatacagattctttgcattggcgtgctgttttttatcctggctggttttttagcggtgtggatgtcccgatttattgccaagccgattgaagatatcaatcgttcctccaaagagttggccagggggaattatgaagtctcgttcaacggtcgaggctaccgggaaatcaccgaactgagcgacacgctcaatgtcaccgcccaagcgcttggacgggtggatcggctgcgcaaggacctggtggcaaatgtttcccatgatttgcgcacgccgctgaccatgattatcggttacggcgaagtgatgcgggacattccgggagaaaatacgccggaaaatatccaaatcatcgtggatgaggcgcagcgactgagcttactggtcgatgatcttttgaatctttcccaggtagaagctggcgtgcgccggatggaaaaaagccggtttaacctgacggaggagatccgaaagacactgtctcgttatcagaaactggtagaacagcagggctatacggttgcgtttgaggcagaaggagatgcatgggtttacgcagatcaggttaaaatcggtcaggtagtttataatttgatcaacaatgccatttcttttactggagaagaaaaaaaggtcacggtgcgccagaacatcactgcctcacaggtgcgcattgatgtaatagattatggcgtgggtattccgccagaggagatggatagcatttgggatcgctattacagcaaaaaaacgcctcaccgtcgtgcggtgattggaacggggctggggctttcaatcgtgaaagaggttctgcagctgcataacgccgctttcggcgtggacagcaaacccgaaaaaggaagtgatttttggtttattctcccattagatcgcgggcaagccttgtaaatttaggggaaagtgctataataaaataaagaaatggttttaaaaccatgcttagaaaggggcgtaagtgatgagtaatccttttgtggtaaccatcaacaggcagtttggcagcggaggccgtgaaatcggaaagaggctggcgaaaatgctggacattgcttatttggataaagaattgctgtctttggcagcccaaaagagcggaattagcgagaaagcttttgaaaatgcggatgaaaagccggaaaaaagctatctttataccctttctaccacggcatatggcaattttgcagttccgttcagctatccggatgtactgaccaatgatcggctgtttgccattcaggcagacgttatccgaaaagaagcgacggaaaaaaactgcgtgattattgggcggtgtgcggatgatatcttgtcggatcatccctgccatattaatctgtttattcactcaccgtttgaagttcgccaaaaacgaattatggaattgtatcatctggatgtcaaacaggcgaaggatttgatcgccaagacggataaaaccagggcaagctactaccatttttacaccaatcagaagtgggatgacctgctgaattatgatctttcgatggactcttctattttgggttatgatgatacggcggagctgctggtatcctttattcgcaaaaaggcgaaactcaaatagcagggcagcgaaacgggggcttgtgagcaattgcaagccctgtttttgggtttggaggaaaaaggatggtccgatggattttaggaacggccggtacgggaaaaacctcccgggtactggaggaagctggtgcggccgcccgcgctgggcagaaggttctgctgctggtaccggaacaatattcccttgaaatggaaaaagcggtgcggcgtgtgctggacacttcatcggcgtttctcgtagaggtttacagttttacccgtctttgcgacagaatctttcgggagttgggcggcgcagcccggcaagcaccggaggaagcagcccattatctggtgatgcatttggcgttggaacagctcaaaggcgttttgcatcgatatcagaaaagcagccgcagcggtgcggcgattgcggcgctgaccaggcagatggaggagtttcgcaccgtagggatcgctccgcagatgctgcgtgaagccaaaaaacggattccccaggattcttttgcggaaaaaatggacgagctgttttccatttatgaaacatatgataatttgctggcatcttcttttggcgagcaaaaagatcagctggcttacgcgctggagcggctgaaaggaaatgcaatttttcgggaatacgctgtatttgtggattcgttcaaaggatttatggccggggaattcgacttgctggaagagttgatgaaaaccgcttcgtcggtgactttttccctttgcacagacaatctgtttgatcaatcggagggatatgggctgtttgttccttcctgccgtacggcggcgcggctgatggaactggcgagaaaaaacggtatcccagtacaaacgccggtaatcttaaaagaaccgctgcgttttcatgcgtccgcactggcaaagctggaacaaaatctgttccgggaagaacagtcggcgcaggaagaaagcggcggcatccggctgacgctctgccgggacccttacgaggagatagagtgggtggcggcagaaatttcccatctggtgcgggaagagagatgccgttaccgggatattgttgtaatcgggcgggatctggaaccatatttgcagccggtacatgccagctttgccgattatgagattccttattttatggacgaacgctttgacgtggcggctcagccactgacagtagcggttctgtccgcgatggaagctgccaaaagccgttttcacagcgaagacttattttgcctgttaaagacaggattgctggatttttcgttggagcaggtggcggcgttagaagaatacgcttatgtgtgggatatcagcggtgcgcgctgggaagagccgtttgtctggaatccgtccggctttggcaaaatgcgggaagcggatgaagtacggctgcgcgagatcgaggcacttcgccaaaggctgatgaagcctctgctcaccctgcggaaaaaaatccgtgtttgcagcggccgggaattggtcgaagcgctgtatgaatattggaaagaagcgcggattctggaacaattaaaaaagcaggatgcacaggaggatgccgccgggcgggacagcgtgcgcgcactgtttgacggcatgatggatttgtgggatcagtacgcgatggtgctgggggaacaggcctatgatctggacaaacattgcgagctgatgcggctgacattgttaacagccgatttggggcaaatcccacagggattggatacggttatgatcggcactgcggatcgaatccgtcctaacgccccccaatatgtgtttatcatcggtgcgaacgaggatgtgttcccggccccggtgagccgggatggtattttgtctgagcgggagagagaacagctttttgccgcaggactggaagtatcggaaccctttgaactgcgggtgctggaggagcggtattttgcctatacggcaatgacctgcgccagcgacggcatttttttgtcctggtcggaggaatctcttgacggaagtcccctggccccatcggtcatggttcgggaggttctgaccgttttcccgcaggctgtctgccgaaaggcttcggcggaggaggcgggcttttacgcgctgaacgagaaaacggcgctgcatgtgttcggttctgcggtggatcgttcctcttccaaagcgcaggcgctgggagtgtttctcgaggaaagcgcctataccgaaccgtaccagagaatccggcacccggttcagccggagctgtttgccatgaaatcgtcagagacggcccggactttatttggcggggaaatgcggctttctccctctaaactggatcgataccatcaatgccggttcgcctatttttgcgagaggggattgggaatcaagaaaccgcggaaagcgcagctgtcccccatggaatcgggtacggtgatccactacgtattgcagcaggtaatatcgaagtatcccggaaaagagctgtgcagcttatcggaagagcagtgccgcaaattggtgcggcagtcgctggatgactatttgcaggatgccatgggaggggaactggataaaaccgcgcggtttcggtacttgtttacgagaatggcaaacacgctggtgcgcctgatccaccatctggcaatggaatttgcagtctgtgactttgaaccagtggcttttgagctggccattgcgaaggattcgtccgtcacccctctggaattggaaatgccggatggtggcaaaatttgggttgagggcatagtggatcgcgtggatgtgatggaaaagcggggcaggcgctatgttcgggtagtggattataagaccggcaccaaaacctttgattttaccgatatttattacggtatcaacctgcagatgctggtttatctgttttccatttgccaaaatggaaaaggtcagctggaaaatactgttccggcgggaattttatatatgccgggcaaaacgggatttttaccggctgaccgacatgcagaagaggagcagatgcaggcgcagcagaaaagggcgctgaagatgaacggccttttgctttccgacccggtggtgttggaggggatggagtcagacggcgcaggggtatttattcccgcaaagctcaaagatgggcagatcgacgccaaatcttcggtggcgacactggaggagctgggaaagctaaagcggcatatagagtctttgctgcggcagatggcccaaaccctttggaaaggggatatcccggctctgccgctggaggaaaagcagtttgatctgtgtgcctggtgcgattaccgcggcatctgcggacgggaagaggacgggccaaaacggcagcgggacgagttctcccgggaagtatttttccaaaagatcggtggtgaagaagatgcgtgaaagaagctggacaacagaacaatcccaagcgattcaaagccggggcgggacgctgttggtgtctgcggcggcgggcagcggtaaaaccgctgttttggtagagcgggttgtatccatgctgttggatgaagagcatccggtggatgcggaccgtctgctggtggtcaccttttccaatgcggctgctcgggagatgcgccagcgcattgatgcaagattggcccaggaacaggcagcacggccttacagccaacatcttcgcagacagcgttttttgatggagcgcgctcatatcagcaccatccatgccttttgtttggatctgatcagccgtcacacggaggaattagatttgccagcggattttattctgggggaggagggacgcttgtctctgattcgccaggaagcagcggcgcaggcgattgagaatttctatgcctcggacggggacggcagtttttccgatctggtagagcttttgtctggcggacgggatgacaaccgggtgaccgatacgattttcaagctgtacgactttattcgctctcacccattttatgaggactggctggcaggaaaggaaaaaatgtacgatcctgccattccggcggaacaaactgtgtggggaaaaacgattctggcttacgggacggaagcgataacatactgtctgcaacaaaaccgggagctgctggaacagatggacgggattttagagctggaaaaagcatatggagcgccgtttcgcgaggatggtcagcggctgtcggcgctgctttcttcgctgcggtccggcgattgggacagctgctgcgcgcagctgcaaacgttctctttcggtcggctgggagcgctgcgcggctttgaggacgatgtactgaaaaagtcattgcagtccaggcgcgatcagattaaaaagattatcaaaggtctggcccaacggcaattttgcgctgacgccggggagtttcgggaggatatttccgatttgcagccaaaagtatccacgcttttttcgctggttctcgcttatgaccgacagtattcccagctgaaaaaagagcagaagcttttggatttttccgacttggagcatatggcgctgcgccttttgatggagcgattgggcgatacctatcgtccgactgcgctggcgcagcagacggcgcaggaatacgaggaagtgctggtggatgagtatcaggataccaacagcgcacaggatatgattttttcggcagtttcccggcagggcgaaaatctctttatggtcggcgacgtgaaacagagcatttatcgttttcgacaggcgatgccggaaatttttatggaaaaactggaccgttacggcccatttgacggaaaaaattatccggcaaaaattatactgggcaaaaactttcgcagccgtccggaagtaacagaatttgtgaactttgtgttccggcagctgatgagccagaaaatgggagagatggagtacagccgggaacaggagctgatcccggcggccgattatccgccggataagcagatgcaggcggaactgcatttgatcgatatccaggaagaaaaggcgaatgctgtccagctggaggcggtctatgtggcgcgccggattgctcgattgatgacagacggctctaccgtgtgggaaaacggtgcgccgcgtccggtgcgttttggcgatgtctgcattttgctgcgctcaccgaaaaacaaagcgcaagtttatcgggaagcctttttgaaagaggggatcaacagctggtccgacagccgaaatggatttttacaggcaagagaaatccgggttatggtagcgtttttgcagatgctggataatccgtaccgcgacattccccttttaacggtattgatgtccgatttatttggttttacgccggatcagatcgcaaagattcgtttgctggaccaacgaggctctttttacgctgctttgcaggaaagcgcccggcaagggaacgagtccagcgccgcgtttttgcgccagacgcagcttctgcggcggctggcggtcagcatgccggtagccggacttttgacggagatttacgccagaaccgattatccggcgattgtgtccgcctatccgatgggacaggcgagaaaggcgaatctgcatcagctttgcagctttgcggtagcttttgaaaagagcggcggccgcggactgtacgcttttgtccgctttttggaccggctgtccgatcaaaaagcggattttgagcctgcttcctctggcggcggcagcgacgcagtgcagattctcagcatccatcgttccaaaggattggaattcccgtatgttttcctgtgcgacggcgccaaagcgtttaacaagcaggatctgcgggatcgcattgcagtgcatccacaaatgggttttgcctgtgtgcggcgggattcggctttgttaaaggagtttactactgtcccgctggaggcgcttcgcttagaaaatgaacgcgctggtttgagcgaggagcttcgggtgctgtatgtggcgctgacccgggccaaagagaagctgtttatcaccatgtcggggaatgtggataaaatgctgcaaaaagcatctttggcggcacagggtcctttgcagccgtttgtggtgcgcagagcggattccattggcgcctggcttttgatgtgtgcgctgcggcatccggactgccatgaactgcgggagcgggcaggcgcggtgtttggcggtttggcagaatcggagcaggcggcgcttcaagttgtgtttgggcaagtgcaggaatggaaaacactggaaaataatgaggcgacaaaggtagtctctggtccggacgaggtgttcttagcccggctcagagcaaatggtgcgtggcggtatccgtatgaagaagcgacccatattccgcaaaaacttggcgtttcggctgtggccaaaaaagagacttctgagcggtatgcgtttaccaaaacacctcgttttctcaccggagaaaaaatgtccggcgcgcagcggggggatgcgctgcaccactttatgcagtacgctgactatgagcgatgcgccgcagatcccgactcagagctggaacggctgctgcagctggagtatctgacgccagcgcaggcacaggtgatcccgttggagcgcattgcgcattttttttcctccgatttgtataggagaatgacggcctccgatcggctagaacgggaattgcgctttctttgggagatagatggaagtctgatgggctacgaaaacgccggagaggacaggattaccgtgcaaggcgtagcggactgcgttttttgggaagaagatggagcggtcattgtcgattacaaaaccgaccgggtatcctgcgcggaagaactggcggacaagtaccgcgaacagctccggatataccggctgattttgcagcaaagcctgcaaacaaaggtaaaagaatgtgttttgtattcctttcatcttggagaagaaatccagttggatttttaaagaattttgattctgtccttgacaaggcggcaccttactgctatacttaatgcgaaaacaaagtagaaccaattcgttctcacctgctcgcacaggcgatgccgggtcaatacatgaaaggcaaaaggtttttatgtgtattgagcgcggacgaatttcgttccgcgctttgttattgaaaaattcgggcttttacaatggaggtgctttcacattagcaacaaggaactgcagatcaacgaagagatcagagataaggaaatccgcgtcatcgatgcagacggcagccagttagggattcttacgaccaaagatgcgatgaaaattgcgattgagaaaaatctcgatctggtcaaaatcgcgccgcaggctgctccgccggtttgtcgcattatggattacggcaaatatcggtttgaacaggcaaagcgggaaaaggaagcgaaaaagaaccaaaaagtgattgagatcaaagaggttcgtctttctttgaacatcgacaccaacgatttcaacaccaaagtgaaccatgcgatgaaattcctcaaagcggggaacaaagtcaaggtatcggttcgttttagggggcgtgaaatggcgcactctcagatgggcaccgtgctgatgcagcggttcaccgatgcggttgccgaggttggcactgttgagaagcagccgaaaatggaaggcagaagcatgacgatgttcatctctgcaaagcccgttaagtaaatcgaacaggaggaaaaccaaaatgcctaaactgaaaactcattccggcgcaaaaaaacgctttaaactgaccaaaaacggaaaggtaaaacgcgcgcatgcttacaaatcccatattctgaacaaaaaatccaccaagcgcaaaagaagcctgcgcaaagccgcttatgcggatcagaccaacatgaaggcaatcaagttgctgatggcgaatcactaattaacatctggatggaggattaagaatatggctcgtgtaaaaggggcaatgatgacccgtaagagaagaaaaaaagttctgaaactggcgaaaggctattttggtgcaaagagcactcactttaaaatggccaaacaggctgtcatgaaatccggcaattatgcttatgtaggcagaaaacagagaaaaagagatttcagaagcctgtggatcaccagaatttccgctgcttgccgcatcaatggcatgaactattctactttcatgaacggcttgaaaaaagctggcgtggagctgaacagaaaaatgctttccgaaatcgcgatcaacgatccggcggctttcacctccttggtggaaaaagcgaaagcggctctttaatagaagtgttacaagcccgtgttttactgacacgggcttgttttgcaaatggatggagtttgaaatggaacggataaccagcaaagacaatgaaaaaatcaaatggctgattaaattgcaaaacagccggaaggtcaggcaggaaagcgcttcttttgtggctgaggggatgcgcctggcgcaggaggtgctgcgctgtggtctgccgttgcagcaggttttcgccagcgatgacggtgccgcacgatatgcgtctgtttggaatgcgctgtgccaaaaggcgtcggcggcctatctgatttccgatgggctggaggcgaaaatcagcagtgtgcaaacgccacaggggatttattgtgtttgtgggatgccgcggcatactttcgggcagatcgctgggttgggtgaaaagtttcttgcgctggatcatttgcaggatccgggaaatctggggacgatcatccgaacggcggacgcatttggcgcggacggcattcttttaagtgaaggctgcgcagattgttacagtcccaaggtcctgagaagtacgatgggcagcgtattccggctgccgatctggacagtaccggatctggcacagacattgaaagaattgcatcaagcgggtttttctactttcggcgctgcattggatgaaacggcgatttgtttggggaatttttccttcccgcaaaaatcggtggctgtggtcgggaacgaaggaaacggaatttcccgcccggtactggatgcttgccagcaaacgctttatattcccatgaagggagagacggaatcgctgaacgcaggggtagcagcctcattgattttgtgggaaatgtgccggtgaggaggacggaaaatggaattttggatttggctttccaatgcgctgggggcgggtagccccagggtgaatgacattgtggcctgttttgaaacggcggaacatttttatgcagaaaagaagaccggctttcgccatgttgcatttctgacagcggcggaaaagcaaaagctttcagctgcgtctttgtcggatgcattgcggctgaaagaaaaaacattggataagggatatcatattttgacgccggatcaggcgcaatacccgaatcgtttgcgcaatatttatgcgatgcctgccgttttatatgcggacggcgagctgaacgacatagatgaaacggtggcaattgcgctggtgggtgctcgaaggtgttctgattacggccgggctgttgcaggcgaattgggctttgggcttgcccgcatgggcgctgtggttattacgggtatggcccgcgggattgacgcagcggctcatgaggctgctttgcgtgctggcggcagcacgattgctgtgttgggctgtggtttggatatcgtctatccgccggaacacacagccttgcgccgggagattcccaaaaagggtgtggttctttctgaatttcctttggatgcaaaaccggagggctttcattttcctattcgtaaccgcttgatgtctgctttgtctttgggcgttgtagtagtggaaggggaactgaccagcggttctttgatcacagccaattatgcggcagaacagggaaaagatgtgtttgcggttcccggcagtgtactgagcggattgtccaaaggtccgttccgcctgctacagacaggggcgataccagtttcctgcgctggggacattttagaagaatatcggtatcggtatgctgccaaaatagattggaggaccccggtcgtgtctgaaatgccgaagcgcgagacggttaaggaaaaagtagagacgccgctcccggaacggtcggctgtgccgattcgggaaaaacgggctctgccggaagagtgtgacactaatatccgcgaaatttatgaaattttgtcggaaattccaatcaatgccgatgaaattgcagcacgtacgcaaaaaaatcctgcggaagtcttgacagcgctttcagaacttgaaataatgggatttgtatcggcaaatgcgggaaaaagattttgtatctgctagcaaaataagacaccaaatgcacaagatatggtgcttttgcggtaaagataccattaggccgtcctctttttgcggccggtaaagattacagaagtaaaggcgggattaaatgtcaaaacttgtaattgtggagtcccccgcaaaggcaaagacaatccagaaatatcttggagaaggctatgatgtggtggcctctatgggacatattcgggatctgcccaagagcaagttgggaattgatattgaacacggattccagccggattatgttgagatcaagggcaaagaggatctggtgcagacgttgaagaaaaagggaaagaaaagtgacgcgatctatctggccactgaccctgaccgggaaggagaggccatttcgtggcatcttgcttatctgcttggattggatttggatcaggccaaccgggttacttttaatgaaattaccaaatccggcgttcaatccggcatggctgcgcctcgtcaggtggatatggatttggtcaatgctcagcagacccggcgaattttggaccggattgtcggctataaactgagcccgtttttgtggaaaaaggtgcgccgtggcctttccgcaggccgggtacagtccgttgcggtacgcatcattgtagaccgggaagaagagattcggaagtttaaaccggaggaatactggtctattgatgcaaagctgttggcaaagtccagccggaaggcgtttgcggccaaactgtacggaaaagataagaaaatttctattaaaacaaaagaagaagccgacgccattttaaaggagctggaaggctgcgattatgtggtggagaacgtgaaaaaaagcgtgcggaaaaaatcacctgcgccgccgtttaccacaagtaccctgcagcaggaggcttcccgtcgcctaggttttcaggcaaggcgtacgatgaaagctgctcaggagttgtatgaaggcgttgaggtaggcgatatgggtgccgtaggcttaatcacttatatgcgtaccgactcgcttcgcatatcggatgaggccgcccagcaagcggcgagctttattgagcggcgatacggaaaaagttatttacctcctaaacagcgggcttataaatcaaaaaataacgcccaggatgcccacgaggcaattcgcccaaccatgccggaaatgactcccgatcaggtaaaagacagtctctccggcgatcagtataagctttacaagctggtgtgggaacggtttattgctagccagatggctactgccttgttggatacggtttcggtggatatccggtcgggagaatatctgtttaaggcgtctggctatacggtaaaattcgacggttatactgttttatatgaggagagcaaagaagaggccgccagtggagaagagagtgcgtccggtgcgttgcctgcgctggaaaagggagacctgttgaagttaaaaagtctggagagctcccagcattttacccagccgccgccccgttttactgaggcgtcactgatcaaaacgctggaggaaaacgggattggcaggcccagcacttatgcgccgaccattacaacgattctctcccgcggttatgtagagcgggaggcgaaagcgctgaaacccacggcgttaggtgaagtagtgacccaactgatgaaggaccaattcaaaaagatcgtggacgtggattttaccgcacagatggagaaaaacctcgacgaagtggaggagggcgccaccgactgggtggataccttgtcgaccttctatgaggatttcgccgcgacactcagccaggcggaaaagaatatggatggtacccgagtgaaggtgccagacgaagaaaccgatgaaatttgtgagctgtgcggccggaaaatggtaatcaagactgggcgtttcggcaaatttctggcatgtcccggctttccggaatgcaaaaacacccgaaagattgtgcaggatactggcggtgtctgcccgctttgcggaggcaaagtgctggcgaaaaaatcgaaaaagggaaaagcttattatggatgtgagcacaatcccaaatgcggttttatgacatgggatacgccgttaaaagaggtctgtccgaaatgcggcgcaacattatttaaaaagaccggaaaaatgggccggatttactgtgccaaggaagggtgcgattacgaaaggagactcaaggattgatgacggtttcggtgatcggtgcaggcttggcaggctgtgaggctgcctggcagctggcctgccgcggtattccggtaacattgcacgagatgaagccggtcaggttttcccctgcgcaccggtacgaggggtttgcggaattggtttgctccaattcgttaaaagccaacagaatcggttcggccgcagggctgttaaaagaagaaatgtaccgtttgggctccattgtggtgcgctgcgcccgcgaaacagcggtacctgccggcggagcactggcggtggatcggtatctgttttctgactgtataaccaaaatggtgacagagcatccgctgattacagtgcgacgtgaagaggtaacccaaatcccggaaggaccggtgatcatcgcgtccggtccgcttaccagcgatggactttccaaagcgattggcaagctgctgggggaggcatacctgagcttttacgatgcggcttctcccatcgtagcctttgacagcatcgacacgaacaaggcgttttttgccgctcggtacggcaagggcgaggatgattatatcaactgcccaatgaaccgggaagaatatgaagcctttcatgcggcgttgatatcggccgagtcggtggagctaaaagaatttgagcaagaccggatgaaggtttatgagggctgtatgccggtggaagttttggctaaacgggggagcgattctattcggttcggccctttgaaaccggtgggcctgcgggatccccgcaccgggcaccgaccctgggctgtggtacaattacgggcggaaaacgcccaaaaaacactgtataatttggtaggatttcagacaaatttgcgttttccggaacaaaaacgggttttttccatgattccgggattggaaaacgcggaatttgttcgttatggcgtgatgcaccgcaatacttttttgaacagtccaaaacttttggatgcttcttattgcttccgcaaagaccggcgcatctattttgctggacagatgaccggtgtggaggggtatattgaatcggcagcatctggaattttagcagggatcaatatggcgatggcgctgcggcaaaagccagcgctgattttgcccgcggatacgatgatgggcgcgcttgccgcttacatcagcgatccgaccgtcacggattttcagccgatgggaagcaatatgggacttttgccgccctgtccggaaaggatcaaggagaaggcgcttcggtatcagacggtggcacagcgcgcgctggacagtctggaaagctgtttgtctgattttgtcgcggagacgggcgatttgttggcggtagagcaagattgcctatcagaagaaaagccgatgaacagaaaggctggtgtactatgaaaataattgtagacgcattcggcggggacaatgctccgctggaaattgtaaaaggttctgctatggcagtagcggaatacggggttgacattgttctcaccggcgatgaaagcgtgatccggaaaatagccggggacaacgggatttcgctgcatcgtatggaaattgtccatgcatcgcaggtgatggacatgaatgcagagccaaccgaaattttaaaaagctacaacgattcctccatggctgtaggcttaaagcttttatccgaaggcaagggcgatgcttttgtcagtgcaggcagcaccggcgcgtttgtagtcggggccagtttgattgtcaagcggattaaagggattaagcgtgcagcgctggctccggtgatccccacagtggaggggcggtatatgctgatcgactgcggtgccaatgcggaatgcagaccggaaatgctggtgcagtttggcctgatgggttctgcctatatgaacaaaattatggaggtgggcactccacgagtagcgctgattaataacggcgtggaagagcataaaggcgcgccgctgcagcaggaggcctatcagcagctgaagggttcgccgctgcattttgtcggcaatatcgaggcaaggcagctgccgttgggcggctgcgacgttgcggtgtgcgatggatttaccggcaatatcgtgctgaagttgaccgagggcctcagcaaggcgctgatcggccaaatcaaggatatcctgatgaagaatacgatgaccaagctggcggctttgactttaaaaggcggacttggggaatttaaaaagaagatggactataaggaatatggcggcgcggcgttgctgggaatttccaagcctacgatcaaagcccacggcagttccgacgccaaagcttttaaaaatgccatcggacaggcgatacgctttaccagccaggacgtgatcggggtaattgaaggatatctggctgaaatgaaagcaaaagaacaaggagccgaaaatgcatgagcggtcaaactgatttgaaattgtgtcaggaaaaaataggatatcactttcgcaaaataaaataccttaccattgcgctcacccattcttcctatgccaatgaggggaaaaaagaagatccatgcaatgagcggcaggagtttttaggggacgcggtgctgtcgattattgtgtccgactatctgtttcgccattactctcatttgccggaaggagaattgaccaagctgcg

SEQ ID NO: 703 - DNA, 2625 bp, Unknown
  16S sequences of unknown bacteria
attgaagaatatcgattttgccggtgtccattgccatatcggctcgcagattttcgagctccagtcctacgtcgaggccaccaacaccatgttctcgttcatgaacgacatgaaaaacgagctcggcttcgtcgcgcgcgactacgacatgggcggcggactgggcatcccgtacaccgtctacgacgttcccgccaccatcgcgcagttcgccaatatcatgggtaccagccagagcccgttcagtatcgcgcagttcgcccgcgcggtcacgtccgccatccacaagaactgcgacaagtacgattacccgtacccccacatctacaccgagcccggacgctccatcgtggctaacgccggcgtcacgctctacaccgtcggctccgtcaaggaggtcccgggcatctgcacgtacgtcgccgtcgacggcggcatgaccgacaacatccgcacggcgctctacgggtcgcagtacgaggccttcgtcgtcaacaacgccgacaagccgcgcgacatgatatgcgacgtcgtcggcaagcactgcgaatccggcgatgtcatcgtcaagaactcgccgctgcagcactgcaaggcgggcgacatcatctgcgtgctcggcaccggcgcctactgcaacgagatggcgagcaactacaacaagcaggttcgtcccggcgccgtgctggtaaaagacggcaaggtccgcgagatcatcaggcgcgagacctacgacgacctgctcgcacgcgaggtctactagatgacacgacagaccgaaggagggcttatgcgcacggtgaacatcggcttggtcggcagcggaacggtcggcggcggtttcatcagcattctccagaagcaccacgacgagtttctgcgccaccagggcgtcgatctgaatctcgccaaggcgaccacgagaacgctctcgaagctccgtgcgctcggagtgcccgaggacaggatcgtcgagtcctatcgcgagatcgtcgaagaccccgccatcgacatcgtcgtcgagctcgtcggcggcgtcggctttgcggcagatgtcgtgctcgacgcgctcaacgccggcaagacggtcgtgacggcgaacaaggccctcatggccacgcgcggcaaggagatcttcgacaccgcggagaaaaacggcgtcgagatcttgttcgaggcatccgtcggaggcgggatcccgatcatccagcccatgaagcaccagctcacgggcaacgagatcacgtccgtgctcggcatcgtcaacggcacgaccaactacatgctcacgcgcatggaagacggcctgtcctacgaagaggcgctgaaagaggcgcaggagcgcggctttgccgaggcagaccccacggcagatgtcgaggggcatgacgccgcggccaagatcgccatcctgtcctcgatcgccttcaactcgcgcgtcgtgctcgaggacgtctacacggagggcatcagcaccatcaagcagatcgacctgcactatgcaaaggagatgggctaccgcgtcaagctgctcgccatcgcccacaagctcgacgacggcatcgacgtgcgcgtgcaccccaccatgatccccgaaagccatcagctcgccagcgtgtgcggtgtctacaacgccatctacgtgacgggcgacgccgtgggggactgcatgttcttcggcgagggcgcgggcgccggccctgctgcatccgccgtcatgggcgatgtcatcgaggcggccaagcgcatcgtgctcgacgtcaagccgctcgacggctgcacctgcaccgaccgcctgcccatcagggacgtcggtcagctcaacgccaagttctacctgcgcatcgtcgcaaacgacgagcgcggcgtgctcgcggcggtcagccgcgtgttcgccgacaacggcgtttccatcaggagcatgatccagccgacgacagaccgcgagagcgccgagctcatcttcatgacccaccatgcgctcgaggccaacgtcgagaaggcgctggctgagatcgaggcgctcgcctctatcaaggaaatcggaactatcattcgcgtcgaggaggaataagcacgtgacgctatctgagcaagacgttcgcgacatcgccgaatacgtccgcatcgggttgaccgatgaggaggtaacggagatgcagcgtgacctgaacagcatcatcgagaccttgaaacccatcaccgaatacgaccttgagggggtcgagcccaccttccacccgatcggcgacctttccaacgtcatgcgcgaagacgtggtcgcagctccgttcccgcgcgaggtcgctttgcagaacagcgactcggtgcaagacggctgcttcgagattccctccatcttgggcgaggggggcgatcgctgatgcaggactacaagcagctcacggtcaggcagatccgtgacggcctttccgccaagcagttctccgcacgcgagctcgccgatgccgcgttcgccgagatcgaggcgcaggacaaggacatccacgcgtttctcgagctgacgcccgagctggcctacacccaggccgacaagatcgacgctgccgtcgccgagccaggtgtcgatatcgtggtaatcgccgttgaacagctgaaaatcca

SEQ ID NO: 704 - DNA, 9274 bp, Unknown
  16S sequences of unknown bacteria
atgcccgcgcttccccaatttccttccgccattccgcggccctcctttgcgatcggctttcctcatttttattataccatgttttcgtgcgcggggcaatcccccggcgccaatccgatcttctcaagcaattctgggagaattttttcttgcattctcaccatctgcgcattctgtgttggaagctgctgtaccaacattgcggcaatttgcaaagaaactggtatattctcgcgcaaacgctggattttcccccacaaagctgatataatagggaaaacacggccattggcaaaaatcgtccgcaaggcaatggcaaggagggacatggaatgttttattattggtgggattggacgtggcttatcctactgccagccatcgcgctctcgctcatcgcgcaagcgcgcgtatccgccgcgtacaaccgctattctcgcgtggcgacgcgaggcggccgcacggcttcggacgtggtggcggaaatgttcgcgcgcgaaggcatcgaaaacgtgcgcatcgaacccacgcgcggccgcatgaccgaccattacgacccgaaagccctagcgctgcgcctgtccgaaggggtgtacaattcctcttccatcgccgcgctgggcattgccgcgcacgaagccgggcatgccctgcagcaccgcgatggctacgcgccgctgatgctgcgcaccgcttctgtgttcgcggtaaacatcggctccaacctcagttggccgctggtgattttgggcctcctcttcagctttgagccgctgattctggcgggcattttcctgttctcgctggtggtgctgttctcgctgatcacgctgcccgtggaattcaacgccagccgtcgcgcgctccaggcgctggaaggtggcggctatctcgcggcggacgaactcattggcgcgcgcaaggtgctatccgccgcggcgctcacctatgtggccagcgcgctgaccgccatcttgcagctggtgcggctgctggtgatttccggcgtgggccgcaggcacgattgacgcaaaagacggaggaaaccgcatatggaaccacttgtatggcccagcgcccgcgactttggcgcgctgggcgacggcctggcggacgacgcgcctgccctccagcgcgcgctggaagcgtgcggcggccgcctatatttgcccgcaggaatctataaaatcggcaaaacgctgcgcgtgcccgccggcactttcctccgggcggacgagcgcgccaccgtgaaagccgcggacggcgcgtttacccgccggggcgaatacctcctcgccaacgccggcgatgcggacatttgcatccaaggcggcgtctgggacggcaacaaccccggcaacccgcgcggcgatatgttcgatcccgcgggcaccacgggcacgttgctgaacttccgcggcgtaaaggggctcacgctgcgcaacatgaccctgcgcgacccggaatgctattacatccgcctgtgcgaagcgcgcgattttcgcgtggaagatatcctcttcgactcgccgcacctgcgccccaaccaggatggcgtgcatctggcaggctactgcgaaaggggcgtcatccgccgcctgcgcggcgcgcacggctcgcccaacgacgattttgtggccttcaacgcggacgattgcttcacccggcaaacgaatttcgacatcatccccggccccattcgcgatattctggtggatggtctccaggcggacgcgtgccacaccttcgtccgcctgctcagcgtagacgcggaaatttccaacatcgtggtgcgcaacgtgcgcggcggtttcgaagcctgcgccgtgaacatggacgccgcgcgctactgccgcacgcccatcgtgccgccggaagacccgcgctttgcgcagggcgtgggccaggtgcgcgacgtgcgcatcgaaaacatgcaggtgcaccccgtgggcaacctgcaaaaccccgctctttgcctagaaaccgatgtggacggctttgaaatgcgccattttcaggtgactggggagcgctcgcccatcctgcgcatgcgtcacacaggcagccacaccctcgcgttccaggggctgcaatgccctaccagcgtctttaccgcgggatgccagctcacagacggcgtgtgccacaagccgcccctggccgaattcgcgctggaaaagggcggcttcgagcgcctgcgcattgaacggccctaaagcgcaaggcggcgtggacaaaatccacgccgcctctgatcgttgacaaacctctggtttgccaacgaatctgcccgaccgcttgcaaatctgacgatttgcggccagcggtcggggcgggaatgcattttttccgcaaacgcaagcgtttgctctgcaaaaaatgccagaaatgacgtacacgccgtcatttctgattagagcctcgttcttccgagactttgtcaatactctgaggcggcgtggacaaaatccacgccgccttgtccaatgggggactgcgaaaaactttttttcatccctccatagccttcagatactcttcccttgtaaggcgcgtataatgctcggtgcgcagctcgcccagcagatccacgcccaatcccgcgtgctgatagcgaaagccgcacttttccatcacccggcgggagcgttcgttgcccgcaaagtacatggcccaaacggccttgcagcccagctccataaagcagcgtttttgcagccggaacaccgcctccggaatcagcccctgcccccaatggggcacgccgagccaatagccgatttccgcctcgccttcttccatgggcgcgctgccgccgggcggaaacataatgcccacgctgcccaccggctccccggcgctcttcaaaaccaccgcgtacgtttccggccgcgagagcaccgtgcgaatgatttcccggctatattccacgctggtgtgcggcgtccatcccgctgccggccccacgctctcgtcctttgcgtagcgatacagcgcctgcgcgtccgtctcttcccaggggcgcaaaatcaggcgcgccgtttccattctcatggttcgctccctctccgcgccggctcagccgcgccattccacgatattctccagcgcccgccgcggcctgggccgcggggcctccgctgcatagccgatggccatcgcggcaaagggttcccctgcaccgccgagccacgccttcaattcgtcataggcgaaataggtatcgcaaatccacaggctgcccaggcccaactccgtggcccgcagcgccatgttctccaaggccgcgcccagcgattgcgcgttgcagatttcatacacgcgctcctcgggcgaaagcggcgcgcgcacgtccgtgcccagcggattgatggcaaagatcaccgccggggcctgctccatgatctgcgccgtataggcggcgccctgcctgtgttgcgcgctgccgggaagtagcggggtttccgcttcccgcgcgaggccccgccgcatggccgccacggcctccgccttgccgcgccccgtggccaccacaaagcgccagggctgccggttcttggcggaaggcgctagatttcctgcccgtaaaacctcctccagcaattccctggaaacgggcgcatcctgatatttgcggatgctgcgccggtttttcatgctctcgttcactgcttttccccctcgttcgtcaatcgtaagcctgtcgcccgcccggcgaaaagaccgcaccgcccgcgggaatttttaacgtttttctatcatataggactgcaagctcctctggcaaccattcttttcataaaacgcttcccttcccggttgcgaaccaaaatacagcatggtgggcgcgttggcccgggcgagctgaagcaaccggctgccaatcccctgcttttgatgggagggaagaacgagcagctcggtgattgtgccgaaaaaatagccgtccgaaaggatgcgcaggcacccgacaagctgtttcccatcgtaagcggtgatattcagcgttctggacagagcggcctgcgttctgtccatatcataatcccctggccaaacctgattgacaaatgggataaattccgcggcgctcagtgccttatcgtcaactttgtattccacaatccctggctcctttctcctgccgcagcgtgcgccaaaatggcacgaacagcataagcgccaccagcatcgcgccaaaatcggcaatgggcgtggcccacacgatgccttctacgcccgcgagggcgttcagcaggaacataaagggaatgtccagcccgcccttgcgcaacagcgacaaaatggcgggctgcacctttttgcccacggactggaacaccgtgatggccagcatggttacggaaatgcacgggcccgtgatgcagatgatccgctggaatagctgcccatagcgcacggtttccgcgtcgtcgataaacgcgcgcacgatggacgccgcacaggtgaacagaaagacggtgctcaccagcgccacggcgaagctcagtagaaaatccacccggatggccgccttcatgcgggggaaattcctggcggaatagttatagccgaccagcggcaaaacgccctgcgacatgcccgtggccacggcgtatgagagcatatccaccttttttgccacgccgatgcccgccactgccgcgttggaataccccgccatcagcttgttgatgcagatgttggacagcacgcccatcaggttcatcaggcaactgggcaagcccaccagcagcacttcccgcgggatgcgctcgcgccacgcatagtagcggggatgaaaggcgatgttcgtcgaagcgcctttgcggaggatcaacaccacgaaatacagcgtagcgatggcgttggaaaccatggtggcgatggccgccccggcgatttccagccccagcgggaagatgaaaagagggtccagcgcgatgttgagtacgccgcccagcgccatgccaaagctggcctgcgcagaatgcccctccgcgcgcaccaaatgggccagttcctggttgagcaccgtgggaacggccccaatggtgatggtccaaaagatatactggctgcaaaagccataggtttccgcgtcagcccccaccagtggcagcaaaaccggctgcaaaagggccaacgccacgccgtacagcagcgccacgccagtggaagtccagaaactgaaagacgccgcccgcttcgccttttgcgaatcgcccgcgcccaggctacgggccatcaaactggagccgccaatgccaaacaagttggccaggcccgtaaggaacacgaacatgggcatgcacagtgaaaccgccgccacctggttggggtcgccgatctgtccaatgaaaaacgtgtccgccatgttgtagatcacggtgatcaattggctgatcaccgtaggcgccaccagcgaaaccaccgcccggcccacgggcgcttgcgcgaataacgcgcggttctcgttcctatccatgctgctcctccccggccctgtgcaggccatccaccacgcactgaatggcaatgcgatagctctcgttttcgtccaccgcttcgtgggaaaatcctccagcctgctcgtgcgcggcaaaaccatacatcacgccgcgcagcacccgctgccagtgcgccgtttgcgcctttgtgagtccatagcccttcaacaccctgccgatggggcggagaatttcgcccgcgcgctcttccagcgccttgttccagcgggggaaccccataatcacccggtacagcgcgttgtgctcccgggcaaacgcgcgatacgcctccgccagcgcgaatagagccgcatcgccttcctggcccgcaatggcctgttcctccgcccgcgccaggcggacaatggcttgaaagcccaccgcctccagcagggcgtccaggctttccacatggttatacaacgaagctggtttcacgcacagccgctttgccagttcgcccatggaaaagcgctccactcctcgttcttcaatcagcgccacagccgcctcgaccacgcgctcccggcacaatccctggcgcggcacaaactcgcccccataaactaattgcattagtttatagtatacgctttctccgcggttcctgtcaatccctctcgccaaattgccacaaaccaaaaacaaaagcgctgctgggaattcttcccttcccagcagcgccttgccgcgaatgctatccgtttctcagtcgttccgattcctgcccggctcgccctcagcgcccgcgagcaaaagtggtttgcgcgccccattaggaatccaagttttcaatggcctgctggggcgagggcttatgccgccagagcacgtaaaacgagagaatcaccgtcagcacatcggccgccgcctgcgaccagacgatgccgaacatgccaaaaatcgcgttgagcaaaaacagcatgggaatgttgaacaccagccagcgcgtcatgcccaaaaacagggcgatgcgccccttgccaaaggcttggaacagatacaccgtgaaaaagctcaagaacatcagcggcgtggccagcacgcggatgcggaggaattgcgaggccagttccttcgtctgcgcgtccgcgatgaacagcccggcaaactgcacggcgaacagttcatacagcagaatgctgatggccgcgatgacgagccccaaattgcgggaaagccggatcgtatcattcatgcgtttttcgttcccggcggaaaaattgtacgccaccaagggcatcatgccctggcaaatgcccacgcccacgttgagcggaaagcgctcgatcttcagcacgattcccacggcggccagcgccaaatcgtggtacgaaaccatcaacttatcgatgaccacatagtccagatcaaacagcagcgtggtgatggccgaaggcacgcccacgccgaacaccgccgcgatgctggccttgctgggcagccccacccggggtgaaaacgtgaccaccgaattgcggccaatccgcatcagcacccccacgaagaacaacagcgccacgcaattgctcaggcaggtggcaatgcccgcgcccagcacttcgtagccatccggcagcagcacaaacatgaacaggggatccagggcaatgttcaacaggccgcccaggatgatgcccacgctggcctcccgagagcggccgatgctgcggattaggttggagagcacgttggaaagcacagtgggaatcccgcccaagacgatcacgcaaaacgcgtattgccgggcgtattcataggtgttttcccccgcgcccagcagccccaggatgggatgcataaaaaccgcgatgcccaccgaaaacagcgccgcgatgcccagcgccaaatagaaagaaaacgcgctcacccgccgggcttcttgctccttcgcctgccccaacaggcgggcaatcagcgagccgccgccaatccccgccaggccagccaggcacagcgtgatgttgaacacgggcaaaatcagcgaggtgcccgccaccatatagggattgttcgtttggcccacaaaaaacgtgtccgccatgttgtaaatcaaaacgatcaactggctgaccaccgccggcacgatcatcttgcgcagggcgaccggtaccggaaggctccggaaaatctcttctttggcaaaatccgttttggtgcgcattccattccacccacactttcccctgtatgtggccccgcatagctcccgaaaaagcggcgctgggccaaaaagaaagacaagcggccctggccggtcaagcaaaccacgccggacagaccccttgtgccccagcattatagcacacttcccccgggaatgaaagacgcgcgaaggaaaaaatccagacgacagcaggaaaaaagcggcgcttgcggggatgggaaagacatgccgcccatccgccgaaaatcgcgcttgccaccggggcgccctcatgttataattcatacacaaacaggcaaaggcggtgtcaccatgcccatagaagccattgtgcaaacgatcgcaaaagaattgcgggcttgtcccttcctaaagggcgtcgttctcggcggctcaagggccacgggctgcgccacggaaagttccgacatcgacgtcggcttgtattacgagggcacgatcgattatggccagctcaatgcgattgcccagcggctggacgacgcccaccgggaaaacctcgtctgccgcgaaggcgaatggggcaattgggtcaattgcggcggttggctcgtgatcaacggcgtccatgtggattggatcctgcgggattccgcccgagtgaagcgcatcctcgcctcctccgaggcgggacaattttccgcccattatcaaaccgggcatccccacgcgtttttggacgtcatgtaccgcggggaactggcttgctgcaaaattctctatgccgcggacgaagaatttgccgccacaaaaaggcaggccgaacgctatcccgccgccctaaaacgcgccctggccgatttcttttcctttgaaagcgaattttcctgcgcgctggcggaaaaaagcgcgtccagcgaggatatttcctacgtgaccggccacgcctttcgcgccgtttccgcgctaaaccaagtgttgtttgccttgaacgagcaatggtgcctcaatgagaagaaagcggttttccggattgatgggttccccatagcgccggaaaactactcgcaaaccataaccgccatctttcggcagatcgccctttcgcccgagcaaggcacgcaacgcctgcgcgccctgtgcgaggaagtcgccgcgttgcgcgccgggcacaaatagcccgctaaacttccgcggcgcgggcatcataagcccagccaaggtcgcaattcgatttccgcaaccgcgtaaagtgcaatgctccctttgttcattggacgtccgcttcgcccgtttcgcgcactgcgcacggcgaagctccgtcccattgggcgcggcttcgtgcgcatccatatagcgcggcagcgcccggtttatcaacgatcagaggctgcgaaaaaacttttgctgttcttttcacagccccatcttcgctcctccgcacgaacacctttctcccttatggcttttctgagcaaaacgcctttcttccgctcgcgcgcatcatccgacttatgccgcttcgcttcacgcgcctggcctttccaccataccatccaaagctttgagaaattggggtagaaaaaaaggattgcgtagatattactctacgcaatctcttggaatccggcagcgt

SEQ ID NO: 705 - DNA, 23806 bp, Unknown
  16S sequences of unknown bacteria
gatacttctccagcttggcgatttcgcccaggtgcttcatgacttccttcttgggcagcatgtcaaaggtgccgtcttcctgcatcttcttgagctgggtcagacgatccacacggccgcgcatggtcttgaagttggtgagcataccgcccagccaacgggcattgacatagtactggccgcagcgggaagcttcttccttgatggcttcctgcgcctgcttcttggtgccgacgaacaggagagagccgccgttctgcgccaggttcagcacgaagttgtaagcctcttccagcttcttgacggttttctgcaggtcaacaatgtagatgccgttgcgctccgtatagatatagggtgaccgaagtggacgccagcttcgagcagctgcttcatggatacaacgttctgatttgccataatgttttgattcctccaaatttagttttttacctccagaagcttcctctccccggctaactgccgctgcggcagcaccgaccgaagatccgctcctgtgcggaatgctgtaatactatatcacaaaagaaattgatttgcaaggattttttgccgtttttctgcgctttcgggcagattcggctcgatggttccacagggtgccgccacagataggctgttttcaaaaatgccagcggcggttgcgctccggaggggtggcttttcgcggaaaggatttgtcaaccagaatgagatcgtctccgatttgcttgatgcagtcccaagggatgtaatattcttcgccccgcagcaggccgaaaaagcggcccttgccataggcgatgattgcgcagacccgcccctccggcagcaccaagtccacatcctcagcgtaaccgatgcgcttgccgtcacaaatattgataatctccttgcatcgcaggtccgtgattctgcactgcatggaaagcctcctttcccaatatgccgtcttttggatattttatgctccgctccgcctgtcctatgcaaaatcgcgcaaaagcgcgccgcgccgacattctttttgcctgtatccggagaataagaactgctctgctggcaatactgataacaccgagaacgaacgcggtgggaggcaacaggcggcatgcagagcaaagtggagatctgcggtgtgaacaccgcaaaattgaaagtactcaaaaatgcagaaacgattgccttgctgaaacagacaaaggagggcaacatgcaagcgcgccaagaactgatcgaagggaatttgcgcttggtgctttctgtgattcaaaagtttaccgggcgcggggaaaatgcggacgacctgtttcaaatcgggtgcattggcctgatcaaagcgattgacaattttgatattaaccagccggtgcgcttttccacttacggcgtacccatgatcgtgggagaaattcgccggtatctgcgggacaatagcgccatccgcgtcagccggagcatgcgtgacacggcctaccgtgtgcttcaggccaaggaaaagctgatgggaagtacgcagaaggagcccacggtggaagagattgccaaagaattggatattcctcgggaagaagtggtgtttgcgctggatgccattgtggcgccagtatcgctttatgaaccgatctattccgacagcggggacgccatttgtgtcattgatcaggtgagcgacaccaaaaataccgacgaaagctggctcgaacagattgcgctgaaagatgccatcggccatctgacggatcgcgaacgccgtattctgacgatgcgtttttgcgagggaaaaacacagatggaagtatctgacgaggtgggaatttcccaggcacaggtgtcaagattagaaaaaaacgctattaaacagatcaaaaaagatctgtgatacgaatgcgttccgcactgcccgatctggacagtgcggtttttccttctgcactgcacaaaagatggacgaagggataccctgcggatggaaagggagacggagaatcctggcttcggcttgccagaatggaaaaaatatgctaaaataaaccatctattttggccggctgcacgttttgctgcggggaaacgagggatctctttttgatgcattatctgaacgatctgttttctcagatcgatttcaccaatctgctgagccttttgctgcgggtggcagccgtgtttttgtgcctggccgtgcacgaagccagccacggcctggcagcgtatgcgctgggggatccaacggcgaaaggtgagcaccgcctgtctttgaatcctctgcggcatattgatctgctggggcttttgatgatgtttttcgtagggtttggatgggcaaagccggttcctgtggatatgcgctatttcaaaaatccaaaatccggaatggcgctcaccgctttggccgggccgctttccaactttgttctggcgttggtgctgctgtttgtgtgccgctttatggcctatcatgtggcggccactgctttcacggtggcattgtacagttttttgtatactactgcctttttgagcgtgggtctcggcacttttaacctgattcccatccctccgttggacggatccaaggtccttttttctttcctgccggatatggcttattttaagctgatgtattacgaacgctacggtatgcttttgctgctggcgctggcttttatcggtgcgggcggcggctttgtgtcggcgctgatgaatacggtgttccgtgcgctcctgacgctggtggggctgtaagagcgggggcaaatagatgaatacgccgatttttcaactggagcatgtggtcaaaatcaaagaagaagacgctcttgaaaattttgttggcccgcttgatttgattttgtatcttttgagcaaaaataaaattgcgattcaggatatcaaaattgcggatcttctggatcaatatcttgcctatatcgagcagtgccagactatggatctggaagtggcgagcgaatttgtcgccatggcagcccacttggtttacattaaaaccaggatgttactgtctattgaagatgaagaggccaagtctgagatggaccagctgatccgctctttggaggagcgtcagcgcaatgaagactatatgcgtgttaaggccatggcggaaaaactggaagtgcgcggggaatatgggcgggatatttttaccaaacgcccggaaaccatggaccggagcagaatttttgaatacgatcaggaaaaatccgatctggtcttgtgcatgcaggatcttctggatcgcactggctggccaacggtgccttcgctgcattctttcgatgggattgtgatgcgcgagccttatcctgtacaggataaggcccgggatttgctctgccggctggtaaaaggcggcatcacgcgctttcagctcctgtttctcggtgcccgcagccgcagtgagctggtggctactttcttggcggtactggagctgtgtaaggctcatgtggtgcatgtggtcggcagcgaacgggactgcacagtgaaatgcatcgatgaaaacgctgacacggctcagcttttctgaagcgagagcaaggagaattatggaaaatctggaaacaaaagaattggcgtctgttttggaaggcatcttgttcgcctccggtgagccggtggatgtgggacgccttgcctttgcgctggaactggaccgagagaccacggagcagttgctgcagcatctggcggattattacgcctatgagcggcgcggaatgcggctgatccgtatggacgatgcatatcagctgatttctgcgccggaatacggcgaagtgatccgccgggcctttgaaatccggaaaccggcaaagctgtcgcaaagtgcgctggaagtgctgaccattgtagcttactatcaacccacaaccagggcgtatatcgatcagatccgcggggtagacagcgcctatacggtgggcctcctgctggaacggcatctgatcgaggaatgcgggaaactgcaggtgcccggtcgtccgcgcctgtatcggacaaccaaggaattcctgcgggcctttcatctgtcctcgctggaagagttgccggaaatgcctggtattgagactgacggccagctgcgactgggcgacgacggtacggtgctcgcgccgaaagagccttcttcgcctttggaaggcgggcagttcgtcccgatgcagacaaagacggaaatgctgcaggaggaatcctgatggatacggactgccgtggaaaggagcgtttggaatgctgctgtggatcgtttttggcacagttgcactggtagtatgcctgctgctgtcgatgaaaatcggcgtacgcgtggtatacgacgctgctcagctgcgtgtttggctgcagttaggcccggcgatgctccaggtttatccggaaaagaatacaaagtccgatgtggatcaaaagtggaaaagagcaaagaaagacgtgtcggatcaggggacggggaaaatgccgaaacggaagatcaccgccgaggcggttctttcgctgctgaaagaactgcttccgccatttctggatgcgctggggcgcgtgcggcggggtatccgtgtgcgctgcctgtccttgcatctggtaatctctgatcccaatccagcagaggctgcccggcgttatggtatggtgaacagtgttctatggcctcttttggctgtacttgaaaatactgtttctgtggagcgccggacggtgcagatcgagctggattttggcgcgcggcaaagccggggcgagggagaagttttcctcacgatgcggctgctccacggcgcggctgtcgttttggcagatgggctgagatgtctcaggcctctgcttcggttttggaaagaaacaaaaccggaaaagactcaacaacagaagcaggaaaaagcagcttccgtatcaaaaacagatgcggcctgaatgtggtaagaaaggaatgtatttgacatggagaaacatccgatcaacgaccttatggcagtcacgatggagaaaatgcgggaaatggtggacgccaatgccattgtgggccagcccatcacaaccccggacggtgtgacgctgatcccggtgtcccggatgagctttggctttggcagcggtggcggtgattataatacgaagtataccgccggaaccggaactggtgccaactttgctggcggcagcggcgccggcgtagatattgcgccgattgcattcttagtggtgaaagacggatttgtgcgggtgcttcccgtggcggttccgccggccagcacattggaccgtgtgatcgatatggcaccggatattgtggataaagtggataaatttattcatcgaaatgaagagaaaacgcaggaataaaggggaatactaaggctcaccgtgaggtgatcctgaatgtttcaaaaacaaggcaaaaaactactgagcgctgcgttgtgcgtgctctctctttgcttttctgtgcagtatccccaggctgtgggaacttctgccgctgcgtccattttgatggaagcggacagcgggcgaattttatacgcccaaaacagcgatcaggaactgggcattgccagcaccaccaaaatcatgacggcgctggtggccattgaatcctgcgcgctcgatgaggtcgtggaaatcaaacagtctcatatggtggaaggttcgtccatgtatctcaaacccggggaggagctgacgctggaaacgctgctctacggcctgatgctctgttccggcaacgacggccgggcgtggatgcattcgtggcgcgcatgaacgaaaaggcaggggagctagggcttgcgcatacgtcctttgccaatcccaacggtctggatgcagaaggtcattattccacagcgcgagacatggcggtgttggcggcctatgcgatgcaaaatgagacgtttgcgcgcattgtgtctaccaagcgcatcaccatcggcggccgcactatggtgaatcacaataagctgctgagccagtacgaaggctgcatcggtttgaaaacaggttatactaaatcttccggccggacgctggtgagttgtgctgtgcaggatggaatgaaactgatcgttgttacgctcaaagacggcaacgactgggcagaccatgccgcgctctacgattacggatttggggcctatcaactgaatgcgccggctgcggcgggcgaaactgcggcgcagattcctgtgatcggcggcacagcggggaccgtggcgctgcagttcagcggcgacttttcctatccggtggcttcgggcgaaacattgaccatgcgcttggatgtgccggagagcgtgtttgcaccagtcagtgccggacaggaagcgggggaggccgttttcctgctgaatgagcaggaagttggacgggtaaaagtctgctatggcgaaactgtccctgctctgctgcggcagaatggcggagtcggtggtatcttccgaaaggttctgcagcttttgaaccagtaaaaaacaaagcaacatagacagagaaaagaggatgtgatgggtacgcaggagcgtgtcagtaaaatcctatccgcttgcggcgtgtgttcacgccgggcggcggaggcgctgattgaagccggccgggtccgtgtcaacggggtgcaggcggagcttgggcagaaggcggatgccgaaacggatgaaatctgcgtggatggaaagcgtttatcccgttctgtgcagttttgttatctgatgctccataagccccgtggttatgtcaccacagtacgggacgaaaaaggacgcagaacagtgatggatctggtggctgaagtgccggagcggctgtggccggtgggacggctcgatatggattccgagggactgctgctgttgaccaacgacggcaccatgaccaaccatcttctgcatcccaagcacgaagtggataagacttaccatgtatgggtgcgcggctcggtccgtccggcggtccggcagctgcgaagtatgaaaatactggacggggagccgattcgacggccaaatgtgcatttgttggaagaaaacgcatggggcggggtactttccgtggtgatccatgaggggaaaaaccgacaggtgcggcggatgtgcgccgcgtgtgccctggaggtgctgcgcctccggcgcgtgcaggaagggccggtcagcctgggcgatctccctgtgggcaaatggcggccgctaacggatgaggaggtcgcacttttgcggagcgaagaacaggagctgtcctgacaatcaaaatgcaggagggaagcggatgcttctttcctgcatttttgcaatataatggatttgttcttgcaatttttcggaatttcaggtaaaataaattcaattttgcaaatcaactcgccggactgtgcagcatgctccggcagaagcgaggggatcttccgtgaacagtgatgtactgtctttgattcggaccaatatggatggattttctaaacgacagcgtgtgattgccaattatattctgagcaattatgataaagcggcttatatgacggccagccgtctgggaaaggcgatcagcgtcagcgaatcgacggtggtgcgctttgctgcggagctggggtatgagggctatcctgaaatgcagcgagcgctgcaggagatgatccgcaataaactgacttccgtgcagcgcatcgaggtttccaacgaccgcttgggcagcagcgatattttaagcgctgtcatgcagagcgatattgataaactgcgcatgtctttggatgcagtggaccgggacagctttgaccgggcagtgcagcagatcgtggatgcccggcgtatttatatcctggggctgcggtcctctacggccattgccagttttttggggttttatctcaatctgctctttgagaatgtagtcttggtgcacactacttcggtcagcgaaatgttcgagcaggtactccgcatcgggccgggcgatgtgatgattggtatcagttttccgcgctattccagccggaccgtgaaggtgatgcagttcgcctcagaccgcggggcagatgtactggccatcactgacagcgaagcctcgccgttgtgccggacagcgcgtactgcgctgctggccaaaagcgacatgatgtcttttattgattcactggtggcgccgctgagcttggtcaatgcactgattgtggcggtgagtcgccggatgaatacgaatatttcggatactttccgtgaactggaaaaaatctgggctgaatatggagtgtatgaaaatgccggtcacctcgaatgagattgttgtgatcggcggcggcgccgccggtatgatggcggcgctttctgccgcgcagcaaggcgcttttgtaacgctgctggagcgcaatgaaaagctgggccgcaagctcaatatcaccgggaaaggacggtgtaatctgaccaacaactgtacagcggaagaggccttggcccatgtgccctgcaatagccgcttcctgttcagcgcgttttcccgttttgatcctcgggccgccatgaacttttttgaatatctcggcctggcactgaaaactgagcggggaaatcgcgtgttcccggtatcggactgcgcttatgatgtgacggatgcactgcgtgctgcgctgcgccgccatcatgtgcgcattgtgcatgatcgggcgcaggaactccttttctcggaagagggcgcgttgtgcggcgtccgcgccgagcggggctgctacagcagcgcggtggttattctggccaccggcggtgtatcttatcctgctacaggctctaccggagacggttaccgtatggctgaggctgttgggcataccattgtcgcaccgaagccgtctttgatttctctggtttgccgcgacgaatgctgcgcccagatgcagggcctttccctgcgcaatgtggcgctgcgtatcaaaaaccagaaaaacaagaccatatatgaggatttcggagaaatgctttttacggataagggcgtctccggcccgatgatcctttcggccagcgcgcatctgcggaattacgaaaaggatcgttatcggctgcagatcgatttgaagccggcgctggatgaggaaacgctgaatcggcggatcgtgcgggatctggagcagcagcacaatagggatttcggcaatgttctctccggtcttgtgccgcggagtatggtgccggtgttgattgcacgtacagaaatccctgcgcatacaaaggccaatacggttacgcggcagcagcgccggcgcctgctggagctgctcaaatgttttgaagtggaggttatggggccagggccgatcgagcaggcaatcattacttccggcggtgtcaaaaccactgaaattcagccggccaccatggagtccaagcgggtgcccggcctgtactttgctggggaaatcattgatgtggacgcttacaccggaggcttcaatctgcaaatcgcttgggccaccggatatgctgcgggctgtgcagcagcacagcgcggttcggatgctgttctatataattaaggaagaagaggaagaacggacatggatcaactttttcatgctgtagcaattgatgggccttcgggggcgggaaaaagcacgctggcccgccgggtcgccagggaactccattttctctatgtggataccggggctatttaccgctccattggctggtatgccttgcagcggggagcggctctggacaacgcggaactggtggcggcgctgctgccggatttgaacgtagaagtgcgttatggcgaggacggtttgcaacatatggttgtcaacggccaggatgtgacggatgagatccgcagcccggaagtatctgccgcagcttctcaggtggcggccataccggcagtgcgggcctatctgctggatatgcagcgcaaccttgcacgcacccataacgtgattatggatggccgggatatcggcacagtggttttgccggaagcagactgcaaagtttttttaacggcatccgacgaggcacgtgccgcgcgccgctgccgggaattggctcaacggggtacgccggtggcctacgaagaggtgctgagcgatatgcggcggcgggacgagaaagaccgtacccgtgccgctgcgcctttgcggcaggcggaggacgctgttgtgttggacacatcggaactggattttgaagacagcgcgcaagcgttgctgcgtttgatcagggagagcatcagccatgaagcgtaatcgtttttattcgttggcctatgtggttctttggccggtgattcatgtattgtttcgtcccgttgtgacaggaaaagaacgcattccggacgggaatgccgtgttttgctgcaatcataccagcaactgggatccgctggtcatcatgatttgtgcgggctaccgccaccagctttttgccatggcaaaagcggagattgcttcctggccggtggcggggaagattctgaaacttgccgacatgatttttgttgagcgcggaaaggcggatatcggggccatccgcactgcaatgaaatatttgaaaaacgaccgcccgatcctgatcttcccggaaggcacccgggtgtcagaggacgaagcgatctctgccaaaggcgggctgtccatgctgtcggtgcgtaccaactcgcccattgtgccagtgtatttggatggcggcaagaaatttttccgccgcacctgtatcgtgtttggcgagccgtatcacccgcaggtggcgggacgccgcggcacggcggaggagtaccagcaaatcgccgacgaagcgctgcgccggatttatacgctaaaacaggagcggaaggtatgagggaaattcttttggcccaaagcgccggtttttgttacggcgtacggcgcgctgtgcgtatggcggaggaagccgcgacagactgctcttcctgcgttatgctgggatccatcattcacaatgcccatgtggtagaggatcttgggcgcaaaggggtgcggcgtatcagccgccccgatgaagtgtgcgaaggggaaacggtgatcattcgttctcacggagaggccaaagctgtgctggaagcgctggaagcgcggggggggcgtgtagtcaattccacttgcccgcgggttttgaaaatccagcagttggtgcaccgtgctgaagaagaagggcgcgtaccgctgatcatcggcgatccggaccatcccgaagtgctgggcgtggcaggctggtgcagccgggcgctgatctttccatcgccggaaaccatcaaaaactggctggcggaggataccggccatgcgcatctgccgctgacggtggtttctcagacaacttgcacacaaaagctctttgaaatttgtactgaaattctaaaaaaagagtgtacaaacctgaaaatttttgatacaatatgtaatgcgacctataggcgtcagtcagaagcggcccagattgcggcccgggttgatgctataattgtagttggcgaccgccaaagtgccaatacccgacatcttaaagagatatgttcaggaatatgcccggtagtttttcagatcgaaagggcggacgagctgcccctgcaggatctgaagcgatatgggacagtcgggctgaccgcgggcgcttctactccggcgcgcatcataaaggaggtctatacgacaatgagtgaagaaacgattatggctgggggcaccgaggattttgccaaaatgctcgaggagtccttcaaaactttgaatacaggagataaggtcactggtatcgttactgcgattacccctaccgaggttcaggtagatctgggcaccaagcaggccggttatatccctgtgagtgaactgagtgatgattcttccgttaagcccgaagatattgtcaaggtcggcgatgagattgagacctatgtcgtccgtgtcaacgacgtggaggggtatgcaaccctgtccaaaaagcgtctggatacggtgaagatgtgggaaaccattgaaacggccaaggaggaaaagaccaccttggaaggcatcgtcaccgaagagaacaagggcggcattgtcgtgtctgtgaaaggcattcgtgtatttgtccctgcttcccagagcggcctgcccagaaatgcggagatgagcgagttgctcaagcaaaaagtgcagctgcgtatcaccgaagtgaaccgtgcccgccgccgtgtggtcggttccatccgcgctgtccagtatgaggcccgtcaggccgctgctgaagcgatttggaatgagatcgagccgggtaagagatatagcggcacagtcaagtccctgacctcctacggcgcatttgtagatattggcggtgtggatggtatggtacatatttccgagctgtcttggagccgtatcaagcatccttccgaggttgtttccgtgggcgatcaggtcgaggtttatgttatttccgcagataaggaaaagcataagatctccttgggcctgaaagaccgcagtgtggatccctgggacaaattcatcgctacttatcatgtgggcgatgtggctgaagtcaaggttgttaagctgatgactttcggcgcgtttgctgaagtgattcccggtgtggatggcctgattcacatttcccaaattgctgaccgccggatcgacaaacctgccgatgtactgagcgagggtcagacggtggaagccaagatcattgccattgatgaggagaacaagaagatctccctgagcatccgtgctttgctgcaggatggcgctgatgaggctgaggtatctgcttctgaagaggaagaataaatcccaaataggaaatacgcgtgttccgacagggaacgcgcgtattttttcttgcaaaaattttccaatgctttataataatacactgagaatgtatcagaatacgaacagtccgtactggctccttcgctggagatggagacgtcatatgaggcggcaggatgtttgtggtcggggaaaagtcgtgcattccatgtagcggaacagaaaattgacgaagccgttgctccgcaggactaaagggaaggatggaacgccccatgggcatattttcgaaactgtttggtcataaaacgtcccagcatccgtactgcgcggcgctggtgccggcggcaggggtgtctgcgcgtatgggcgggctggacaaactgttttatgatttgtatggacagccagtactggcccggacgctgttggccctggatcgctgcagccggattgatgaaatcgtcgtcgccacgcggcaggaaaacattctccgtatcggggagctttgccgaacctatgacatccgcaagcctgtgaaaattgtggaaggcggaaaaaccagggcggaaagcgtgcttcaggcggcgctgagcgcggacgccagcgcggaattcctggcggtgcatgacggcgcgcgtccgctggtggagcagcgcgtgatcgaggaaacgattcaaaaagcgtatcaatgcgcggcagcagcgcctgcaacgccggttaaggatacgatcaaatttgtctgcgacggcgcggtggaaagtacaccgcagcgcgatcgcctggtggcggtgcagacgccgcaggtctttgatgcggaattgttaaaagcggcgctgcagtccgctgtagaacagggcgtagaggtcacagacgactgcagcgcggtggagcgtttggggaaaaaagtatatctggtacagggatcctatgaaaatctgaaaattacaacgccggtggatctgctgctggcggaaaaaattctggagttgcggggggagatgttttgacagctctgcgtgtgggacacggatatgatgtacaccgcctggtagatgggcgcacgctgattttaggcggcgttacgattccttatgaaaagggtcttttggggcattcagatgcggatgtgctgctccatgcggttatggatgcgcttctgggcgccgcggctatgggggatatcggaacgtattttccagacagcgacgctgcgtttctcggctgttccagcctgaccctactggaacgcgtgcacgctatgttggccgaacggggatggaatgtggtcaatgtggatgccacggttgtggcgcagcgccctaagattgccccctaccttctgcagatgcgcaggaacattgcgcaggcgttggatattgcggtggatcaggtcaatgtgaaagggacaacagaggaaaaacttggctttacgggagatggttccggtatggcggctcatgcagtctgcctgatggaacaaaaacagtcttaacaagcgtgcggtttgccggagatctgctttcgacaaactgcacattttttcttcccgttcatatcatgggacgggaggagatctctatgaatcattatctgatcgtttgtcgatctgtgacctatgcccagcgtatgatgcgcactttacagcgcgctgcactggcatgccatatcatgcggatcccccagggactggtgcccagcggctgcggctatgctgtgcgcatccgggaaggggatctcagccaggctctgcgggctattgggcaaatcaatatgcgccctgtggcgctgtttcttgacgacggtatctcttataccgaggttccgttatgatctatctggatgcggcggccactacgttccaaaaaccgcgcactgtggctgccgctgtggagcgggccatgcattatatgaccacgccgggccgcggcgcttatcaggaagcccggctggcggcggaaacggcctttcgctgccgcagcgaagcggcggctctctttcatgttcccggcgaggacaatgtggtgtttactttcaacgctacccatgcgctgaatattgcggtgaagacgctggtgcggcccggcgacagtgtcgttgtatccggttatgagcacaacgcggttatgcgacctttgtatggaatcggcaatgtgcagatcaaaacggctcctggcatattgtttgaccagcagtccatcatagcggattttgcgcgggccattacgccggaggtgcgcgcggtattctgcactcatgtttccaatgtgttcggatttgtgctgccaatcagtgagatcgccgcgctctgccgcagccgcggcgtaccgctggtgatcgacgcctcgcagtcggccggcgtgctgccggtggacttgcagagcaccggggcggcattcattggtatgccgggccacaaagggctttacggaccgcagggaactgggctgctgctttgcggtacggaaaaagtgaagccgttgatggaggggggaaccggcagcatgtccatgttgagggaaatgccgccagatcttcccgatcggctggaagccggaacacagaatattcccggaatcgcaggcctgctggaagggatacgtttcgtgcgccgcatgggaccggatgtcattctgcaccaggagagcgagttaattcatcttttggcaaaggaactgcacgcgcttccggaactgcgtgtgttttcagcgcagcaggaaggctgccaaagcggtgtattgtcctttttgtccaggagcatggactgtgagcagttagccgaccgcctttcagaacggggaattgctgttcgggctgggcttcactgcgcgccattggcgcatgattccgcgggcacgctcccgatggggacagtacgtgtcagcgtttccgcattcaacacagagcgggatatcgtgcttttgctggacgcgctgcgggcaattcaacggggattttgagcagcaaaacaggatttccgaaccgttttgcgttgcatttatcgaaaaaataaggtataatatcattctaatcctaaaatagccggaaaacagtctgaagtctgaggaatgaggatatggagtttttgaccaccacctatgaaatggtcgcaaattatttcatgatgatcaaagtgaccgatgtaatcgacatggcgatcatcgcttttgttgtgtataatatcctgatccgtatgcgttcgacgacgtctgtgcgaattcttcagggtgtgctggtgcttttgatcattatgtggctttccacaatttttgacctgcggtgcatcaatttcctgctgggccatgcggtccaatggggtgttctggcgctgatcatcctgtttcagccggagctgcggcgggctttggaaaagatcggcagcagcacagggctcaagcagatgtttatccgggaggaagcgttgcctgccatcgagcaggccattaaggaaacggtgacagcctgtaccgaaatgtctcagagccgcactggtgtactgctggtgtttgaacgggagaaccaactggacgatattttgcgcagcggcacaaaaatcaatgcggacgtgtccagcgagctgctgaaaaacatatttttcattcatgcgccgatgcacgacggcgcggcgattgtgcgggacgggcgcctgctcggcgcaggctgcatgcttccgctttccaaaaacgtcaatctaagccgggatcttggcatgcgccatcgtgccggtatcggcatcagcgaaaattccgatgcagttgtggttttggtgtcggaagagaccggcgcaatttcagtcgcagtggacggcagtctccgccggcatctgtcggcggagacgctggaaaaatttttgtataatgaattgctgccgaacgcatcggacaaagaacagcagtccggcttgaagggcggactgaaggacggtttgttcaacttgaagaccctattgagcagaaatggagtcggcgatgaaaatcagtaaatcccaacgggcagtttatattatgatctcgattttggtggcggtggtcttttggctgtatgtggataacactggcgccaatcagagggatgttcggctgtacaacgtaccggttacctttgtaggcgcggaggacgatctggctgagcgtgggctgatgctgacagcgggagaagatactaaaatcgaccttcggctgcagggccgacgtcaggttgttgcacagctcaataaaaataatgtaaagatccaggttgatgtaagcaacctcatgagtaccggaacgcatacgctcagttacagtatcctttatcccaacagtatttcgcccaattcggtgacggttgtatcggccagtttgtatatggtcaccgtagaggtcagcgagctgcatagcaaaacaatcgacgtggtggcagatatcaacggcagcgtgccggacggctatatgctgcgtgagtgtgtggtaacgccttcgactatcaccgtcagcggaacaaaagaggacatcgccgaggttgatcatgctttggtggaagtgacattgaacggcgccaccagttcgtacagcgaatatctcagctacagcctcattgatatcaaaggaaacccggttgtaaatccgaaactgcgctgcagtgacgacaaagtgcgcctggaagtcccggtggtcacgctgaaagagctgccactggaaattgactgggtggaaagcggcggctcacagaaatcggatatctcctatacgatctcacccaagagcatcatggtttccggggatgagagtctgctgaatcagttggattccattcaggttgcccagattgatctgagccaggtgatgggggatgatactttggaatatgatattcctttgcccaacggttgtatcaacgaaagcggcacggatacggtgaaggtttccattcgctttcgcaatctccagaccaagacggtagaatgctccagtatttcctttaccaatgtgacggagggatatacggcttcagcagtgacccagagccttgacgtgacgctgcgcggaacagatgcagagcttgccaaagttgacgggaaaaatgtccgtattgtagtagatctgagcgaaatgtccgctgctgtgggaacctatactgcaaaggcaaaagtttatgtggatgggacagagtctgtaggcgccattggctcgtatcaggtggggtatcgtctgcagaggtcctgaaataaaaggcaaatcatagacacaggcgccgggggcgcaggaggcttttatgactcaagtagcaaaagtggaaaaattactgggcagagaatatgccgagatctctgtggcacggaagacggcctgcggccatgattgcgagaattgcggcggctgtggggtctccggcggccaactggtgtatgctgtggccaaaaatcatattcatgcctgtccgggcgatcaggtagtggtggagagcagtaccaagaacgtgatgggcgctgtggcggtggtgtatgtgctcccctttgtctgcttttttctggggtatgccttgggagcggcactcctccatttcggagacggaatgagtggtgcgacaggagcagtgtgctttgcactggggctgatccccgcagttctctataaccggtatgcccggcgtaccggagcgctgcaatatgaaattgtgcgtctgttctgatggcggactgcacggtgtaaacacggatgttcggatatgtacgtccggtgatggacaagcttgggcaggaagagcaggcgcggttccaagcagcctattgcgggctgtgttatgagttaggccgccagtacggcgtgttggcgcgctgcatgttgaattatgatttcacatttctggtgatcctcttggagagcgatgtgccgcattgcacaggctaccgctgcccttgtaaacgcttttgcaaaaaagagcgggtggatacctccccggcgctggaagcggcggcggacgcttcggtcattctgacctggtggaaactgcgtgatgagatcgaggacagccatctggtccgagcggcaggttggcgtttgctcagcctgctcaccaggcgcgcctaccgtaaagcggctcggaagcggcctgcctttgcacggacaggggagaatgcgctgttttccctgcggcggatggaagaagaaaagactgcgtctctggatcgcccggcggacgcttttgccggacttttggccgcggcagcagaggaagtcggcacagaaacggatcggcgtattcatcaccaaatgctttatcagttgggacgatggatttatctgatcgacgcgctggatgatctgcaggacgatgcagcccggggacggtacaatccgttgctttatcgctatgggctgcagaatggacagatcagtggagaagatcaggagcggctggttgccacgctggatcattctgtgcgtttgattgcctcggcgcttgcgctgaaagaacctacggcctggacagcgcttcttgaaaatatcatctactatgggcttccgctgacaggacgactggttctggagggccgctggaatgcatccgccgggaaatggcgctgcttttctatagggcacgatacggtggagagcgaaaggatggattcggatacatgatcacagacccctataaagtactgaatatcgcaccaaatgccagcgctgaggaagtgaaaaaagcctatcgcgatctggcacggaaataccatcccgatcattatcatggaacggatcttgagcacatggctgaggaaaagatgaaagagatcaacgaggcttatgctgtaatccagcagcagcgaaagggcggcggtacgcagcaggggtacagttccggatcctccggcggaggctatcagagctatgggcagagcgcggcgtcccatccactgttccagcgtattcgcattctgattaacagcggagatattgtttccgccgaacagttgcttgagcaaaccgatctgcggacagcagagtggcatttcctgatgggatccgtatattatcgcaaaggatggctggacgaggcgctgaaggaatatgaaatggcctgcgctatggatccgaacaacgccgagtaccgacaagcctatcagtatatgcgcgcaggaggcagcgcttatcggccggaggaatacggctccggcagcatgatggactgcaactggtgccagaacatgatctgtgccgggcttgcgtgcagtgcctgttcgggcgggcgcgtctgtctgtgttgttaaaggaaaaaggaggaaacggaatatgatacgttcgatgaccggctatggccgggcaaaggagacgattcacaatcgggatattacaatagagctgcgttccgtcaacaatcgttttctcgactgtacggtcaaaatcccgcgggtctatactttctgtgaggacgttgtccgcgcacaggtacagaaggcgattacacggggcaaagtggatgtattcatcacaattcagtctgtgggtgcggaagccaccacggttacggtcaaccgggatctggctgcgggatatgtccgtgcgctgcatggtcttgcagaggaatatggcctgcgggatgatatctctgttatgggggtagcgcggttcccggatgtattgacagtgagcaaagccgaagaagatatggaaagcttgagcgccgatatctgtaccgtgctgcaacaggctattgccggctataacgcgatgcgtgaagccgaaggtgcacggctgtgtgaggatatcgtcgggcgcttggcaacgattgaagcgttgaccggaacgatcgaagagcgctcgccggacaccgtggcggaatatcgcgagcgcctcagcgctaaaatgaaagaagtgctgcagagcactaccattgaggaaagccggatcctgatggaagccgctatttattccgacaaagtggcggtggatgaggaaaccgtacgcctgcacagccatgtggcgcagttgcgtgccatgctggagagcggcggcgtcatcgggcggaaggcagatttcctgattcaggagttgaaccgggaagccaataccatcggttccaaatgctgcgacattgcaatcagtgagtcggtgattgctctgaaagcggagattgaaaagatccgcgagcagattcagaatgtggaataagacgttatgaaactcattaatattggttttgggagcctgatttccgacgagcgtttgctggcaatcgtcagtgcggattcggcgccgatcaaacgtatgatccaggatgcccgtgagcgcggtatgctggtagatgctacttatgggagaaagaccaagtcggttctcctgatggacagcgatcatgtcattctggcagcgatcacgccggaaactgtggccgagcgcatggggatcgcggtagagcgctatgaagaagagggagaaagagaatgaagtatggcagattgtttgtgctgtccggtccttccggtgtcggtaaaagcaccattttgaaagaactcctggcacgaaggaaaaatatctatttttccgtttccgccacgacacggccgccccgtcccggcgaagtggatcatgtccattaccatttcagtaccgaagaggagttccagcagctgatcgaagacgaagaattgctggaatgggcagaatatgtggggaactattacggcacacccgcccggtatgtcaatgaagctatggaggatgggcgcgacgtgatattggatattgaagttcagggtgctggaaaggtggtacagaaacggccggatgctgtgcgtattttcattgcgcctccctcttggaacgagttggagcgccgcctgacggagcgcggtacagacgcgccggaaaccatccatgtccggctttcccgtgcccgggaagagttccttcttgccagagactatgattatattgtggtaaacgacgcagtggaaaatgctgtgggcgctcttgatgcgattatgacggcagagcattgccgtccagccgagcagatgcggtggatggaacaaaacggataaacagaggaagaagcagcgcttcacgcgctgtttgggcgtggttccgaccgggagcaccgccggcctgcggagggcgcgcaccgaaacatatgctgcggcctgtcgtttaggatcaaataaaatttttgccgaaaaggcagattggatgatgcaattatgttattgtaccctgcagtggacaaactgaatgaacaagtccctaaccggtatcttctggtgaatgtggtggcccgcaaagcccgtgagattgcggatgatgcggaaagcctcggggagcatctgagtgaaaagccggtcacactggctattaacggcgttgccgccggtgaagtcgaagtagatcgggaagatctttacaatgcgctgaacgccgatgaacgcattgttgtcccctccgcgcccacgatggtggatattccggaagaagagatggaagaataagaaaaaacgggcgtgacaggcaaggatacggtatccttgcctgcagcggttttcggacggagcagtgagacatggaacgaaggagggcataggtggaacagatcaagttggcgcggctggccgtggctgctgcgccctatctgattgacaagccctatacctatactgtgccagatgccctggagccagtcctggagcgcggtatgcgggtgcttgttccctttggccggggcaaccgcacctcagaagcgatggtactttccatagaaaacggtgcaaagaggcggggcctgaaagcaattgcctccatattggatgatgccccggttctggatgcagcggggatccgcatggcgctgtggatgcgggaacgctatttctgcaccatgtatgacgcagtgcggaccattcttccgacgggattgtggtttcgcactcaaaccgtgtattatctctgtgatggagtgcagcgtgaacaggctctcagcgaaagcaagacagtgtcaggcgccgaattgctgctggatatgctgtttgccagagggggaagggcggaggaggatgttttgaaagcagcctgcggtccgcgcacaacatcagcactgaaagccctgtgcgccatggggctggtgcgttgcgaaacagagtcactgcgccaaattcaggatggcaggcagaaaatgcttgctcttactttaccggcagaggaggctatggctgcggtggaagggaagcagcgctctgcgccactccggtacgaggtggtcaaactgctctcggctgtgggcagcgctacacaggcggaggtctgttattttactggtgcgtctgcttccacaatcgcttcgctgaaaaaagcggggttgatcactgtgtatgaagaagaaaaactccgcatttctcatgcttataccggcggagccgcgccggagatccatctgaacgaagagcagtcttccgcctatgaggcgatttccgaacaaatggatctcggcaaagcttctgcagtactgctgcacggagttaccggcagtggtaagacacaggtgtacattcgtctggcgcaaaaagcgctgtcactcggaaaaagcgtcattgttctggtaccggagattgccctgacgccacagatgatggacaagttcggcgcatatttcggctcgcgtgccgtgatgctccacagcgcccttcgtatgacagagcgctacgatcagtggaagcggatccggcgtggggaagtctctctggtacttggaacccgtagcgctatttttgccccgctgccgcatctgggattgatcattctggacgaggagcaggaaagctcttatcagtctgaaaatcctccgcgctatcatgcgcgagaggtggcgcagtatctgtgcgcacaaaatcaggcaactctggtgctgggttcagctacgccttccatagaaactgcctatgctgccgagcatggcctgtatcgctgtatcaaactgcggcagcgttataatcgaaaagccctgccggaagtgatgttcgccgacatgaaggaagagctgcgctgcggcaacggcggg

SEQ ID NO: 706 - DNA, 23649 bp, Unknown
  16S sequences of unknown bacteria
ccaggctttcgcagacctcctctaccgaaggctctctcgaaagccagaggctgtcggagccgtatacgccgtccccatttgctctaagacaaaaagtgcaggaacagggacaccgatttgtcatgttcacatagattccgttctttacctgatatgtaattgtcatattttttctccttttccttaaaacagattccgaagattttccgatatcgaaaaagtcagaaacatccgcgcacagcgcctgccggcggacgccgcgctatacgccctacccgtttttcaaaattttttccttcagatgcattctgtcaaagctgtttcctgcgataatataaaataccgcgctcagcagcacctgaatcaggtatccggggattccggccaaaggcgccgcccagtttcccgtaatcaggctttcatacagataatatccgccggcacacagaaccaatgacggcagcagagcgatataattgcgccggcacaggatcttatccatctttgaagtaaaacaaaaagccgtcagcgccttaatcactatcgttcccggcgcccagagcgcatatcccgacaagatatccgccgccccggcgccgatcgctcccgccgccgctgcataccagggcggaagcatcgacgacgccagatacagaaccccgtcgccgacatgaatatatcccgtccagtgagggatatggagataggcggtgaaaatataaatgacagccgcatataccgccgtaagagtcagatattttacattattatttctcatgatcattctccaagttcacaaagaaattcttcaaaacagataccgtcggtcttcggaatccccatctccacagtcctcttcagcgtcctgccgataaaagaggaggctctctttaccgaccagacgaaatcgcggccgctgactgcatccgctgcgataatcgaagcgaaaacatcccccgtgccggaacgaaaatccccaactctatgttccctgacgatcattggcgtccgctctctctgatagacataattcaggagatcggacccgtcggacagcccggaaatcaccactttcttcggtcccataccggacagcctttccgcgagatccaaaagttctttttccgacaggtcttcccgatattctctgcccgtcaatatgcacgcttcggtcagatttggcgtcagaatatccgcatacttcaccagttcgtgcatatcttttgccagagcttcgctgtaagtcggatagagctttccatagtcgcccatcacaggatcgacgagagtcagacaccccgtcgtatgaaaatcgcgaaaaaaccgctccacaatctcaatctgccgatgagaaccgagaaatcctgtcataatgccgtcgaatttcaagcccagctttttccactcccccgcataggcttccatatcgtccgtacagtctttgaaaaagaaactttcaaatccggtgtgattggaaaaaatcgcagtgggcaacgcgcagcactgaattttcatagcggagatgactggcaggcagaccgaaatagaacagcggccgaatcccgaaaagtcattgatcacagcaatttttttctgtttattatgtgacataaaatacaacctgcttcccgatgaatcagtaattacgtaacgatattatattaggtcgaaactgacattattaaaatatccagattgcaaaaaaaatatatggccagatctttgatctgaccatatttcccgcagcagcaggcggaaggcaaactgctgaaactctatttagaaagaaacaaaagaggaagaatcttttttcataagacaaaagaactccggtcttccatcgcagccgaagcaggaagagacgacaggcctctgacactgaatcttccggagaagcagagaaattgcagcgccgttctccgtttcactctatttgtcaaaccgccggcataccgatctttctgttaaaccggtcgagcgcaaaagccgccgtgattcccgcgatcagacaaataacattcacagcgcagcctgcaggactctgtgcgaagctttgaaacgggataattacaatcgtcgccgccatgacgatgccgatgattccatgaaaggcgatactgtaataattctccatcagacaattcaccgctttcgccagcagtaccactgtcagcagcgcgcctattccggtgggaaagaggatttcagagttcagacttccaatccccgccaccagcggcgtgtaaagacccagaggcatcagcagtgtcgaaaaactcattcctggagcgataacgctgagagcaatacagaatccgcagaagagataccagttaaaattcggcataatctccgcctgaatcaactgaaggctccaaagcagagcgagaatcgccgcaaaacagaccgcgagggaaataaacgaacctttgctccggccttttattcccgcttcacgaaacagcgacggcagcattcctgcgattaagcccacaaacagacatacagacggatccgggtatttctccagcaaaaatcccagcattctggccacaacgacaaaaccgaagcttcctcctaaaatcagcggaatgagaatatgataccgttttcttaatgtccggaccggatgagaaaacaattccatgacggtcttgtaaacgccgaatacaacgcacaggactccgccggatattccgggtagaaccgcccccaggccgatcagcgcgccctgcaggaaccggagacccgctatcttcggaaggttgattctttcagtggctgccgattttgtttcgcatactctatcatccataaaattcctcctgaatcagtcattttgttctgcgttgcgaagttttccgccgcatgcggaacaataagcatctccgtatgcacatacggttttgcagtaagagcagacaacggtcatctcccgcccgcagcaaatacaatacctgtttttccggctctgccatttgccgcagttttcgcacttttcacacaggaaactcctcactgacacaaataaaataaccgcgattaaattcccgcaaagcgccgccagaaaccacagaaagccatgaaaaccgctcctgacagctgcctgatacagccaggcggaaattgtcagccaataaacgcccgacgccgcaagacagatcagtccgaaaatacacagcgctataatcgctcctgccgtcgggtctgtaatgcctgaagttttcaatcgtccgatgttatcctcccagtcgccgcgttccttatccatgtcatgaccagaaaccggattcttcgatcctttatcgagagcatcataccgaccatcctgcacctccgtcagcttctcataggaaccgatctccgcgatctgcgcccggaacgcgatgcccgctgcagcgccgctaaaaataacggcaagcaccgctacgatgataaacttacggaaaaatttcggaaaatctgtccgcatcactctatttcttattctgtccacaagaatacctccttttatacgaaattcctgcaatgagcaaaacgtcttcttgcgagactcatattccgtctatggtttgttatgattcctgcacgaattctatgccgtgtttttcctatacaaaacgaagttttgctcctgtctgacggaactcagtataataaggaaatataaactggtactaatccgaagttaaataaaacctaaaatgtgcaaaaaataaaaacccgtcttccatctgagacgcaattcgaggacagtgttccatattcggcctcatcccggcagattgggaagcagcataacaaccgttccggcgacgacagccgcaagtccggcggctgatcttttcgacagacgctcatgaaatacgaaataagagaatgtaatcgtcaccagaatactcagcttatcgacaggaatcaccacgctggcaaaaccgtcctgaagcgctttgtaataacagagccaggatccgccggtggcaagccccgacaggaagagaaagccgatttccttcccgtcaacctgttttaattccttttgttttcctgtcacaaacaccatgagccacgacatgaccagcactacgccggtgcggacggccgttcccagattcgactccacaccggagataccgatcttgccgagaatagacgtcagactggcgaatacggcggagccggccgcgtaaaggaaccatccgcttccctgttccgcaggcctctgaacatcctttttctcgatcatcagaaaagttccggcgcctatcaggaaaacaccggctccgctgtaaacggtgatgctctaccgtaaaaagagaaacgccagcagtatcgtcagaactgtacttgatttgtccacaggtacgactttattgatatcgcccgcctggtggagcgctttgaaatagcacagccaggacgcaccggtggctaatccggacaaaatcagaaacagcggcgttttggcgtcaatcgaagcgatctgcgtttgagaaccggtgagaaacaccatcagccaggaaaaagctagcaccacaatggtgcgaatcgctgtcgccacagtggaatctgtttcccggacaccgcattttgcaaggatagaagtgagtcctgcgaacactgccgaaccaaacgcaaatacaatccacatagttcccccctgaattcacagccggtatcctacgccgcccaaatcctccgttactttgccggctgtttcccgctttttctccagcgcggcgagagatccgatccgccttggcaccgtgcgcagcggcggccggaagataaccgtgtaaagcttcaaaacaatcataccatatttttgtctctccgttttaaacggaaaaaaatcgcctcaaaaatacgttacagcccgaatccccggcaccgtttccctctgcaccagcggtctgcgcaggatccccgcttttttctgtggctttcaaaaaaatccggcgggtggaaatggccggattttttgcagcagcgtctgtcacgcagcatttacgagttccttgcccgcatcggacagcagagaccgatacgcacggagtacgcgctcggcaaagccggcggaagaaaagccgcaaaatacagtctctctcgccgcactgcctaatttgcggcgaaaatcgctgtcggtcagaagactgcacagctttatggaaaattctttctcgtcggaataaatcagtccattgccgccatcttcaatgacgccggataaacatggatcctcgcggcataatagcggcagaccggccgccatggcctcgatataagtcagtccctgggtttcgctctgagaagcgctgataaaaatatctcccagcgcgtaatagcgggcgacctctccgggcgccaccatacccgcgaagatcacacgagttccgtaatacgattccgcccgcctttccagttcttcgcgatacggcccgtcgccgacaagcagcagcttcagctgcggattcttctgccgcgcgaataaggaaagcagttcatcgatatttttttctttcgccaatctcccgaggtacagaagaactttgtccgtttcttctattcccagcttcttccgcaatgcggtgcgttccccggggcttattcccgcttcaaaccgattcagctccaaccccgacggtatgaccgtgacaggagtcctgacaccgtagccacacagaatatctttgacttttccggtgggtacgataacaagattcgttccggaaagaatttttttggaaaatgcggctgccatgtacttcccgaatctgacgttgggagaaaaataatgagtaaaattctcatagactgtatgataggtatgcaccaacggacaacggcaggcttccgcaatctttctcgcgagaaaaaaggtggaaaattcacactgactgtgaacgatgtccggacaccacttcaccagttcctgaacatacctgctggaaggcgccgccttgagacaggcattcggataaatcctccccacgccgacagatccaagataagtcacatttcctttcgtataagaatgcagatcgctggaaagcgtaaggatccgcacctccgctccctctgcggcaagtccgtctacaaggctgacaacagaagtcacgacgccgtttacagccggcttataccagtccgtagtaataagtatcttcataacgaattcctccttcaaagccaatcctttcttcgcataatactgacctccgtcctttgagcgccgggacagatatttcgaatatgcggtgagcaccccgtactccggagcgttcaaaaagtgaactgacgcaagaggattcttttcctcgccttcatccgctgtccgctgatctgtttctgctgacggtaccagcataaaacaaagtgaaaaaatacaaattaacagaggttaaacgaaagataaattgttgaaatttccgcaaaaaacagaataacgcggacagaatcgaggaggaaagggcaagctcaccgaatttaagacgcctgaagtgagccgaaaaacgaacaagaacagacaaaagaaaaaacgggagaaaaccggcatatacgccggaacattctcccgttaagttcttccgaattttcagcggatcttatctttttcaaactttagaatttcaccgctcatacaatcgacttcataatcatattcatatccgcctgcagtaaattcgatctcatatctgctcgaaccgtgatcggtatcgatgtgtgacctgtaaaacagaacatccgcttccgcgaccccagcgtgtgcaaataccgtctcttttgcggaagcctcgctcaccgccgtgccggctgcagattgaccgctctgctgcgcagaagtcccgttttcctgtccgccggaggaagaatcgctctgcggcagagaaggaactccgtaatattctttctcaaaatcgagaatttccaaacccggcagagatacctcataatcataatcgtagtccgacgttttaaaagacacatcgcagacgatagagaatcccttaaaatccaattccgactgaagcattgccgcctcctgcctcgtcactccggcatgctgcagagccgcgtcttccgcgctgctctttttggagtttgcgtaaaatgcgaatacgaccgccgcgatcacgatgatcaatacaataatcccgacaatgactgcaatttttttcttttttcctttttccatggacctcatccctttcccatatgattttgtataagcaatcctttttccgaattttaccatatattaaccgttcatttcaaccgtttttcccatcttctctgacccgtaaaaattcttctttaaaagtgtttcgccccaatcttttcaaccggaatgaaacgcagtcaaacagatcagatcaaaaagccgaaatgattttaatacagcgccggggaacatctgctctcccggcgccgcgtcatcccattttcttgatttctctgcgcaggcggctgataatctttttttccagtctggagatataagactgagaaatccccatataatccgcaacctccttctgggtcatctcacagccgctgatcaggccgaacctcatctccacgatgcgcttttccctctgatccagttttctcagggcgctgttcaacagatcccgattgacttcctcttcgataccgccgaagatcacatcttcttctgttcccaaaatatccgacagcagaagttcgtttccatcccagtccacattgagaggctcgtcaaaagaaatctccgatttcgtctttccagtacggcgcagatacatcagaatttcattttcaatacatctcgaagcataggtagccaatttgatattcttcgacggatcgaaagtattgaccgccttgatcagaccgattgttccgatggagatgagatcctccacgttggcggagccgctgtcaaaccgcttcgcgatatagaccaccagacgcagattgtgttcgatcagcgtgcttctcgcctcagaatcctgttctgtcagccgctgcgtcagttttcgctcctcttccggagagagaggcggagggagcacatcgcttcctcttatgtaaaaaatgcctttgccgtaatcattcgcccgggcgcttcttcccgtcaggcggccgatcagttccctgaagcgaaatttgagttccgccgccgacagccggatacgctccgcaatttttgtgaacaaatcaatcattatccctgcgcactcccttcatatacgaccgcaggctgcagcagaacagaaaattttccgtcctctttctccgctgcaaattccccgtcataaagtcctaaaaaaacatctttgatacagattcggtttccgccgaaggctccccctctgtcgatcgtcagactgtcgcaccgaaccgccattacaattccgtcgctgcacccgacgctccggtacggcactgcccggatgcgggaaaaaagcgactcattttcgagaatatctccccagcacttttcggcctctttcgccgagatgagagacaccggttttccagaaacgggctctctcaggaaatttgcagaatccactttgccttcgcacctcagttttttgttcatcagatcgatcgtcagctgaaatacagaggattcctcagaactgcgccgctttacatacttcagaatccagagcgccataccgcctcctgccgcggctcccgctaaaatcagcagataaccgccggaacctatgtagataaagccattatttaccgtacctcccgctccgatcatcatgagcagcgcgaaaaccgaccctcccagcagaaagctgacacagtaaaatacagctccgattttggccaggaggcggatgcccatcgaaccgaaagtgacctccgttaccgcaagaacgaagacaagttcatagaccagcgtcataattcccgacagatttaataaaataataaaagaaaacagcccgcagagcgccgcccccgcagcaatcctccaccgtttcggagttcttccgcacaacagcgccgtcagccggagtatccacagccctgcgataaagttctccgcgaagagatactccgcgtaaatcgtcatcggcattccccctctgtccgaaaatttcggcgaattttccttcccgccgcgtagtcacattatacgttcccacccagtcgaagaatgtcatttccgattgtcgaaaggaaaaaacgaatccaaggtataaaaaaaggcataccgtttccggtatgccttctgtctttttctttttgagaagaatatactttccgtctccgaaacagattcgcgctttcggacgccaattccgctgatttcactcccagcgaacgctgcctttaagcgagcgctgcctttgcagtttccaccagagcggtaaagcccgccgcatcgtgaatcgccatctcggagagcatctttctgttaatttcaatgccggacttcttgaggccgttcatgaactggctgtaggaaatgccgttcattctcgctgccgcattgattctcgcgatccaaagtcttctgaaatctctttttttattctttctgccgatgtatgcggatctgagggatctcataactgcagggttggcagctctgaataccttgctcttctgtccgtaaaagcccttcgctaactttaatactttcttatgcttcttcttcgcatttaccgctttcttaactcttgccatttcaaactacctcctcgccagattttacacgttcagtacagacttgattctcttttcgtctgcgctcgtcagaatggtaccttttctgagatttctctttctcttctggctcttcttcgtgaggatatggctcttgtaagccttatgtcttcttaccttgccggaaccggtaaccttgaatctcttcatagcccctctgtgggatttcatcttagccatttcgtctgtcctcctgattttcaatacagcggcttctgccggacctgtgatccggaaagcttttgcacgaggctcgctttccgcattcgctttctgcggccaggaactctgctgcgatactaattatttttcggtgctaaaaccatcgtcatatttctgccttccagctgcggtttcttctccactacaccgacttcagaaatgtcctgcgcaaactgttccataacctgctggcccacgcttgcatagcccttttctctgcccttaaagcgcagactcaccttgaccttgtcgccgtctctgaggaatttagcggcattcttggccttgacctgaagatcgtgaccttcgataaacgtgctgacacgaatttctttgatctgagtgatcttctgtttttttctggcttctttttcttttttctgaagctcgtatctgtattttccgtagtcgagtatcttacagaccggcggttttgcagacggagcgatgttgaccagatcaagcttcttctccgctgcgatattcagagcctgcgaagtcggcatgatgccgagctgtgatccgtcagtgtcgataactctgacttctttttcacggatttcttcattgatctgattctctttactgctaatgttcaagcacctcctaattatttgctagcacaaaaaaacggatataaaaatatccgcttcaaaaattcgaaaatgatgattcgatctttattgacccgtacgactccgacgccgcagggtgagaagcggacaacttcttctttatgctactcatcaagtatacttgtctgcttctctcctgtcaatgaaaactttttaaaaaactatttttcttcctgctcccactcactaaaaaattttgatttccaattacagctgattcagagctttcagcgctatcgccgcctctccccgatctgcgtcttccgtcggatagaggtatgtgctcagcggaatcatcagcttattagccaaagcccactgaaatgcagtctgtgcgtagctgccgacccgactgccgtcgcggtaggaattgagatttgtgtagccgtcggtcttcatactctttttctgagcataacgatagaagatcgtcagcatttcctgcatgctcacggcatcattcgggcggaaactgccgccgatatagccattgacgatgccattttcagatgcccatgccacagctgcattgtaatactgattagaaggaacgtcgcggaatccggaaccggaagcgtacggagaaccctcctgacgatatagaatggtcacaatcatagctctggaaaggctgccatacggcttaaaggttccctcagctacactgttcatcaggccgttttcatagacgtattactgcatctgcatagcggctgttccatttttttatttgcgcgggcagatgctttacttcatactccgcttctattttctgtaagatcatctcttggatacgaacccttatcccgccgtaatcccgagaaattccatgacttcccggtcttccttttccagaaacaactgtctgctgtcgcatattctgcgcacccgtcccccgatgatgaccgccgtccggtcagccagtttttccgcctcatgaaaatcatgggtcacaaatacgatagtacagccgaacagctgatgaatctctctgacaagtccatacatctgcttcttcgtattgggatcaagagcgctgaaaggctcgtccataaagaggatgcggggatctacgatcagagctctcgctaaagcggtgcgctgctgctccccgccggacaaagttccgggataacgatcggccagatgacagatcccgagcagttccatcatgtttcgtgatttctcttcacaggccgcccgcttcatcccctttatcctcaggccgtattcgatatttgctctcactttcatgtgaggaaataatccgaaatcctgatagacaaagcccaggcggcgatcctgcagaggtatgctgtgtaccggccggccatcgtacagaataccgccggaaaattcttcataaaaacccgccatcgattccagaagaacggtttttcccgatcctgtctgaccgagaatcgcgaagatttctccgtccttaatatccatcgtcacatcctgaagtctaaaatcgcctacctgcaatgtataattttttactgcaatcatacgtcctcacctcattttttccgatccgcccggctgactgtcgtctttttatccagcagcgcagacagaaaaagcgacagcgctgagatcagaaggagaatcaaagccgaggccatggccggcccggtgtctccggtagccatgttgagataaatactggtgggcagtgtctccgtcttcatccgcgtagcgcctaccagcatcagcgtcgctccgaattctcccagcgcccgggaccacgccaatatgcccgctccgatgatagaatttttcgccagaggcagcgtcaccgtaaaaaagcgctttacaggtgttgcacctaggctccctgcgatccattccagccgcggatccacgttcataaaggcagtcttgatcatgcggatcacaaaaggcagattaatcataagatgagccatgacgataccgttcacggaaaagatcacgggaaaaccatgagcgctgagaaacttgcccggcacggatgcgaacatgagcatgagactcagccccagcatgatattgggcagcgacagaggcaattcgatcaccataccgcagaatctcttcagcggcagatttgtacgcatcagcgcataagcggaaaaaagccccaatacgagacagatcgccgtggaaatcagcgacgtcgtcacgctgagctttaccgcaaaacgcacctcttcattctgaaaagcgtacgggagaaacggtacgcccttgacgacgataaatgccagagaggtgaatatatacgcagtgacgatcatcgcgatgatgatcgtcactgtatcgaaatatttcctctccttcttccgggaaaggcttttcctttgttctccgtctccgttatgccttctcatagccgtacttcgtccatacagccgcagcttcgtcggaatccagatattcgaggaattctgccagagcctcgtcgtttgtcgaacaggagagagaagccgccggaatcactttgatgtacttatccattccttccagatccaggatctccacttcctccgatttggcagcgttttccttccatactaccgccgcgtcgcattctcccgtggacagagctgtgatcatctccggagctgtcgtcgttctggcaacgatattggcagattcggaaagacctgcatcttttaacactgcgtccgcgattttgccgatcggcgtcgcctccgcgtcgcctgcgatcagcttcacttttcccagatcagcgatggactgtattcccgccggatttcctttcggcactgcgatgacaggaatgtgttttaccagctttttggaatccgaaacgtaatccttctcctgcagaggcgctaattcgccttccgcaccggcgataaacagatctccctgatctgtcgtagtaatctgactgacgatctgcgccgcatttccgtaggtcacctgaacatccgctccggtagcagctttgaagttgtccgaaatctctgcaaacggctgcttcatacccgcgccgcagtaaatcatcagagacttaccttccagagatgcccactggccgccggtttcctccacagaaagagaagaacccccgccatccttttccgtaccgcatgctcccagcgcaaataacatcgtcatgcacagaatcagcatcataccaatagaaacaatttttttcatcattttcctcctgcatttcagaatttattcttaaataaactaaaactaaatttaatttatatattatcatatttttctttcttactccaataatatctatatttttcgattaatattatatccatccggttctgctgaattatttcatatccagacctctgataagctcagctgtcccgcacaaatacttctgaaaatgtcttccggcaattctataaacgcgtaggaagaactggtgtttacagtttgttctttttatgataaaatgttcgtgatatatgatatgttactctaatcatcgaggaaaaagacaggaggcgaaatatgggcagaaggtctcttcctaccgacgaattcaatctgaccgaaagagaacgcaaagtactcgactttatgaaaaagacggctgcggaaaagggatatcctcccaccgtacgggagatctgccaggagctgaatgtaaagtccacctcaacgatccataaggacttagcctcccttgaaaaaaaaggcttcatacgaaaggatccggcaaaaccgagagcgatcgagatcgtcggcttcgaccgtcatacggaaaatacaaacggtccggcttccggtcccgcgtcgtttgccccttccgattcccggaatgatcagagtttctccgatatcagcgaacgttccgacgtcatagatattcctctggtaggacaggtggccgcaggtacgccgattctcgcaaaggaaaacatcacggatgcgttcccggttcccagccgctatgtcagcagcggcggcagtcatttcatgctgacggtcaaaggagaaagcatgatcgaagccggtattttcgacggagattatatcctggtcaggcagcagaatgtcgcagacaacggagaaatagtagttgctatggtggacggttttgaaagcgaagccaccgtcaagacgttttaccgggaagacggtcacatccgtcttcagccggaaaactcctcaatgagtcccatcatcgtcagagatgcgcgcattctgggcatcgtcaaaggcgtgttccgttatttcagctgacacaattctcctctcgaagatggatcacaatatatcagaaagcgaaaaagacgggaatggtatttcagataccattcccgtctttttctattcagtccggatccctgccgtttttttcaattcccaaacgtccggatccgctgtcgcctcgtatcttatacacctgtctcagccatcttcctcatccgataaaatataacgataacggatttccggatagacggttttcagagttttataagtagctcgccctgtcgcccgatcggtctcggtaaaataggacggccttccgcacagctttgaacccgctccgctcagacgactgacctcgatgcacgccgcattcatttttcccgcaaattgccggtgctctcggattccgttcccgagaagacggccgtatcccagcgcatgataatcgtccgcgggtatccagccgtcgcacaatttatagattacccatctctgatgttccagggcagccagttcgtacttaaaatcttccagccgggattcgatcatccctgcgctggcgtcacgaattcccggaaaacgccgggaagaatagagctcgtcattttctccggctcttacgaatcccatatctctcatcttgtatttcagatgaaccgcgctggcaaaaagcatacgcttcgtggataccgggagacgcccgccgatccttcctttttcatcttccgcaaactcctgaggaaagagaactctcgccagtttctccgtatcggtattgatgatattttccacacgatacaggtcgcgatcattgccgaaaggcacgaatctcaattcgtcattgccgggatccgcgggatgaccttctactttcagatcccacaccgcatctgagagaatttcatcccggatcagtacgaaaatatccggaagtttcgtcacattgaccggtcctccggtcaggtaattctcgtgaagcacatgcttgcgcacaaagtgagctctcacggccatcgctgtgcgcagcgtcgcttcgtcatcgccttcatcgataatgatataattggagtccagacatttatccagcgccagctccagttcttcggaagaagtatcggccggatgataaagcgttctcgtcagcttcagaggaagatagagctccggcgtaatcagatgacgctcctgcatcgccagattttcctgtgtcatctgggtaaacagaccgggacagcgccatttcatttcggtctccatcgcttttgcctgcggcccgatgatatttattttcatgatataggatttcatccgtccgcaccagtgaacggtcttcgccagcacagccacatcattcccgccgccgatgacggcgacgcgcagttcatccgcaccgatccgatccggagcctcgtaaagtggatgatccagcatcagtttctgcgccatgagctctcccggatgaatcaggacgatctccgcacagctgagatcagccgaatccagcacggtgcgcgccacttcggaagacgcgaacacatagatttttacgtcgtccagttccagacgacagcatcgttccaaaaggatcagcgcgtccctcaggttctgtttttcctcttcaccgatgagaaatacggaaatcttatctcctcgcattccggtgtcgagcgcctcctccgccgattgaaaataaacgatgtctcccagacccttttgtctgatatcctccgcgaggaaatccgcccgccggtttcccgcagaaaacagattgatatacaaattcagcacctactttccggtaatatccgttttttcttccgaagagacgcaggaacggcagttctgagaaataccgcagctgctgcagctgcctccgcagccgttggcatccgctcctttttcactcatcttcgccatcgccagaagcagacccgctacgatagctacgcctacgagaattccgattatattcgtcatctgcatcatcccttccgccgcgctattcttcgatatgttccatgccgtttttcaaaatagtggccacatgctcatccgccagcgaataaatcgcttcctttccgactttcttcgacttcaccagcttactctgcttcagaattctcaggtgatgcgataccgccggtgaattcatatccagaagagaagccatgtcgcagacacaaagctctgaattcagaagataatagagaatttttactctggtagcatcggaaaagatcttgtagagatccgccagatccgtgagtttctcgtcgtccggcattttcatccggacatcatccaccacgccctcatgaacgtgctgcagttcgcagacttccgcttccacattaagttctttgatcgacatttcacacctctttttctgtcgtccggaatctatcggggtgccttttgcgctgtctcaccgtaaagtaaatctatttcgcccgaagcattctcatagaattgagaattgcgatcaccgctacgcccacgtcggcaaaaacagcggcccacatattagcgattcccgcagcgccgagaaccagaataagcccttttacgctcagcgcgaagacgatattctccttggcgatgatgaccgtcttcctggcgatcctcacggaatccgcgatcttcgtcggatcgtcgtccatgagaaccacgtctgccgcctcgatagcggcatcggagcccatacttcccatcgcgataccgatatcggctctcatgagtaccggagcgtcgttgattccgtctccggcaaaagcggtcgtcttcttcggtccctcctgtgagagaatttcctcgacgatccgcactttatctcccggaaggagctccgcgtggcagctggtaatcccgagggcttccgcagtgcattccgccacatttctcttatctcctgtgagcatcaccgcattgcgcactccgatagctttcagccgctcgacagcggttctggcagaaggctttatttcgtctccgatgacaatggcgccggcgtagactccgtcaactgctgtatatattattgtaccacttttatcggtccgtttaaattcaatattttcaagcttcatcagcttttcatttcccgccagtacgttctttccggaaatcacagcctttacaccgcagcccgcgatttcttccagaccttcgatctcggcttcagatacaccttttccgtaagcttctaccacggacttggcgataggatgcgtggaagcgctctcggcgtaagcggtgatcttcaggagttcctcctcagagacattttccggaaggagctctttcacggtaaagacgcctttcgtcagcgttcccgtcttatcaaataccacggtgtccatccgggccagcgcttccacataattgccgcctttgacgagcactcccttgcgggaaagagccccgattcccccgaagaaactgagaggcacggaaatcaccagagcacacgggcaggaaatgaccaggaaggtgcaggcgcgaatcagccattccatccactccccggacagcaccagcggcggaaatacagcgatagcagcggctgcagctacgactgccggcgtataatattttgcaaatctggtgataaagttttctatttttgcctttcgaaccgacgcgttttccaccagctctaagatctgagccacagtactgtcgtcgaattccttcgtcacgcgcactcgaagtatgccggaaccgttaatgcatccgctgaaaatttcatctcccggcagaactttctgaggtaccgattcgccggtaagagcggaagtgtccaaaaaggaatcaccggacaggatgacgccgtccagagggactttttctccagggcggatgacgataatatctcccacttccacatcatccgggtccacttcggtcatctgaccgtctctttccagattcgcggattccggcacgatatccatcagctctgtgatggaagttctcgaacggttgaccgccaggtcctggaatacttcacccacctgataaaataacattacgcccaccgcttcggaaaattcgcccaccgcgaaagctccgaaagtcgccagcgtcataagaaaacactcgtcgaacatctgccggttgattacacccgtggccgccttctttaaaacatcatatcccacgataatatagggaatcagatacatcagaaatgtctgtatattgcggccgaatacaccgcccggattgaaatgtgccagcagcagagctgcgataaaaagcgcgaaagccgctgcaatccggacaatagtcctgcggattttcggtgtcatatcttttgcctccttattattaaaagtatcggaaatgtgatttcgccgcgcctctcacagaccgcgcacgcattttcttctttcaaaaaaagagagtgccccgctctttgtgaattattccgccggtcgggagacgcccggcacagtgccgttctctccatgatctgacattgaagcagaattttcaccctttcaggcactctcaaaagacagattcggattccgaccgccggaatctgccgttttgcatgtttaaatcaggatcgtgcagtccggctctacctttctgcatgtctttacgacttcttccataatgctgtcaaacttatcgtcctccgcgtctatggtaagcttctgggccataaaactgattgccgcgtcatttacaccgtcgattttcttgatcgcttcttccatctttgcagcgcagtgagcgcagtcgagatcctgcatcttaaatttctttttcatggttgatcctccggttttcaaaattttccgttcaagccgcacatctgctgaacagatctctccggcgaacatacaggctgatgcggcttaaactatagttctgcccctgcggacagtaagattacttttcaaaacaattaagcaatcgtttaatcgtttttctatattcattatatgcttatatcccgatatgtcaactgactttttctttttttaaaaaaaatgtgcatgaagaaatacgaagattcccatgcacatatgccgccctcttccgggctgcgttttcctttacgaagtatttttgcaggtcttttccgccctaccgattgaccagaagcttcttgatcgccgcgtccagaccgctgagagatagttcaaacatcggcacttcgttccggatgaggccgatggtcgaattcccgtaggtatgagcccatcggcgctccgcgatgggattcagccacaccatatgcggatagcggctcttgatccttttgatccactccagtccggtttctttattataatcatttcggtaagacgctccgcccggatacaggagctccgacggagacatcgtcgcgtcgcccacggcgatgaccttatattcgctgtcgatattatgaaggatcttcatcgtatcggccttgaagttcctgtgacagctgggatcagtaaaaagatcctgataaacgcaattgtgaaaataatacaccttcagatctttgaaatgattcgatttgtgagccgcctgaaacagctggctgcacatctcactgtacggccgcatggaaccgccggaatcgaaaagcagaagcacctttacggtattttttctcggccggtcaaagatcagtttcagatttccggcgttatcacaggtctcctgtatggtggcatcgacattcagttccgtcttcggaccgtcgtttttggaggaaaactgacgaagcttgcggaacgccatctgaaaactccggatatcgaggatattgtcctcccggaaatcctggaaattacgctctcccgccacctgcagcgccgaacggtgaacactttccccgccgatccgtatccctgcaggattatagcctccgtgtccgaaaggcgatgtgcccccggtgccgatccagtaaccgccgccgtggtgctcttctttctgttctttcagacgctcctccagcattttctgcagctcttcaaagtcgtgggcctggagattctgcattgccttctccagcgcatgagccggaatctgatactcgttttccagccagtcccagacctcctccggaatatcctcctgatgttccacacctttaaaaaactcagcgaaagcgaggtcgaatttatcgtattccgtctcgctcttgatcaaaaccgcccggcagagatagtaaaaagacgtcagactcgactgagccagtccctgattgagagcctccatcagcgccatccactcattgagcgagaccttaagaccgcgctttctcagcagatagaaaaattctataaacatatttctttcctctaatccgtcggacagatattatctgaaacggattcttccttttttgtacgactcaaacgtatcgatatcctgattcttcttgagcagcgtaccgataaacgggaaattggaggctaccttctccggatcgattccgccgaggctcagcgcctgcagccagtccaggagttccgacgtgctcggctttttctggatttcgttcatggaacgaatccagtaaaaagcttccatcgcctgattgatcagagtctcgtccagatccttataatgtacgtttacgatttctctcatcttaggcgccagagggaattcgatataatggaaaatacatcttctcagaaaagcatccggcagttctttctccgcattggaagtgatgatgacgatcggccggtgcttcgctctgaccgtctctttcgtctcattgatatagaattccatcttgtccagttcccacagcagatcgtttgggaactccagatcggctttatcgatctcgtcgatcagtaaaaccacctgcttgtccgacttaaaagcttcccccatcttgcccagcttaatatatttggagatatcgcccacatttgcttccccgaactggctgtcgtaaagtctctgaactgtatcatagacataaagaccgtcctgcgctttcgtcgtggacttgatgctccagatgatgagctccatgtcgagggaagcggcgatagcctccgctaatttcgtcttgcccgtacccggttctccctttacaagaagcggctttttcagggccatagctacattgaccgaattcatcaggtcgtctgaagcgacataatccgcgcttcctctgaatccatttaacatttttttcctcctccgtaatcacaatcaaacttatccggtttccggagaaaatttccttctccggatctcatgtatttccgttccgcgctcttcaacgcagattcataatcatcggtaccagcaccggaataatacaggtcaggacaaatcccgacacaaaactgtaaactgccgtcgtgcttcccgcggatctctctgtcacgggaagacaggtgtccatcgccgccgctcccgccggagcacaggactcgatgtatcccacatattttgccacaaaaggaatacagataatcgcaaaaatctccctcatcacgtttgccagaaaagaaatcgcccccagttctgcggaatattctgagatgatgaccggcgccagcgtgtaccagccgaatcccgacgccaccgccgcgctgtccagcggcgacagatcggtcatcacagcagctaccgcagatcctgcaaaggttcccgctatgacgagaaagggaacagccaaaatccggaacccattttgccggatatctttcagaacggttccctggcggccgatatcgattcccaccagaaacaacagcaggcacagaccggccgtgagaaccggtccggtattttcgatgaataccgccggcattacagaacagcccgctaaaacgccggcgatgactgcaagaataatcgcaaaagtcatatcattttacctccgccgcaggacaggcttcgtcttccgcgtcagaaatctttctgccttttcgatccagtcccatgagctttcttccggcgaaaacaaacagcacacttcccgcgacagcgcacagcgagacgatcagagccctgacgcccagcgtaccgacagaggaaagcactctctcatcggcgccgatattgacccccatggtaaaaatcaggatcataagcgccgcggtctgaagacgccctatccacttatactccctgtccggcttcaaaacctttgctccgataaaaatcccgcctgcggcaaacagcagatataataacagtgatgataacatagatgatactcccgctcgttttttctctgcgcttttttcagcgttcacgcctgtgcacagttatatagattatatatcctgccggggatattttccatgacttttacctaagtttgtatcaatcgccgggaaatcttcaaataccgctgcagagaaatttcccttcgattcattctcaataaacaaaagtaagttgactgttatccgtctgcaggcccgcagcccgctgatatttccatctctgctttttgccggcacaaactcataaattataaaaaatatgtaaatctattcttgcattatctgtcagcacagtgtattatattcgagtagttgacctttgcacgtcaaaatgcagcagaatcagcattcaaagaatcgacgggagtctgcataattctcttaaaatcagagagactgaaaaagataaaaaatcccgaaaatttcttgttgacaaagccgctttacggtggtaatatttaatccgacgcgttgaacggtcgtttttcgcggtcgcacacttggcgggatagctcagatggctagagcgtccggttcatacccggaaggtcgtaggttcgatccctattcccgctaccaattgtgggcgtttagctcagctgggagagcgtctgccttacaagcaggatgtcataggt

SEQ ID NO: 707 - DNA, 13093 bp, Unknown
  16S sequences of unknown bacteria
gtcgtcttagcgactccgcccttctgatttgcgattgcgattactctgcacatatattttcctcctgctttattcttcttttttatctatctctgcataaacacgaaaatacttatttgttcctttattggtaaatggctctgaaacttcctggactttcacctgttcattccgttccaaaagccctttaaaccatcgaatatcatttaatgtcccttgaagtctaacttttaacatgcatatcttccccctctgtatacaaacagtactctggataacgaattttaattgcttcccaaaaatatctgtcatattcctgataaaatttttcgtgttcattgtttttgaaaataattgcgcgagaaacgctttcccttgcacctgacgctgtgttcttcataaaccaaaacctcctgtttaaagttcaattgaaaggagatgatcttaagaacgctaatgacttgagtaacttcgctgaagattgtagatgcttattttactcaaccagtgacttgagtaatactcaatttgaagtgattttagatggtttttaacggtttctggcgatacttcaccatttcgtttttctcatagaaaaaggccccgaaaacctcataatcactagaaaacagagtgtttatgaggctttcagagcctctataaattttgattcaatttacaatgcgaacttcgcttatgcgttcatctgagcagcaacctcagccgcaaagtcctcgttcttcttctccataccttcaccaacttcgaaacgaaccatcttagtcagcttaaggtctttgtttacagatgcaaggtaagcctttacggtctgctttccatcttctgcctttacatacggctgctcaagaagggtgatctctttgagctgcttggagatacgtccctctacaaggccgttgaagattttgttctcaacgattgcagccttatcagccagtgccagctcggcaagactcttctttgcagcctcagacaggaagttgaacagatacttgttgttcttctgctcttcgtatgcagcagcatcctctgcgctgaatacgttgccttctactgcctttgcaaacaggctgttcaggatcggcttcggaagggatgccggatcgttcagtgcactgtcgatcgtgatctctttcgtctttgcaagctcttctgcagagatatcctcttttgcgatatactgcggattcattgcagcgatctgcattgcgacattggtcagagcctcttttgcagcagcatcagatgctccggaagctgcaaccagaacgccaattcttccaccgccatggatgtaagaagcgacacagtcgccctcaaccgtctcaaatcttctgaaggaaagcttctcaccgatcttcagagtcttgtcagcgaactcctcggtaagaccgccatccagaagagtctgtacgtcctcgccgtttacaccgccgcaagcgccggatgccagtgccttgtcagcaacatcctgaacgaatgcctggaatacttcattctttgcaacaaagtctgtctcagagtttacctctactacaacagccttgtttccatcaactgcgacacggcagataccctctgcagcgattctggcagctttctttgccatctttgctgcaccgctcttcttcagaagctctacagctgcttccatatcaccgttggtctcggtcagggcctttttgcagtccatcataccagcgccagtcgtttctcttaactcttttaccattcctgctgtgatagccattattctgttcctcccaaaatcatgtagtgaatgattactcagcgatcggctctaccggagcttcctcatcgtatacttcagcaactgcttcctcagcaccctgctttgcctcgataacagcgtctgccatcttggaaacgatcagctttacagcacggatagcgtcgtcgttgcccgggattacataatcgagctcttccggatcacagttggtatcgcaaataccgataagcggaatacccagtgtatgagcttcctgtacgcagattctttccttcttcgggtctactacgaaaatagcatccggcagtctcttcatctctttgataccgccaaggttcttctgcagcttgtccatctctttcttaagagcgatgacttccttcttcggcagtacatcgaaggtaccgtcttcctgcatggtctcgatatccttcaggcgcttgattctgctctggatggtcttgaagttggtcagcattccgccgagccatctctcatttacatagtacattccacatctgtcagcctcggtctgtactgcatcctgagcctgcttctttgtacctacgaaaagaatgctgccgccgtctgctgcgatatcagatactgccttgtaagcctcgtctaccttacctacagacttctgcaaatcgatgatatagataccatttctctctgtgtagatgtactctttcattttcgggttccatcttctggtctgatgtccgaaatgaacgcctgcctcaagtaactgcttcattgaaattacactcatgtcttttctccttttgttttggttgaattcttccgcatgtatcatccttccggagaaaccgggatcgaccggcaccgtccccagaatccacatacgtgtatggtttgcaacttttacagtataacacaggggcctgccatctggcaagccccctttttctattatcagtaagaaaatttactctcttctcagcgcctcgatcggatccatgttcgccgccttgaccgatggcagcagtccgaaaatgattccgataagcattgagaacacaactgcgaccacggatgccaggacatcaatggacactgcaacaccggatattcgattgatgacctgtgccattccgattccggctgcgacgccgagcatgcctccgatgctcgtcaatactgccgcttccgttaggaactgggcaagaatcgtccgcttcggcgcgccgatcgctttcttcagtccgatctcactcgtccgctcggtaacggatacaagcatgatattcataacaccgataccaccgaccagaagagaaatgctcgcaatccagatcagctgattgtttgtcgcagagctcagatcctgcatctttctcgcctgctcgagcagattgtccgctttatatttgaaattctcctgcttcgatgaaatcgtcttgttcaggatcgactgcgtatcctgtccggccttttccatgtcatctgtgcttgtcgcacggacgaccacattctccggctcatcatagcagtaggtgatcggccagcagctcttcggcatgaaaatgtagctcagcttatcctgctcatacgtatagtactgtgaaatatttttgatgaccggatcgctctgggcactctttgtcacgacaccgacgactgtaaacggtaccttattgatctcgatcgtcttaccgatcgcagatgtctttccgaacagattggtcgctgcattgtcatcaatgactactaccttacggaacttctgataatcagaatcgatgaaattccgcccggtctttacaacatagccggtcgttgcaaaatagctcgtatcaatgccccggatacttccactcgacagggtggagtcctgataaaagaccgaaccgctgataccctgacgctccgtatagcaggtcacattttcgactgtatccagatccagaatttccttctttgtctcgtcagataccggcgtgatgccaaacggtatgtctgaagaagaagagatattaaaggtatatccttgcgtatacaaaagaacatttaccgtattgctaccagaaccgaccagactgtttttgatctcctcgtttgtccccttgatcgtggagacaatcgagatgatcgctgcgattccgatgatgattccgagcatggtcagaaaggaacgcatcttgtgcgaccagatgccctgaaaggacagtcgtatattttcaagcaactttttttcctcctttatgaatgtgatgatgccagggtcccaagttcaaaaagccgttcatgcttgcataataaggcttttgaacttgggacccgccaaacatgagaaagtagcgatttacgtagtaaagcccccaacatcatgaatatgcatcttccagctgatcgacatcctcagtcggtgccccttcttttacatcatccccataaggaaatgcaatccggtcgctctttgtcaggccggaagtaatttccgtaccaccgccccagctcaacttcttaccggtcgtgacatactgtttcgtaagcgtcccgttttcacctttcatatagacgtaattccggccatccttttctgtacgaatgaaataatcctccagataaatcgcatccgggtcattgatggtcccgccggagagctgcagcgtcgcactgtcaccctcggcaatatcctcggtatcctcgatcagcgcataaaacggataataggaggcattgctgttctgagaatcgctcatgtagctcgcgccgtccgaatccggatactgcgaaatctccttgatcactgcggtaaagctcatgccactgtccgtctgtccggagatcgtatcgccgacatgaatctgctgcagggagagctcattcatggatccctttgcaaacagtcctgtctcatttacgatcttcagaaaatacgaatcatcggagtctccgttcccactcgctgagccgagactgacgaccgtgccgtccatcgtcgccgtaacggtcttgccatctacgacacgctgctgctgggaaagcttcagcttcgcctcccggatctccagatcgcactccttaatgtcctgctccttatcttcaatcagctctttgatctgctccggcgtatagccatcgccaccgatatctccaccgtcaccgccgcccggattcggttccggtacttccgtttcctcttcccacagtccatactgcttcagcaggctgatcagtgtatcactgttccagacgaccgccttctgactgtcgcttaatgccaggtacgcattcttcacttccgtcagatatgcgatcagcagatccggctgtccgctctgatagcctgcgatatcctgaattttcagaatcacctcacaggcgccaagcttctcaccgcaggtgagcacaccggctgtcgctgtaccggttccttcctctgactccgtctgagatgtctcagctgcactgctgtcaatatttgctgtctggccgttctggctgaccgtctgaccggtctgagcagatgcaccggtatcatccgatgccgtcaccgacgcatccagctgcgcccgccatgtctcaccaagactgtcataggcatcctttgccgtattatacgcatcccatgtcagtgactgataatccagtccgtctgccagtgtttttaccagcgtcatgcaaagagcctgataccgctgctgcagatgctccgcttcgtaggatttctcctttgcattcagataatcggtcactgcctgcttcaatacatattcatcccacgatgcgctgctgccatcgaccacatccggaccttcttctcccaaatttgcctgatagtaagcgatcgccgttctcagtgcctctgtatcgtagctgccctttgtctctccatccgcaccaagtgcctgctctgcgaaggtgaggaagttctgcacgtacgcacctatcttttcctcatacagtgcctctatctgcacatcctctgccggcatcgtgaaagttgtcgtctcgctccacgcatcggcaagctgtaccgtatccggctttacataccagttcaggaatgtctgcccttcctccccggatgctgtgaccgtaacctcgtctcccggatgcacaagcgctgttacattctgtgtaccattgatatagccgttcctgaccgtcacagtatattcctgctttacttctatctctgactcttccgtctcggtcgcatccgtctcatttcctgtgctaccctgctcagaagagccggagcctgacaggctctctgcctgtttctttcgctccgcaagccggtccaggttctccacccgattctgcatggaggtctccagatttgcatattcctcctccgcttcttttacaagcgctgcaaaatcacctggattctccggatccagctcctgaatcagcagctccacataagcgacatgatactcgttcattttctccgcatactgttccagatccgcatattccttctcgctcaatgcctgtcttacggattccttcaactgatagctgcgcaccgtaacggtgttgccatctgcatcggtctcttctgtctgcttctcatctgccaaatgtttccggtagtaggataccagctccgtcatcgcatcccggatatccgaggcagaaagtgaatccctgtatgtctgaaacaggacgtcgacgctcgccatcaactgctcatagctctccacactgttgcggatcatcgatgtgtcgtcatcatctgcaagctgcggatccgtcacctgctgcacctgctctacagcaagtcctccatctgacgcagcatcagccgtactgccgctctctgcctccgtcgtttgctcagtctgaccatccggcgcagccccctgattgtctgcagtcgtatcatccacaatctcatcggccatcgccgtgtctgccgcagtcgtaaacatcggctgcacagactccagagatgccgtcaccttcgactttttcagcttttccagatctttttccaaacgtaccatcgtgagctcctgcgtctgcaggttgagctttgccatctcaagctccagctccggaagcgtcatatcataggaaaagagtgcttcgccttcctttaccttctgcccttcctgtacataaatatctgcgacctgataatcctgattcaggcttacggtctgcgctacctgagaggtaatcgtcccatatacggtattgccgtcctcgtcgccccagccataatactgattgacatttgccaccggtacaacctcaaccggtgtcgccttgccgcggatcgcataataagcgccgtagcccacgcccgccacgagcgatgcactgaccaccacgctgatgatcactgttttgaccttcatgctcccacctccttacgctccgaaatctctccgtcgaagatgtccaccacgcgctttgcatatccggcaatgccaggatcgtgtgtaatcatcacgactgtcacaccttctgcattcagctgggcaaacagatccataacctgcgcacttgacttggaatccaaggctccggtcggctcatctgccagcagaatcttcggcttatttaccatcgcgcgcgcaatcgcgacacgctgcttctgtccaccggaaagctgcgtcggagtaaagcttacacgctcctccagcccgacgcgaatcagcgcttcccgcgcccgctctctgcgggcctttttcctcacacccgcatatacaagcggcagcgctacattgtcgagtgctgtcatacgcggcagcagctggaaattctggaatacaaacccgatctggttcaaccgcacatcagccagtttattttcattcagagaaagcacatcctcacctgccagctcataggtcccggaagtcggacggtccagacagcccacaatattcatcaatgtcgactttccggaaccggacggtcccatgatcgccacatactcgccttcctctacatgcaggctcacatcctttagtaccgggactgtcagcttcccctgaatatagtccttataaatatgctccaatttcaggatcacaagataacctccccgtatatttattgctctccatcctcgacatagctgccctgatctgcatcatagaccatgccgtcaccggcatctccatcagaataatctgcatccatgtcgtcgcttccgtcgctccatgaaccgtccatctcgtcacttccgtcgctccacgaaccgtccatctcgtcacttccgtcactccacgaaccatccatctcgtcacttccgtcgctccatgaaccgtccatcgacgatgtgtcctccgaagcatcattatagatgaccggagccccctcctgaataccatcctgcggcaccgtgatataatcatcctcagtcagtccgtctgtaatctcgtacttcatctcgtcctcatcataatcgccaagcgtcacttcctgcttcgtcagctgattattcttgtccgccatccagacataggccttgccgtcgtcctcctgcataatatagtagtcctccagccacagaccgtccttctgctcctcatcgccggtatcctcttccatatagacatgctgaccaaggatcaggtcgtccgaattttccagctcgacataaaacgcatagctggacgaatccgcattgccggagctgctatagtaataactgttattgtcattctcctctgccttatccgtcttgatctcggaaatcgtccccttccacgtcttactgtcatccacacgggaatggacaatgatcgttgctcccatattgtatagatcctgaagatcctgaaggttctgttcattgacgctgcccttgatccggtagtcgccagctgagaggatcgtaatataagcattggaatcactgccggatccagaataagagttggaattgtcggatgtatcgctgatcttctgcacaacgccgtccagctcactcgtgacagtagcatctgcaatcttctttttcaggttgctgacctccagctccttggtcttgatctcatactcgctctgcttgattgccgtctgtgcagtcataatatttgtcgtatactccagctgctcatctgagctggcattcgcctttgccttttcataggaagcgatctgcttcttcgatacctcgatgtcaccctgtgccttctcgatatcgatctgcgcctgcgccagcttgtcctcatcgtcctgcgtgtcgtagacaaagagccgctgacctgtctttacatcatcgccttcctttacaaagcactgctttacggtgcggtctgactccagctttacctctaatgtctcctggggctctacctctccgccgtagcgctgcaccagtccgttcccgctgccgaagccggtgatcgcagatacctgatctacatacacagcatcctcactggtggaagagactctgcctgaattttctgtattttcaaaaaaatgatgatatacgccatagccgcccgcacccacgatgccgagcacgacaaaggcaatcactgcttttttcatgcaatcgttccccttttttgtttaatttcctttaacactataccacaacttcctgcaaaaaaaagagagaatttcttaatacttccgaaagtcactcatttttcacattttcatattctctgttttttatcacatatcattcgttttttatcacatataattgtcaattgactttttccagaaaatcctgtacaatcaaatcagtactgcacttattatcggaggtataaatgaaaactattttaatcgtatatctgatgctgatcaatcttatcggttttgcagccatggccctcgacaagcgcagggcgatccgccacaaatggcgcatcccggagcgtacgctgttcctgattgcactgctctttggcagtatcggcgtgctcaccggcatgtatgtgttccgccacaagacaaagcatctttccttttccatcggcattccggcgatcctcgtcgcacagctgctgttgctttccttcctctattcgtggaatctgcgacgggtacagagtccctcacaggcagttgagcacgagctcgccctgattgaggagctggacgagccgaccatccagtcttttatttcctatgagaatctgaccaattctcatcttgcgaccggcacgattgaccagaaggccaccgatgccgtcgcgctctttttcaaaaatttcagctatgacattctcaatgaagaaattgacggtgatactgctaccgtcaccgtcgagatcacaaactctgatatgcataccgttgcccaggacctctgcagcgccattttgcgccggtcagcagccatcaccgcttctgcttccacacagacgaccggtgactactaccatctgctctacgacacccttgcctccaattcctatgatacgactgtcaccaccgccacattccatctcagaaaagacggaaaaaactggatgattctcgcagattccactctggaggatcagctcgtgagtggctttatctccagtatgaacgatccatacattctccccgcttccacagtactctccattcacctggacgcattaaaagcgctcgatgccgatggttggaaaaattatctttccatcagcgatgtctttgccacgtacaacagtgaatacagtacgcagattgatgatgcctacagtgcacgtattgccgcggcttttgactatgaaattctgaaatgtcacgaagaaggtgattcctcgaccgcaactgtccggatcacaagcatcgacatgcccggcatgctcagcttatacaaaaaatacctgctcgcctacgccgcgacgacccggtcaatccgcgacaatgacgtacaggtatccaatgaaacttcccgtcttctccttcagtcgctgacggagacaagcgatgtctgtcataccgatgtagacatggccttccgcaacaacggggaaacgtgggaaatcaattttgatgactcttttaccaatgcagtaatgggagacctgcagcaggccatggagacattcaccaccggctcatccgactgacactctaccatctgctgtcataccggaaccttcctgcccatgcatgcccacagcaaatgccaagcacaaacaatcgcacgcttccgctatcacgcatgaatcccgcttctctttctctcgatcatctcatcaatccggtcaatgtagctccggatatccttcacattctcgattcgttcgatgcgatcattcgccagcacgagcttcgttgacgcgccagctccgagcgccagaatgctctgtacctcctccatgatcaggatgttgtaaatcccagcctttccttctttggaatagccgacattttcaaaatttcctgccatatttttctggcggtacaggtaatacggagactgtcctgcacgcatcgcataggaagccgccatatccataatcatgcggttgttcgtaaaggtcatttccctgtattcatcccggaacatccgcagccgcgacgcacgcttcactgcaagggaatggaccgtaatgctgtccggatcaagtgctgtgatctcacgcatcgtatgctcaacctccggctgtccctctcccggaagcccgacgatcagatccatattaatattgtcaaatccaagcgtccttgcaaggaaaaaggcctccttcgtctgctcaacggtatgctttcttccgatcaggtcaagcgtcttctggttcatcgtctgcgggttgacagaaatgcggctgatgccatgatcccgcaatacctgcagcttttctgccgtaatgctgtccggacgtccggcttccaccgtaaactctctgagcctgctgtagtcaaaacgttcttccagctttgtcagaaggcgatccagctgtgccggctccagcgtcgtcggagtgcctccgccgatgtagactgtattcagctccttatccgcaaatgcctctgacgcatagtcgatctccttgcagagcgcatccagataagcgtctacctgatctttccagatgccgatcggacttgagctgaatgaacagtacaggcagatgctcgggcaaaacggaatgcccacatacaaactgtatccattttcgtaattgatatccttcagaagatgccgctcccggttcgcaatcgcgatcgccagtgcagtcttctcattgcttgtataataggtgtttcgcatatagctggcaatatccgggtttttccatccctgctccagaagtgccattggaatctttgtcggcctgattccggtcaggttcccccatgggagctgttggttggtatgcgctgacagtacccggtacagcaggcgcttcagttcattcttgatttccttacgctcatcggtctgcagtataaccgactcttccgtcttcagctcttctgtcggctcatagatccggacacgaaccgttgtgccgataccaagcccttcctcactgtacgggtcatccggccgtatttccatatccccgtttccggcatccggcataacaaaagaaaccaccagcctcaggagcgccactccatccgccggtgtctcttctaccattttcacatcctccgccgggtaaaacgcctttaccagcgaatgtacatcatattgaaacgtctgtctgtctaattctactatgatcatcttgttctctcctagtacggattgtaccgcttttcgtatgcaatatccgtcgtctcgccatgtcccggatagacagtcgtctctgtcggcaacacaaagagcttccggtgaatggaatcatgcagcatccccatgctgcccgtcggaaaatctgtccggccgacgctgccatgaaacagtgtatctcctgaaaacagcacctgctcctctgcgcagtaatagcagcatccgccaaccgtatgtcccggcgtatacagtacctgaaacaaaaatcctgccagctgtaccgtctctttatcccggaagaaacgatccgcctgtaccgtgaccggctttccgtacagtccggacagattcttctgtgcatcctgcaaaagctcctgctcttctgccattgcgcagaccgggatggaatacgttttctgcaaggaggccaccgctccaatatggtcaaagtgaccatgtgtcagcaaaacagccaccggcctggccttcatctgacgcacccgcgcaaggatacgatccgcctcacctgccggatcgattatgaccagctcccctgtctcttcatttatcaccagataacaattggtcgccagcatccccagctgcattgtcacaatacgcatcttctgcatcttccatcctccatctcagtaaagcggacattcgcaatccatccctgc

SEQ ID NO: 708 - DNA, 9731 bp, Unknown
  16S sequences of unknown bacteria
cgcattccttgacctttacggcacggaaatcgctcttggagaaggtgtcaaaatcgacctgatcctcaaacaaaggttcaatctgaacattggaaaaatcaattttttcctcgacttcgggagccgcctgtgcagcctccgcaggagccgaaacaaccttttcaaccttcttgtcagagtccaacggcttcattgtcgggaagaggagcacgtctctgatagcggctgagtcggtaaggagcatgcacattctgtcgataccgaatccgataccgcctgtcggaggcatgcctatctcgagcgcgttcatgaagtcctcgtcggtgcggttcgcttcttcgtcgccctgagcaaggagagcttcctgcgccttgaatctttctctctggtcaatggggtcgttcagttcggagtatgcattcgccatttcccatccgttcatgaagaactcgaaacgctcaacatagtcgggattttcaggtttcttcttggtgaggggagatatctctatcgggtgatccattacaaaggtaggctggagaaggtgctcttcaacgaatccctcgaagaacagattcagaatatcgcccttcttgtgtctttcctcgaaggctacgttgtgctccttagcggccgctctcgcctcttcaagagtgtgaatctcgttaaagtcaactccggaatacttcttaacggcgtcgaccatcgtgattctctcgaacggcttgccgagatccatttcgattccgttatacacaattgtagttgtgccgaggacttcctttgctacatatctgtagaggttctcggtgaggtccatcattccgtggtagtcggtgtaagcctgataaagctccatgagagtgaattcggggttgtggcgtgtgtcaagtccctcgttgcggaatactctgccgatttcataaactctctcaagaccgcctacgatgagacgcttcaagtaaagctcaagagaaatacggagcttaaaatcctcgtcgagcgcgttgaagtgagtttcaaacggtcttgccgccgctcctcccgcgttcgctacaagcataggagtttcaacttccatgaatccctgtgagtcgaggtagcgtcttatggtgctgattatctttgagcgcttgatgaatgtgtccttgacttcggggttcatgatgaggtcgacgtagcgctgacggtatcttgtgtcggtgttggtgagtccgtggaacttctccggcagaacctgaaggctcttcgaaaggagagtaacgtcgtcggcatgaacggaagtctcgccggtcttggtcttgaacaccttaccgcggattcctacaatgtcgccgatgtccatcttcttgaacttagcgtattcgtcctcgccgaccgcgtctcttgcgatatagcactgtatagttccctttaaatcctgtacgtggcagaaggaagccttgcccatgattctcttcgacatcattcttccggctacggagacttctttgccgtcaagctcgtcgaaattgtccttgatatcactgctgtggtgcgttacatcgtactttgtaatcttgaacggatcttctcccgcttctacaagtgcggacagcttttcacggcgcagtctgagaatttcgttaagctcgccgtcagtcatcggctggttgttatttatatctgtcattttaaactccgtatatttattttagtttgtctttgttctctcaaccttgattatcttgaacttcagctctccgccgggtgttacggtaacgaattcgtctcccgctctcttgcctatcatagccgcgccgatggggcttctgtcggagattcttcccttcatcgggtcggattcgtttgtacctacgatggaatattcaacttcttcttccatatcgtagtcgtacacgataacggtggagccaaggtttacaacgtcagcttttatatcgtcaataatctccgcgtttttgatgagttcttcaagctcggaaattcttgccgcaacctgagcctgctcgtccttagccgcgtcaagctcgctgttttcagagaagtcgccgagggagcgcgcataggcaaggtctttctttatctgttctgttttctcacctttgagatatgtgagttcatcttcaagcgctttatagccttcgggagtgtactttgtggtttgctttttttccataattaggtgtagcctttctttgtgctgatatatatgaattagttatcaagcgattttaccgccgcggcaagctgattgtcttcctcatcggttatcttgtagatattctttccggcaagggactcgtcaagctctacctcgacatcgggtactataccgactccgtgatagttatcggaaaacggcgggttgtacatacggtatgtgacggaaaccgcgctgttgtcggatagcggaatggtggtctgcatacatcctttaccgtaggtggtggttcccacgataactgccttgttgtagtcgcggactgcggatgtgaacagctcggcggcactggcggtacttccgtttacaagcactgccataggcatatcaagctctgtcgcctcggagtagtacgtcttgacttcgtttccgtccgcgtcgaatatccttactataggaccttcggggaggatgtagtcaagagtggttacaatggacgaaagctctccgccgggattgtatctgaggtcaatgacgagcttttcgcatcccttcgactgtaagtcttcaacagccgctacaaactgagtgggagtgtttccgtcaaactcggatatctttataattccgacagatgaatcaaggtcgtagacatgggacagcacggactgggagtcgacaacgcgccgctcgatatcaaagtcaatcgactcggaataattttctccgcggtaagccgtgaacagtgcgtgagttccgacgacgcctttgagcttgttaatcgcgggataatatccaatctcactgacagcttccttgtcctcgcctacataaacgatgaggtcgcccggctgtactcctgcttcaagcgcgggagaattgtcaactacgcttataacctcgatggctttgtagtcggcgttatatattaccgtaactccgatgccggcaacctcgccttcaaggtcgctgataaacgtgtcaaaagcctcggaattgtagtacgcgccgtatttgtctcccgttcccgccacatatccggtgagcattccgtcgataagagcgtcgtcgtcaagctcgtcaatgtagtagttgcggtagatgctgtcgacttcagcgagcttagccgtggcttttttcatgaagtccgacgttgtctccgctgttgtgtctcccgatgatgtcgaaggagtcgacgtgcctgtatttatcgtatttacagcttctccgagatattttttctcaaatctgttgtaaagtccgatgtaggtagcctgaaacgtaacgatacagcatatcatcaccgtcacaacgcaggctcctacggatattcttttgcgcattatttgtaaacctttccgccgtgcatgggtatagtccggctctggtatattatatggtttttgttccgaaaaatctgccgaatcttgtcagccgtgttttacgggaatgtcagatagtttccggggttgacggtcaaccgaatattacgggaatgtcaggtagtttccggggttgacggtcaaccgaatattacgggaatgtgagatagtttctggggttgacggtcaaccgaatattacgggaatgtgagatagtttctggggttgacaaccgttccgttttcgcggacttcaaagtgcaggtggtatccgaatgtgttgccggtaagtccgacgtgaccgattatctgtcccgcagaaaccatatctcccgccgaaacaagtctgtccgacatatgagcgtaaagtgtggaaattccgccaccgtggtcgataagtacatagttgccgtagctccagtgcatctcgcttttgaggacagttccgccgttcgccgcaaatacgtccgtaccgttcgcgcaggctatgtcaagtccgaggtggtagtcctgtacgccgtacaagtctcgccatccctgctcggatgaaatatagtacgaagcgtttgcgtcaagaggccagcctacgtcaccgccgatatacacggactggctctttctctgaagctccgcaagataattttcaagctcggcgttcagttcttcttcaagctgcttgttgtagttgtacgtctctatccaatcggcttcgtttgcttcaaggcttgacatatagttcagcttgtcgtcatatgccgcctgattttcctgaatggcgttctcaaagtcggcaactcgaagctgctgtgtagccatttgctcgtcaagcgcggatttgtcggcttcaagagcttccttggtagcggtaaggtcagtgataacctccgcgtcaaagtcgaaaatcgcgtttacgtagtcgagcttcgtgagaaaatcgagcagactttccgagccgaggattatctcgatatagtcggagttgtcgtccatgtaaacgtcagccattctctcgagaaaagcgttctcctgcttttcgatgcggttttccttgtcctcgatgtcggcagttttctgatttattgacttgttcagctcgtctatctgtccctcggcaagtcctttcatctggttgttgtattctataaccttgtcaagctccgtgatggtgttccacgtacttgtcttgtcattttgtatgtttgtaagagcgtttaacgcctgctctttttttctttgaatgtcggctatctggtcttcatatgactgcacagtcgcgtctgtcaggtttccgtccgccgctacagctatttgcgtagggtagcatatcccgactactgcactgccgattatcaaagccgacataactttcagcttcagttttttcataattcctgccttttactgtctgaggtacttgttcagcgatatgcacgagccgattatacccgtgacgacgccgattccgataaagccccacagaactatgtttccgatgcttgagaactgcattatcgttatcatctgaaggtcggtcattacaagggtttcaatgtacgaatagatgtaccactcaataaaataagcgcagacggaagcgaaaagaccgattataataccctcaaacacgaacggaagagagatgaaccatcccgtagctccgacgtaacgcattatgcttatctcgtttcttctcgagaaaacggagagctttattgtgtttatgataatgaagatacttacaacggcaagtatgatgagaaaccacacgaacacgagcatgatgccgcttttgaagttctcaagggtagtcgcaagctcaaagcggttgtttaccttagttatgccgtctatctgtctgagctggtagtcaagctccgataccttgtcgttgtcgatgtaggtgacgtcgtatctgtcgggaagtgggttcagctcgtttgtcacgtctgcgtacacgtcgtatttcgacttcatgtactccagtccctcttcctttgtgacgcgctcgattttttctatattgtcgagcttccctatcttatcgcctatcgcaacgatttcatcctcggtcgcgtccttgtcgcagaacactacgatttctttaagaacgccgaactgctcaaggttcaggttgatagtctccacaagaagtgagaatccgccgataacgacaagacagctcataagcactgctatcgacgcaaaactcatgacgccgtttcgccagagtccggagagtgcctgacctatgaaatagaagatattatatcttttcatcgaacatacctcccactctgtcctcaactataagaccgtcctgaagcattacgacgcgctgtttatagtagtcgacgaggtttttctcatgagttacgactatgacagtcttgccgagcttgtttatctttacaaggagcgacattatctcaagagacattttcgggtcgatgtttcctgtaggctcgtccgcgatgattactttcggattgtttgcaagagcacgggcaagcgcaactctctgctgttcaccgccggatatctcattcgggaacgaatcctgctttccggcgaggtttacggtgttcagtatcgcgggaactcgtcttgcaatcttcttgcgcggagttcctaccacctccattgcgaaggctacgttttcgtacaccgttttcttcgggaacagtctgaagtcctggaacactacgccaagctctcgtctgtagtacgggactttgaagctcgacatttggctgaggtcatagtcccctacagtgagcttgccggagcttaccttttcctcgcggagcagcagcttcatcagtgtggtttttccggctccggaatgtccgacaatgaacacaaactcgccgtcgtctatgtgaaggtttattccgcgcagagccatggttccgttcgggtacgcctttttaacgtttacaaaatctatcatttattagaatgtgcgggagcgttaactctctctcctttcctttgaggggataagccgcttgtatcagtcctactcattgcacaactcacgtttacgagaacacgtccaatgaggtgaatacgccgttttttatatcctgtttttgtattttccttgtgtattttataaaaagacgcattataaaagatttaaggcaataccgccgcgcactacatgagcacacagagcagtgttgcctttcggagagtttccaccggacactgatttacagcatcctaaatctctgataattcttttcggattaatacttaacgggctttgttgtgaggtatctcttaaccataagcgcgaccttgaacgtgatggcatggtcaaattctctgaggtcgagtccggtcagcttgcggatcttctcaagtctgtaaacgagagtgtttctgtgaacgaacagcttacgcgaggtttcggatacgttgaggttgttttcaaagaacgcctgaatggtcatgagtgtttctctgtcgagagaatcaagcgagccgttcttgaatacttcctgaaggaacatttcgcagagcgttgtcgggagctggtaaataagtctgccgataccgaggttttcgtagctgatgatgttcttttccgtgtcaaataccttgccgacttcaaacgcaacctgagcttccttgtaggagcgcgcgagatccttgatgttgtcgactactgtaccgataccgattgaaaccttaacatagaattcggcgttgagagtgtcggcgatgttcttcgcgattttttcgatttccttaatgtctgttccgggctttacttcctttacgagaacgatgtcagtctcgcctgtggagataacgtagtccttgttcttgtcagggaagatgttctgaaccatatcaaacgagagcacgtcggattttgaatggaatttgataaggaatacgactctcgactcctcggcattgaagcggagctctttcgactttatataaatgtcgctcgggaggatattgtcgagaatgatgtttttgatgaacgagttcttgtcgtacttttcatcgtagaggtttttaatatttgagagagacacagctaaaattgtagcaattttctcggcgtatttgtcctcaccctcgatgaaaacgatgtactcccactttgagcttgttcctatcggcttgtatgtgtagcctccggaggtgatcgcatcggaagtgtatgcaagctcgtcacgaactccctgtcgcatttcgcctatcttcacaagctcgctgcaagctatgattacaccgttgtcgtcaatgacgccgatgatcctgtctacagcatccctcatctgatgaattattccctgaaataaacgatttgacatatgatgccccttccacaaatattattttttaatcattgtatatactacactatattttacattataatttgtattttttcaataggaaaataaggatttttcatatatttttgcagttttttttgttaatagtcggcttatatgccggattttttccatgcatttccatttttgagcttatcggagcaaaacggacgcagatttttaaagtaaaagcctgataaactgacccgcagaataccaagctttgatttttaaaaagtgaaaatatcttattttttgtacatgagtacggtgtagatgtagtagaccgcgaagagaacgctgactacaaccgtcattgtatagaacaggaacggagtggttctgaatctttcgtacagcatagcggtgacaaaaagatacagtgacacggctgttatcataacgggagtcatgaaccacgcggaggtgtcgatcttcttaacgagcgtataaacaaggaacgcgacagcgagcacaaggagtacgccgaacgcatacttgaggggcgtatgtacatgacggtggaattcaagctcacgcatagcctctccgccgacgaaatcaaagagagaggaaacgattatatcaacgagagcgatgataagtatgcggacaaagacgattcttcccgccttgcctttattcagtgacgtcatattgtttttggcgctgactttagttgacttagccatatccattaagcggtaagcccattcattctgcggaacgagctttctcctttcagattatcataatttattgcgcgttttacagttcatatgttagcgacaggcacgacagcacaaagagcggcgcggtctctgtcctcagaatccgtctgccaagccctgtcatgagcattccgtgttccttcgcgtaaagtgcttcttccgatgaatatccgccctcgggacctatcatgaccgcggctgactcaatctcacgcacttcacttgtgtatcttgacagcggaagcgtaccctcgccctcgtagcagaacagcgggagtgttgcacctgcgctctcttccacggcagcttcaaacggcaccggctcgcgaacgacgggtattctcgctctaccgcactgtttggcggcttctgagactatcttctgccagcgttcggtctttctcgcgtagtccttcggctcgagcttgaccatgcaccgcgacgttatcacaggcactatctcagccgcaccaagctcaacggatttttgcagcaccgtgtcgaatctgtccccttttacgagagcctgatacacagtgcatttgtacggcggctcgttttcggactttttcgccgacagcacctttacgacaacgttttccgctccggtgatgtcataaatctccgtatcgtactcaactccgccctcgtcgcacacagtgagcttttctcccggacgcattctcagcgagcgtgtgatgtgcagtgcgtcctctccgactatggggaacgtgtcattttcccgaaacgcgtcggaacctgtaataaaaaacctcggcatacactgacctctgggaaatatactgtaaccgacagttacacattctaagataccatattattataccctataaatcctgatttgtcaaatattattttacatttttattgtaaatattatttttacggcgaaaatatactatgtaactctacgctgagcgtatcatgcatatcggctcgggagaaatcataaaaaaatacaaaaaagctcttgacaaagcggtgcgattgtattataataaataagcagctgtaatgagacggtcgcagctgaacttcacactacggagaagtactcaagaggccgaagaggc

SEQ ID NO: 709 - DNA, 4755 bp, Unknown
  16S sequences of unknown bacteria
gtcctgttcttccgtctgtaccacctgcccgccgtcaaaggctctctgcgaaaacagcgcgtaccagctgccctgcggaagataaacgctgcgcacgctttgcccctcctccagaagcggggccaccaaaaggctttcgcccaaaaggaactcatcctcccaaagcaggccctctgcatcctgcggatattcataggcaagcggccgcatcatgggccgactttcctgcacacagcgcagcgcctcgctgtaaaggtacggcagcaggttcatgcgcagccggtgccagaagctcatctcctctgcaaagccgcggctgcgccaggcggcctccatattccaggggctgcgctcattgtttgcctctccgccgccgggcatcaattcgcggaactggcccccatctggctcggaatgccattgcatgatgggacagaagcaggccagcatcgtggcccggcggtacaaatccacagtgggcagcggcccggcaaagcccgcgatgtcgaacccccaaaacgggatgcccgtcatggccgccgaaagcccagcgcacagggcgctgcgcagctcgctgtttaccgactgctggtcgcccgcccaatggcagggcaccgtatgctggccggaatagcccgcgcggctgaacagcacccgcccgctgccgataaactgtgtatatgcggccgtatagctctgcgcatagcggttcacaccctgacgccccgtgctgccatcggcaaaattcaccccttcggaataaatgaattcaccgccgtccgtcttaaagccgtccacgcccatatctagaagatactggcgcttggcaaaccaggtgcgcactgtctgtgggttttcaaaatccggtatcatggagcctgcaaaccagtgcccttcgggaatggtgtagggcgttccgtccgcattgtgaacgcaaagcccccgccgcacggcgtcctctctgtccaattcgttctgcgcgcacaccggctcgccgtcccctgtctttttgtaaacgggaacctgccacagcaccagatgcacgcccgcacggtgcagcttttccaaaagagcctttgggtctggccagcaggggctggcggaaaagtcaaaatcctcacagcgcaggggctggccgccgggcctgggcgtatagcctgccccgcggaaaatatagaacgtcgcctcatcgctccacgcttcggccaccatcacggtggccgggcaatgatgactgttcagctcgtccagcgcctgctctattttctgctggctgtcccaatgattggcggaggcccatgggccgaacgcccatttcggcggcagctttgccgggccgaaaaggcccatgtactcctgaattatctgcgcaggcgtgccggaaaacagaacgacgtcgcagctctccggcatattgatttttattttgtccttcccgaaggtaaattctgtcggctccagtgtgtccacatacacgcccaccccagcatctgtccagaagaaaggagccgggcaataggtcttttcaccctgaaagcagaatttttcctccacgcggtttaccgccgttctgcccttctggttgacggcgttatatttttctcccatgccgaacgccgcgcggtaggcaatatgcaccgtcagcagggagcgcccgccgcccagcccctcctgcacgatatttgccgtgccggagggcgcccgccaggccagcgcccggttttctgcgttgaatcttatccgtttcataagctttacccttttatgccgcctgccatgaggccgttcttgaaatatttctgcgcaaagatataaataaggataatgggtatcatcgaaatcaggctgccggccatcagcacattatattccgtgccatactgcccgttcagcgtggaaagcgcgatgggcagcgtcattttggaacggtccgtcagcatcagcagcggccagagatagtcgttccatgactccatgaacgtggtgatggccagcgttgccagcgtaggcacgcaaagcggcagaatgacgttgcggtaaatgccgaagacggaagcgccgtctattcgcgcggcgtccatgtaatcaccggggatggtacgcatctgctgcaccagcatgaacacggcaaagggcttgaaaacagagggcaggataacgctggcataatggttgataagccccatctggttcatgactacgaacagcggaatcatcgtgacctgcgtgggaatcatcattgtcgccagatacacacccagcagaaagccggagcccttaaaccgtatttttgtgaaggcgtatgccgccagcgaggcggaaaacagcgtgatcaccgtatagctcacggaaataaacaggctgttgaggatggtttgaaaaaacgggaagcgttcaaacactgttgtatatgcatccagcgtcggctctgccggaatccactcgatgggaatggacataagcgccccgcggcttttcagagaggtggatatcatccagaaaaacggcaccagtgcgataagtgcaagcagaacggccacagcataatagcaaagcgtgccccatgtgtgtttacgagtcatagttcacccacctcttttgccctttcatctggataaacgtgcacaccataatgataacgaacaatatccaggagaacgccgaagcatagcccatgcggtagtaacggaagccgtatttataaatgcgctctaccataacctgcgttgccccattcggcccgccgtccgtcataatcatgatttgcgggaaaagctggaacgcgttgatgaggctgacaatcaggacgtaaaagatggcgggcgtcatcagcggcagggtgatgcgccggaactttgtccaggcgccggcaccgtccagctctgccgcctcgtaatagccgcggtctatgcctatcatgccggacagcagaataaggccgaaaaagcccatgtccttccagacggaaacaagcacgacagcgggcatggcccatgtttcatccagcagccaccccgggccttcaatgccgaagacggcaagcaggttgttgagcgcgccgtattccggcgacaatacggttttccagataagggacgcagccacccacgaggtcagcacgggaatataatagatgatgcggaacgccgtcacgcccttgcggctctggctgagaagctgtgcaaccgagagggatgccgccagcatgatggggatgtacaaaacaatataataacaggtatttcccagcacctgccaaaactcgctgctggaaagtatattcttaaaattgtcaagccctataaaatgctcctgaaacatccccggggccaaaagctggtccaggccgttccagtccgtcaggctgataaacgcggagataacaagcggcagaagtgaaaacacaagcatgccaatcaggcttggcagcaaaaatggcgccgccagcttcagcccatcctgctgcaaacggcttttcctgcgctttacacgggaagacattgcggtccctccttcataaaaagagggggaggctgtgcctgcctccccctgctattccggatttacgagagagaaatttgtgcttcacactcgctctgcgcttcatccaatgcctcctgtaccgtcatggacccggaagccgctgctgccagcttctggccgatgatatcgctcatcaggctgtaatcctcaatggtcggcggcagcaccagatattccagagagtcaaacacggcctgacggttctccggcggtgtctgctccagatacggggccagtgccgcttcatcgttgatagcgggcaggtcccagccggcgtcgatgcgaagctgcgccgcggcatcgctggagcacagccatgtaatccatgttgcggcagcttctttgtgctcgctttctgcgttgataacgcacgcattgctgaagaacgcagtcgccttctggtctgcgccgggctccactacaacatcccagtcaaaatcacagccgtcggcaaagctgctgaaggcccaaatgccggtggggatcatgcccaggcggccgctcatgaataaatcccagtcgcccatgccgcccagctgcacttcattgggctgtacattgctcaccagaacacggtccaccatcatctgtgcagcttccacgttttccggcgaattgatggtaaactgcgtaccgtcctcactgagcaggctgccgccgtactgcgcagctaccttgtagaactcattgtaagtaacgggctgataaatgccgtaaatgtcgtcgcccagcgcgcggatggcctcggcagccgcctgcacatcctcctgcgtccagtcactggtggggtaatcgatatttgcctggtcaaacaaatctttattatacacaagcacaacgttggagaagttgcccggcaggccgtactgcttgccgtccacgttgaacgcgctcagcgcagtttcgtcgatgcggctcaaatccacatccgtaatctcggccagaacgcccttgttggcatacgcagaaaagttttcgatattcagctcatagcaatccggcgcagtgccgcccgcaacgcgcgtctgcatctgcgtaaaataatcgtcaaagccgatggtctcaatctccactgtgatattcgggtattcctcatggaacgcctcatacatcttctgaagcgtctcttcatttccagctgcggagttgaagttgcagtatgtaatggtgacgggctctgccccggcagactgagaggccgggccgctggcg

SEQ ID NO: 710 - DNA, 4687 bp, Unknown
  16S sequences of unknown bacteria
gagaaaaaatggacgaccttatcggccgtcgaaaggataaacagcccatcgatatgcccagcgccgggagcacctttaagcgcccggaaggcaactttgccgggactcttatagagcaatgcggtcttaaggggttttcaatcggcggagccatggtaagcgacaagcacgccgggtttatagtcaacacgggggacgccacctgcagcgaggtgctgcgtctcatcgaaaaggtaaaggatatcgtgcttgaaaaaagcggagttttgctcgaaccggaggttcgggtcataaaataaaggaggaagtatggattttgtaattgtcaccggcctttcgggctcgggaaaatcaaaagcggtggacgcccttgaggatataggatttttctgcgtcgacaatatgcctccttcttttatagaaaagttttacgagctttgcgccgaggaggaaatggaaaaggttgccgtcgtgaccgattcgcgcggcggttacctctttcacagtgtgtccaaaaccctcgacattctggacggaaaaaatatagattataaaatcatgtttttcgagtgctccgacgaggtgctttacaaacgctataaagaaacaagaagaaagcaccctctttccgacgactgcgagggctcggttatggcctcggtcaaaaaggaaagggaaatgctcgaaaccttaaggggacgcgccgattatataatcgacacgacccagctttcccccgcccagctcaaggagcgcataagcgatatttttctcggcgattcggtcaagggccttcgcataacctgtatgtccttcggcttcaaatacggtgcgcccaccgaggccgacatggtttttgacgtgcgctgcctgcccaatcccttttacatcgacgagctgagggacaagaccggccttgacagcgaggtctatgattatgttatggaaaagccggagaccaaaggctttgccgaccgcctttttgacatgatggattatcttattcctctttacagcgacgagggcaaaagctcccttgtgatcgctatcggctgtaccggcggaaaacaccgctcggtcacccttgccgaggctcttgccagccacatttccgaaagcggacttaaggcggccaccgttcaccgcgacattacaaagggcagaaaatgagcgagctgaccttttcgggcagggtgaaaaaagagctctgttcggtaaaaaacatgaaggactgctgtaaaaaggccgagtgctacggcgcaatgctttttttcagaaccttcagatatgacgaaattgcctttaaaaccgaatatgatttttgtgccgagcggtttaaatcacttgcgggagaggtgcttgacgcgcctttgaaaatacagcgctcccgcgcaaaaaacgggctctactcgggtaaaatagaaaaggagctttgcggcggaatatcggaattctttttccattccaaaaaagacccttttctttgcataaaccgcggaaatatcgacggcgactgctgtgtggccgcctttattcgaggggtgtttctgtcggcgggcagcattacgagtcccgaaaaggaatatcacctggagttcaaggtcggatataaacgcctcgcaaacgaccttgtgaccttcatcggcgactatctcacttcgcccaaaatcaccacgagaaaatcgtcatatgtggtttattataaagacagcgccgccattgaggacatcattgcctttatgggcggtcagctttcggccatggattttatgcaggccaaaatgctcaaggaaatgcgaaacaacgtcaaccgaaccacaaactgtataaccgccaacatttccaaaaccctgtcggccgtcagccgtcagaaaaaagccatcgaaataatagaaaacgccggaggtctcgaacttcttccgccctctctctacgaggtggcggtgctcagaaagcaaaacgaggacgcgtctctttccgagctgtgcgaaatgcttgaggaaaaattgagccgttcgggacttaatcaccgtcttgaaaaaataatacagatcgcaggtgatattgaggcgaaaaaatccgaaaacagggacgaaaaatgagagaatttgttcatcttcatttgcatagcgaatacagccttcttgacggcgcctgccgtataagagagcttgttagctctgttaaaaacctcggacagcgcgctgtggccttgaccgaccacggcgttatgtacggggttattgatttttataaggaatgtaaggctcagggtataaagcccataatcggctgcgaggtttatgtggcaaagggcgatatggaaagccgcccggcacgggggcagtcggcatataatcaccttatactgctgtgcaaaaacaacgagggctataaaaatctcataaagctggtgtcggcttcctttgcgcggggtttttatcaaaagccgaggattgacaaaaagctgctcgaaaaacacagcgagggactgatttgcctttcggcctgtcttgcgggcgaaattcctcagctgcttttaaacggggattatgagggtgccaaagaggccgctttatggtttgaaaaccttttcggcaagggcaattattatattgaaattcaggatcacggcatagaggagcaaaaaaccgtgcttccgaggcttgtcaacctttcgagggaaacgggaattccccttgttgccacaaacgacgttcactatatccgacccgacgacgccttcacccaaaaggtgcttatttgcatacaaacgggaagaacggtggatgacgagggaggccttgaattttcttcggaggaattctatcttaaatcggccgacgaaatgtatgagctttttcccgccctttccgatgcggtggaaagaacggccgaaattgccgaaaaatgcaatgtggaattcgaattcggaaagacaaagctgcctcattttgaggtggagggcgaccatttcgaatatcttaaaggactttgcgaaaagggtatgagccggctctacggcccatctcccgcccattcgattgtagaccgcatgaactatgagcttgatgttataaacaaaatggggtatgtggattattacctcattgtctacgactttataaacttcgccaaaagccgcggtattcccgtgggtcccggaaggggctcgggcgcgggaagcctttgcgcctatctttgcggaataaccgagatagaccccataaaatataacctgattttcgagcgctttttaaatcccgagcgggtgagtatgcccgattttgacgtggatttttgctatgtcagacgtgaggaagtcataaaatatcttgtggaaaaatacggctttgaccatgtggctcaaatcgtcaccttcggtactcttgcggcaagagcggcggtgagagatgtgggacgtgccctcgggatgccctattccgcagtagacggtgtggcgaaaaaaatcccccaaaagcacggaatgtctcttaaggaggctctcggcagctctcccgagctttcaaagctttattccgaggacgaggatgtaaaacggcttatcgacgtttccatgagggtggagggtatgccgcgccacgcctcgacccatgccgccggagtggttataacaagggacaccgtcgacagctatgtcccccttgccaaaagcgacgacgccatggtcacacaattcaccatgactgctctcgagcagctcggtctgctcaaaatcgaccttttggggcttcggactctgacggttatcgacgacgccgaaaaaatggtgaaaaaatctgagccgaattttgacataaagggcattgataccgacgatgccgaggttttcaggttaatttcctcgggaaacaccgacggcctttttcagcttgaatccacgggcatgaaaagtgtgcttcagcgccttcgtccgaagagccttgaggacattatcgccgttatttccctctaccgtcccggtcccatggactcgataggaaaatatatcgaaaaccgccacaatcccggcggaataaaatatccgaccccgcagcttgcccccattctcgatgtgacctacggctgccttgtctatcaggaacaggtcatgcaggtgttcagagagctggcgggatattccttcggccgcgccgacgtggtgcgccgcgccatggcaaagaaaaagcaggacgttatggaaaaagagcgggagacctttgtggagggctgtcttaaaaacggcatatcaaaggaaatttcgaattctctttttgacgacatgacctcctttgcctcctatgcctttaacaaatcccatgccgccgcctatgctcttgtggcctatcgcacggcttatcttaaatgtcattatcccgccgagtttatggccgctctcatgtcgagcacggtaaacgacgcgccgaaatatatcgccgaatgcagccgcatgggaataaaggtgctgcctcccgacgtcaacatcagcgaaagggacttttcggtcagggagggcaaggtggttttcggcctgcttgccattaaaaacctcggtataaatataatcgaggccataataagaaaccgtcgggaaaacggtcccttcaaaagcttttccgatttttgccgccgcctgcacgggcgggagcttaacaaaaagggtcttgaaagcttaataaaaagcggg

SEQ ID NO: 711 - DNA, 32759 bp, Unknown
  16S sequences of unknown bacteria
aggcgtgcggttcaaaaccgtaggcaaggtatattatttcgacccggccggggaggattatcccctgggcagccgggtgattgtggaaacttcccggggtattgaatgcggcgaagtggcgatgaagagccgggaagtcccggatgacagcgtcgtcaagccgctcaagaccgtgatccgggcagccacaccggaggatctcgcccgtctggaggagaaccaccgcaaggaacagtcggcggcggagatctgccgggaaaagatcctcaagcatggtctggaaatgaagctggtgaatgtggaatacacctttgacggcagcaagatcctgttctatttcactgccgatgggcgggtggatttccgggagctggtcaaggatctggcgtcggtattccgtacccggatcgaactgcgtcagatcggtgtccgggacgaggccaagatgctgggcggcctgggcatctgcggacgcccgttctgttgctccaccttcctgggcgatttccagccggtgtccatcaagatggcaaaggagcaggggctttccctcaatccgggcaagatctcgggcgcctgcggacggctcatgtgctgcctgaagtatgagcaggaggcctatgaggatctgatccgccgcactcccaaggtgggctttaccgtatccacaccggacggcgaaggcaccgttgtggaagtgagcctgctcaccggcgcgctgaaggtgcggctctcctccggggacagcaccaccgagaattactacaataaatccgaggtccgggtgctccggggcaagcgtccccgcaatgaggaacccgccggggaataatcccccatacgaatccccaaccggaaggcagtctgccctccggtttttcttttgctccgtttccccggaccgccgggctgttcccctgcccctgttccccgccggactactgggcgtaccttcgcactcccatcgcccgttccgtccgcctgtccgcaccctgcgccagccaatccccggacgcacaaaaaaacagcggatgtcttagacatccgctgcttttcagttgtgattcaaatccggatcagaagggctgccagccgaattcggtcaggcagaacatgatcacgaagccaatcaggaggaagcagagcatcttgggcagagcccacttagcccacttcgggaagggcaggccggcagtgacgcaggaaccaacagtccagcccagcatgggggaaatcatgttggagaagccgtcgccgtactggaaggcctgtacagccagttcgggcatgaggcccagagcctcggaaacgggctgcagaatgggtaccagaatcgccgccttggacgaagccgaggggatcagcaggttgacgaccgagataacagcagtcataccaacgcttgctaccgagcgaggcaggtccatcagaggagcggtgaggaagtgaacgatggtgtgcaggatattgccctgggtgaggatcaggctcatgcagtttgcaaggccgattacgaaggcaacgaatgccatgctggccaggcccttaccgaactcattaccgatcttatcgaaggagaagccgccgataaagccgcaggagatagaggtaatcagacccatagcaaccatcagcttgaaggtcagggaggtatcgccggtgaccatcgggtaaccaaccattacaacatactgcatcaggtagatgatgaggatcaggatagtgcggccggagagctttacttccttgagcatagcagcttcttcagcggcaacatcgccagcctcatcgggacgccagccctcgctccacatgggggagagagtggggtccttgcggatcttcttgacatagcgcagcaggaagaacagaccagccagcataaagatgttcatggagatgaacatggtaaagaaggtgccgtagatctgtacgcccatcagcatctgggtagtagcctgcttggtggggccggtaccgaaaccgatgagggtagcataggtcgaaacgcccatagcgcagatggggtcgagcttgagcttcttagcgaacataacgccgatgggaacgatggcgatgagggcatcggaaccaccgaatgcgcccaggtaaaccatcaggcagaacataacgccaatgagaatggagtcgtccttatccttgagcttgtaaatagcccagttcatgaactcatcgaatgcgccggtgcccataacgatagcaacggtagcaccggaaaccataacggtccaaccgatcagcgacgagtttacaagaccatcaatcagcagcaggagtacctgcagggggctaaccgggtctgggcacccagatactggaactggtcaccgagaatcttaccggtttcggggtcggtcatgaactgaccggcggggatcacataggtcagcaaactgctcacgaacagcaggcagatcatgatccagaacaggtgaggcatcttaaagccctttttcacctttttcggctctttggttgcagcagccattagttatcactcctttatattgggggagtccgcacaggaggaaaccctctccacacggggcagctgcgccccgggaatccatctgagccggacatgccgacagcctgacactgtgcgaaaggctgctcggatacaagtttaattatgcactttgttctcctaaaaatcaatacacattattcatagttttttcattcttttttaggcgacatacgacaaataactgcaattcttcctatacgacctatccaaaaacaccgtaaaatccagaaaattccacaaaaggaagcggaatccggtccatatttctgcaggagagattgagcccgggttcaaatatttagataaattttacctggaaggcgaaatttcgcccttgcattttatgcggcatattgatacaatgaagttgcatcaaaaggaggtgtatttcccatggcatacaagattactgacgcttgcatcagctgcggcgcttgcgaggctgagtgccccgtatccgctatctctgagggcaacggcaagtacgagatcaacgctgacacctgcatcgagtgcggtgcctgcgccggcgtttgcccggtaggcgctcccgttgctgaataagctgcgtttggctcaaaccgaaaaaacagaaaagcacggccgtgcttttttgcacccctgcggggagcagttcgcgctcatggcttgcgggagtgcttcccttctgtgcacgcagccgggcccgacagatcaagtgaacagtgaagagtgaataacgaatagttttggtatgctgcttcgcagcatgaattcagatgcatcttccgcccaccatttccaatccgtgccgcaatgcggcacaccaaccctcttcacttttccctattctctattcacttaacccgcccctctgcggggagcagttcgcgctcatggcctgcgggagagcttcccttctgcgcacgcagccaggcccgacagatcaagtgaacagtgaagagtgaataacgaatcgtttcggtatgctgcttcgcagcatggattcagatgtatcttccgcccaccatttccaatccgtgccgcaagcggcacaccaaccctcttcacttttcactattctctattcactaaaaaagccccagccggacgcaatgccagctgaggctttttcattatttcgggctaattcttcccgctatctcccttagtgttcgggagtctccggggaactgctcttcgcaggggctatggtcagttcgccgtccttcacatccgccacatagacagtaccgggttcagggtcctcggcgatgatcttgcgggccagcacggtttcgatgctgtgctgcaggaaccgcttgaggggacgggcaccatagacagggtcatagccgccgtccacgatgaagtccttggcggcatcggtgagccgcagacccagctgacgatccgccagacgcttctgcagatcggcagccagcagatcaacgatcttcttggtctcttccttctgcaggggcttgtagaatacgatctcatccagccggttgaggaactcgggacggaactgctgccgcagcagcttttccacttcagcccgggcggattcggtgatgttgccattctcatcgatgccgtccaggatatagggcgagcccaggttggaggtgaggataatgatggtattcttgaagtccactgtccggccctgggagtcggtgatccgaccgtcatccagtacctggagcaggatattgaatacatcggggtgtgccttttcgatctcatcaaagagcacaaccgaatagggcttgcggcggactgcttcggtgagctgaccgccctcctcataacctacatatccgggaggcgctccgatcagacggctgaccgagaatttctccatatactcggtcatatcaatgcgcaccagattgcgttcatcatcaaacagggcttctgccagtgccttggcaagttctgtcttgcccacaccggtgggacccaggaacaggaaggacccaatgggacgatccgggtcctggataccggcacggctgcggagaatggcctcggacaccttggtaacggcctcgtcctgacccactacccgcttgtgcagaatctcgtccatgtgcagcagtttttcccgttcgccttccatgagcttggttaccgggataccggtccagcgggccacgatccgggcgatctcctcatcggtgacacggtcatgcaggaggttcgattcccgttcggtcttttcagcgagtttctcctcctcttccagttccttctggagctggggcagacgaccatacttgagttctgccgccttgttgaggtcgtatttcatctgggctgtttcgatttcggcattgaccttttcgatctcttcccggagcgaacgcaccttggtaatggcattcttttcattttcccacttggccttcatgccgccgaactgttcccggagctctgccagttcccggcgcaggtcggcaaggtgttccatggagagcttgtcagtttccttctgcagggcagcttcttcgatctccagctgcatgatccggcggttgagttcgtccatctcggacggcatggaatccagctcggtacggatcatggcacaggcttcatccaccaggtcgatggccttatcaggcaggaaccggtcggagatataccgatgggacagcactgccgcggtgatgagcgcctgatcctggatcttgacgccatggaatacttcatagcgttccttcagaccacgcagaatggagatggtgtcctccacagtgggctcatccaccatgaccggctggaaccggcgttccagcgcggcatccttttcgatgtactgacggtactcgttgagggtggtggcgccgatgcagtgcagttcaccacgggccagcatgggcttgaggaggttgcctgcgtccatggagccctcggtcttgccggcgcccacaatggtgtgcagctcatcgatgaagagaatgatcttgccttcactcttcttgacttcctgaaggactgccttgaggcgttcctcaaattcgccccggaacttggcgccagccaccagagcacccatatccagcgagaagatggtgcggttcttgaggttttcggggacatcgcccttgacaatccgctgagccagaccttctaccacagccgttttgccgacaccgggttcaccgatgagaaccgggttgttcttggttttccgggagaggatcataatgacatttcggatctcgctgtcccgaccgatcaccggatcgagcttctgagcccgggcctgttccaccagatcggtgccgtacttccccaggacatcataggtgtcctcgggggtatcggaggtgacccgggtattgccccggacactcatcagggcagacaggaagctgtccttagtgatcttgtaccggtcaaagagctttttcgcggcgggattcggggactgaagcagcgagagcatgatatgctccaccgagatatagtcgtccttcatctgttcggcgagacgctcagcggcggtgaggatcttatccacatcgggggcgacatagatcttgtccggttcccgaccgggcccggtgacagccggcatagcggcaatttcagcggtgaggtcgctgcggaaggcagtgagatccacgcccattttcttcagcagctggctgatgaggccctcgtcctcccgggtgagggcgctcagcaggtggagctgttcgatctgcatattggagtactcggtcgccagactctgggcagccgtgatcgcctccagcgatttctgtgtaaatttctgtgcattcacacggcactcctcctttttggaatgacggttccggagcaggctgacctgcgggggaaccggatggaatttcagttgttttagcactctactctctcgagtgctaattatagtgtaaacgagatctgtgaacgattctggcgctaaatgtaaattttttgtgaccgactatcgggaacgcctgccaccccggacaggcagccttgcccggtgcgattcccctgcatggacaaagaaaaccggggaagcccttcctccccggcatgacagataccttattataataagagggggccgcctaagcggcaaagagcaggaagccgatggcattggtggcgaggttggcgccgaggtgtaccacccaggagagccagagactgccagaatgctcgtccaggcggcagaagatccacccgcccagggccagcccagccagagtgaggagctgaaccggcagaccgtaccagccgagggtcatcgccacatggtagagggcgaaggccagacagctcagccccagggctggcctgcggggcagataccggcgcagcagcaaaaagccgaacccccggaagaagaactcttccagtagagagttcacaaaggagatgtagagggcgacccagaggaaattttcccggcgcactccggtgccggcagtgagggcggcggtgaggccggagaaatcgaagatgccccgggtgaggaagaagccgccgagaatgacagcgaatacgccggcgccgatgccggcagcccttccgagcccctgccggggacgggtgaacagcgggcgcagggatactttggcctgacggctccaccagaggggcagccccaggaagagggtgagcttcaccaggcttttgatggcatagccgggctggattaccccgtccaccactgccatgactgcgcatccgaacagcaggatcgccagaatactccgggcctgtttcatgctattctcccctttctgcggttatctggtttcattatagcgccagtcccggctgtccggcaagacagcaaggaggcccagacagggattttctccccaaaaacgggacagatgccttgacctttcccggggattctgatataatgagtaagcaaaacttggagacgtatcgaagtggtcgtaacgagaacgactcgaaatggtgtttcaccccgccgctccgataccccgcaaacccgcatgaatccggcgattttggaagtgtcccggttcaccggatttccccggtactaatggagtactaatgacagacaattcccgcatctgcggtgaatttatagatggagacgtatcgaagtggtcgtaacgagaacgactcgaaatcgttttgtctagagataggcacgtgggttcgaatcccaccgtctccgccagaaaatggcgacaagtcaatgtttttggcttgccgccatttatttatatgcctaccgccgaggggatttttgacaggctcaccaccgtccttgggacagttcccggggcagtgtcagggccttctccatggccgcggcgctgagctgtttggactgagaatccaggtgagcgtagatgttggctgtggtggagatgtcactgtggcccagccattcctgaatctgcttcatgggcactccttgtttcagcagcaggctggcacaggagtggcgcagatcatggaaccggatatgccgcagcccgttgtccttcagcagcttggcaaacccttcggtcacggtgttgggaaggatgaggtttcccatctcatccacgaacaggtagcccttgtactttcggttatagcagttgccgcagagtttctcgttgtactcctgctgcgccttcaggtcccgcagccgctgggcgaaccccgccaccaggggcagggtccgcagactggacttggtcttggctcggtccgcctggataaggatatgttttccctcaacattggcgctggtcaccgtgtggcggatggtgaaggtgcctgcctcaaaatccacggcttcccaccgcaggccaatcacctccccccgccgcagaccatagaaggcggcgaactggatgatgagctccagccggtggccccgtgcagcctgaaacagttcctccatttcctgagcggtgtagaaggaagccatgtacttctgaggcttgggcctctccaccttgtccaccgggttgccggggataaggtccagcctcaccgcatatttcaaagccttgtgcatattggcgtgcagcctgatgacactggtggctttcagggtctccagctcatggagatagaagctctggatgtgcctggcctgcaagccccccagggtgataccggtaggctcgaagtaggggacaatgtgattattcacattaaaacagtaccctgaccaggtggtctgctccaccgaggagcggatgatcttcagccagtagagcatatagtcgctgaacagcatatcggaacttaagtcgctggtccgggtgggtgccggcggtgcgaaactgcgccgagcctgccgcagcagttcgtccgcctttttcttgttaccttttaccggcagccccgttccctgccatttctgcacccgcttgccgtccgggcctttgtagctgagcacaatgtaaaagtagccattcttttcggtcagtcgaccagataccatgggcattcctcctttgatttacaaataggtcctccgggtccaacacaaggatacccggaaccctccctgaaagctattcacgaaactgcacaaggatggctgtatcttttgggtacaaatccaccacactgcctgcaccggatggctccggggcaggcttttggttttaccgggcagggttccgtccccgctggcggttccttttttccccccgctggcggtggtattcttcctgcatggcttgaacatacttgacccgctcctgaatcctctgcgccacctgatcctcccggcccagggccttgattttcttggtcaggtctgcccttctctgggccgtgccggcgggtggatccttcctccgcataagcctggcgcaatcggctcgctggtctgtcagttcctttattctttcccccagggactgccgatggaccgccaccgcttccagggtgttcaggttgtacttggtcatcaggttcagttcctccagactcttttccgcctgccgccactgggcattgatctccggccagttcacccggggcgtaggccgctttgggtagatacccagctggtagcagtagtagagatacaaccggaacaggctgctcttttgatcggtgaacacgccccggcaccgataccgccgtgtgggcaaatgatatggaggacggggccgcaggctgtacttcggattgaagttcaaatcatagtagtgggggccataccagagacagcgctcttgcaatttccgatccagggcagaccagtcatattcttttcccagccggtatacccgtacagcccgtcctccgtccagagggcggagggtggcatactttcgccccggctgccggttccaggcatatcccagctgccgcagcacccgggcgaagtcctgttcggtgttggtccggctgagggcggtctggatgtcctcccgcatggtctggtaccgcaagggttctcccctgccctgggcctggtacaagggcaggggctttttccctttgggcttctctattacggagagggcgttctcccggcaaagctgatccgagatccttcgcaggtcctgatactggctccggcgctgttcatatttcttgccatccacataggacactgcgttgatgacgaagtggttgtgcagacagtccgtattcagatgggtggccaccagcacctggaatcggtctccccacaccttccgggccagcttcactccaatggcgtggcactgctccggggtcacttccccgggcttgaagctctggtaggcgtgcatggccaccactcccctggtcttcccaaactgctcctgcaccgcccgcatttccctccatgcggtctcagggcggcagtggatgccggataccagctggacggtctcggtcaggttggttttttctccgttccccgcataatgaagggcctgggccagaccgccgtattgggtcttgtccgggttggcggcgtaatccaccacccgccgcaggctgttccgcaccggccagattttagtggtcgccagaggcatcctccttccccaacaggctgtccagcagcccttcccggcagcggcggtactgttccgccagcaccgggtcatactgttccaactgttcgttcagattctccatccaggtcaagtagctaaaaaaggtctggggcggatggaaccggggtgtgtaccccagcgcccgctggcggagatattccgacagggtcagcccgcaccggctggctgctttcaaaatccgctttttctcggtgggggtcacccgcacgttgattcctacacttcgggttctcacaagctcacctctttgtggggttcggtcgctggtccaagagccgcccttcgggcggttgaccagcgacactagccctgcggggcgtcggggctggccccgtaccggcgaagggttgcccggtggcaacacaaagcccatgcttgttaccaaaaagcgcctcctgtgacgatgatgacgatgatgacggtgttttggacatatacccatggtcagggtatatgtcacattcatcgtcactaccgtcatcatcgtcattccagaactgcatctgcctggtagtggaggtccgacggcttttataacgaatgcccctggggtctaaaacaacataatagtgctccaccagttttcgggtgaactggttggcctgaacaccttcaattcccgcaacagccataagctgggtggcggttccctgccaccggcccgtctgctccaggaagtccgccagggtccacaggtactggggtacctccttctcaagctgctggtcagcggtttcctcctccatcagattccagacacaattttggtactccagatgaagggtccggctctccatgtcccgtccggtcaccaacagtcgggcggtggggctcatccgctggcgctgcaacagccagatggtgtcggctgcccccataagaccgttggagccggaaatctgctggaaggggtcggcggctccctgcttccgcagatggtggaccagcagcagggcgatgttgtgctgatccgccagggatttcaaagccgccatatcctggtagtcggtggcatagactcctttcccctggtccgccacccgcaccttttgcagggtgtcaatgaccaccagcccggtgtccgggtgggttgccaggaaggcttccagctgttgttccaggccccggccaatgggatcgccggatgtctggaagtaaagtctgcctggaaccgggtcctcggtgagttggaacagtcgcttctgaattcgagcatatgtatcttccaggcaaaggtagaggaccggccggggctggactgggcggccccaaagtttgccgcccttggccagctgcaaacacagccagagacagagccagctctttcccgctttgctggccccggccagaagggtcagacctgcgggcagcagttccgggatcatccaccgcaccggcggcagcggagtggacaacaaggtttcggcgtcaacagtttggacttttctcaatagcatttctccttttctttgtttctagcttcacacaggccccacactgggccggagtgcctttttgctgcactagctgggaggaagattggattctccgcccagctttacacagggctgatttcggctgcccctgcgccgggctggattccattctccaccacataccggatcacattgattttggggatcttgtaggcgttgcccagcttcagcccccggatgcttccttctcccagcaggtcgtaggcggcgtggcggctgatgcccagcatggtttgcagctgccgcacggtcacaatgtcgggataatcggtaaagagtaatttgtacagtacttggatttcggctttgttcatcgatcacctgctctcttgtaattttgcattggcggaaaaccacttctccgcctggggtagattgcacttcacggatgccagccgcttctggcctggctccctcctttctcctttgccgggtgcactttacgatatcctttggaggaagattgatggggacaaggatatcgttaatagcatcctttacttataaacgtcaatgggaccgctcctttgttcctgctgcgatgaaaaatatttacagcggttcagagcgcatcccttttggcggtaagactaaactgggcggcagaaatatcttccttcctataccagtaacacggaaccctcgaaatgctcacccttccaaaaataaattttaagtttgtggatttttcctatagaactgcggtgtaacaatcctctcatcctatataagttacacgaggtctcaaaaacgaaacaccttccaaaaatattttttagatttggtacattcgactatagagttaggctacgactttcttctcgtcctatataagttacacggagggcccagaatgctcacccttccaaagaaaaatctaaaactttgtgaattctgactggcgaccctttttgaaagggcccttccatcttatataagttacacggaacccccgaaaatttcacccttccaaaaataaattctaagtttgtggattttaacgaaagattgtccttgaaagcgccttccatactatataagccacacgaaccctcaaaaacgaaactccctgaaaaaatttcatctttgcgccctttatgtcgcagcccgttcacctggtttgcaaacacctgcactgccactcatagacagttcctcattctgcaaaccatcgttacgctgttgaaaaaggacgacagtgtcaaactcccccgccaaaagatacagtttgtaatacggtcagaatacacctgcccgggatctccggcttactgccacccgcacaggacaataaaaaagagccgagcgaacaaagcctccgggataacccgaacactcgttcacacggccctagcaggcttgtctttggatagccagcccctgatcgctcgttgttcatattcagttgtaaaccatctgtttgctacggccccgctttctattgccatcattgaacggtgaatgcactgtaaggaaataacccttcgcagatgatcgcagtttactttatgattcacctacctggggcctatttgaactatccgaaatttccggatagttgctgatccttccaattacgaatcagaatagttttttgatactctcatcattaaaattactcctgcttatccgcacaactttatccgctcggtacatcaaaaggggttgaagttgtgtaaaaatattgtcatgagctgaatggtattcgagattctaacaattgctcctaataattattataataattgttagaaccataattagaaacgcaactgtggtcgatagtatttcctgcgcccaccgtccgagctatgattcctcgccaaaggatacagtttgtgatacagtcagaatacacctgcccaggatttccggcttactgcccacccgcacaggacaataaaaaagagtcgcatgaacaaagcctccggaataacccgaacacttgttcacacggccctggtaatcaaagtatttagaattccagttcccgattactcattgtttgccactctattcggtgaagtcggcttcaaatgttcaagcgaagtacaaccctacgaatgattaaccgctcaaaatcatttattcaaaaaacctttctctgcgcatttttcgaaaagctttccacaatcactcaaaagatccttctcgaaatccttgaattcagtatccttaatctctccagaatctatttctccagtgagccaaaaatccgtaagatatttccgagaatgacctccatatatatgaccaggtagatccgaatgtgtaaaacagtatttctcaacatcagaaagagaaatgattcccacatgctggcaaagccacttgtattcaggggattcccggggtattgccaatagatcagctgtcctcttataaatataatcaacttgaattcttgggtcctctcgaaggactgcaaggccatatacacaatctggatcgataaccgtttgcgagtgaaaaggattatattggcttgggaatctattccgtatgtgctcgtagatctgttggcagttagttgctaaacgatcaatatcccattgatatgcatcctgatcaaaaatcctgagatcccgtcttggagtgtacatcttgctatcgaagaatacataatggccttcttttcgagtaagcacatcgagcgttctttttttgttgcggtgaaaaacatattcctgctcagggtatacttcgtcgaacaatccacttcgcaaaacgatttgataaaggtatggctccagcacttcttttcctatcaactgagctaggtgattgtcatcctgagttatacgatatagcatggaggatgttacagatcgcataagcaaatgcggaagaggcaaataaacaactccctgttcctccacaaatgggtaggtatatgagggacgcaaacaatacatgtaatcatcaatacttgcggttatgtttttaagctgaattttgtactctttccttgtaatggttaagtgtgagagttccattggaaactgcgacaatataaaagtatatacttctggagataccttatactcattaccccataggatcatccatagcgacatggctaagacagcataccttttgtaatcacttcccaacttttctcggaatatctcaggcatattcactttagagttcacaaaggaaaaataccaataatagcgatataacttatagtaagggtattcttgtgcctcaaattgcacggatcccaaggcaacaaataactcgtttaccagatcatttgttccttttaatttatccacaattggatgtggatgatttcgtatacaatttatcattgcaacaaagtttcgatcgtttctgtcaaaacgcccttgtcgccattcttgtgaggtaacagaaaatagaagtagcgtttctagctcccacggaaagggtgtcttacccctttcgtttctgtctatcacaccgtttaagttcatggttttgcgggaccatgtttgtaatatattcatcttttctacaaacgaatatcgctttagtgtccgcgggatatcattgtactccatcggtgtacctccgtttgcttaatggaaagaactataccatccaaccgaaaagggaaagtcttaaatactatccctctcactatattatagcagagtattgatctttttcttagataaatagaaattttgttattgcgaataaaaagccttcaaataagtactaacccccaaacgaaaagcgcactactttgtccgctcgtaatcgagttttgggtaaaagttatgttgaccccgtagaggcttttagttataatagaaatgcattagtttgtccgctcgttgatgcgatagtagcagaacctgtgtaggagttttggcatgaaaaatgtcgaaaaatacaaaaaaatatttgaacgctatggtgggataatgcgcacaaaagacctgcagcgggagaaggtccagtaccggactttgcagcatctgatagaccagggggcagtggaaaaggtccgctatggctattaccagtggatcgacccggaagatttcagtgaggtcattacggtgagccgcttgttcccggacgcagttttttgtatggaaacggcgctgcgatattacggttacagtgaccgaactccgactgaatggcacctggcagtcagcaagaactccggaaaatcccgcttcaaaattgattatccctttgtgaaaccctattatgttgatcccgcctgtctggaggtgggcttgacatccggtactatagatggacacaagattcgcatttatgataaagagcgtgtgctttgcgattgcctgcggtaccgcaacaagatggacaaagaaattttcaacaaagcggttcagcgatatattgccgaaccggaaaaaagcatcccacatctactggaatatgccgaagtgttgcgggtcaaaaaggttgtaaaagaattgataggagtgtggctgtgatggcagacaaggcggcttctgtgctggcaaaactgaaaacaaggccagggcgaccggtatcagttaccagcagtgtttacagcttttcttccaggagaaatttttgcgcaggctggcggcttccccttatgcggaaaactttgtcctgaaaggcgggctgtttatctacacgctcaccaattttgaaagccgcgccacggtggatgtggattttctgatgcggggcctgaacaatgaccttggtcgaatggatgcgattcttgccgagatcctggcggtggaaacggggaacgattttgtgaccttccgggctgaaaaggcagaacccattgctctgcaacgcaagtatcacggcgtcagcacgcagatcaccggttttatcaaaaatgtccgggtgccgattgcagctttgtcccatcaaaattgaatgtcttggacaggtagtagatatcatagaaatctttcatccgtccggtaagctcaaaacgctacagaatggcgtcaaatttttccgccacagtgctttccagtgaataggtaagaaccgtaggctgcgtatagccctccagctgcgtttgaatgggtcttcgctctgcgcctggaatgatcacatccccaactccgatatccacgttgaatggcaatacagcagaccctgcaaaaccgaggaaccacatacgaaaataatagctttgaccatgtatttgcgctggcggatcagccggagatgcttacaaagtggcgctatttcctgaaaagcttgggaacctcagagctggagttctccacggtcattcagggaatcggggcctttcttttgccagtgtggcaaaacatcgtgacggaagaaccgatgaccggcacatggaatgcataagcagcaagttgggggacaagcgaagaataacgcccaaaagcaatggtcatttacataattttgttaaaggatggtattccgcatggcaaggaagaaaaccgaagaaaaactgaatctggacacgatcctatttaagtgccgggatattctacgccaggcgcgcaattccggttctttctttgaaaagcgcgatatgatgctgacccttgtttttttgcgctttattggcgaaaaatttgaagatggcaccgaacatcttcggcagacgctgatcgaagaggatctggatccggacgacgaagaaatctggaacgccttcttcaatgaccccacctttaccgacggcacctacaatctgccggtagcggcccgctggtccaccatcatcaacacacctgcaccgcagttgaatgttgccttggatacggccctgaaagctttgggagacagcgataaacagctgaagggatgttttgtggagggcacctttaccacaagaaacctggaatccaaagacatcaaaatgctggtggatgagatcaacaagatcagccacaagaaattcggcgaggaaaaagacctgatcggccgagtgtacgaatacttccttaaagagtttgcagtcaatgcaacgaaggaggagggtgaatactacacaccccatgacgtggtccagctgattgccgccatgatcgaaccctttgacggcaccttgtatgatccctgctgcggttccggcggtatgttcattcagtgtgcggagattgtcaaagccaaacagggcgacaccagccgcatcaatgtatatgggcaggaaaaagaaccggccaccctccgtttggcgaagatgaatctggttctgcgcggcatcagccaccacctgggggaaatcgccgattcgacctttaccaacgatcagaacaagggcttgtattttgactacatcatggccaatccaccctttaacctgaaggggtggtacgatgccaacctgagcgatgacccgcgctgggccgactatggcacaccgccggaaagcaacgccaactatgcctggatcttgcacattctttcccatttgaaggctttgaacggcgtggcaggattccttttggcaaacggcgccctgggggacagcgacacggtggaaatccgaaagagactgatccagaacgatatggtggaagccattgtgattctgccccgggaactgttcatcaccaccgacatcagtgtaaccctctggatcttgaaccggaacaaaaagggcggcgcctaccatggcagaacgctgcgcgaccgcagccatgagattctgtttatggatctgcgcacctggacggaaaacccggtcaagggagagagtaaaaagaaagtccagcttgttaccgaacaaatcgaaagggcggcggaaatctaccacacctggcaggacgagggtacagatggcgaccattgcgaagtgcctgaactgtaccgcagcgttggtataaaggaaattgaaaagcagaactggagcctagtgccaagcaagtatattcgattcatcgaccacgatctggaaattgatttttctgcggaaatgcggcgtatccaggcagaaatgaaagccgtgatgctgcaggagaaagagtcccaggcgatgctgctggaggctttcagggggattgggtatggcattgactaaacataaaatcagacacctaattaaggtcatagatgaacgtaatatatacggaattaataagttctatggaatcaacataaacaaagattttatgccaacagttgccaatgtggatggaattgatgaaagtaaatataaagtagttcgaaagaatagatttgtttttagtggaatgcagacgggtcgagataaatgcattagaataagtgtatacttggaagagacacccgttattgtatcccctgcgtatgtgacttttgaaatagaagccacggatattattattccggcttatttctttagcgtatctttttgactgcgttgtggtcttttttgatttgttttcgggaaaagatcatccgctgttgtgttggattgtaccgccgctgaaagacctgtgttaagcgcgtaagggaaactataagggaaaactttatggccgatacgcacggaccacacagccccgggacaccagcgggaggccatttttcggatcggctttgatctttgaaaatcacttttctgacgtttcttgttgtggtataatatttcctcccgtattatgtgtttggaatcagttgtagttccctgacgtttcttgttgtggtataatgggccgtcagaaattacaataaagtatagccacttggacaacaaacaagaagtaaaacgagaacggcccctaagatggttacaggtgccagagcaatgatatgagtgcagtatactcatgccatatggaggagcaatggagagaaggaaaacgcaggctatggcgtcgcatagcgccatatttttattgctgagtatttttacatttgtgtttcttggttcggaatatctatatgtcaatatggtctcccgcattgtcgaggaaagccagacggtcattgcacaaaattatgcgctgggcgtcaatgcccttggatttcttatatacccgctgataaaccgctctgtccgcgagaggaacaagacgatccttatattttccctatcgttcctctccattatctgcatatttttgatccaacagcacatctcgttttccgtcacgcttgcggcaggcgtggttctgtttctgttgctgggcgtttttggcggctccgttcattatctggctgcctgcacgatccggaccgaacgcatagccggcctggtgggaatctcctacgcggccggcatcctgctacagtacgcaaacaacaatttggtaaatatagagatcgcggaggccgcggtactctctgtttcccttgcggtactgagtgttttgatcatgcgcacacgccgcatccacaaagaagcactcgcatcggatgaaacggcgccgctccgaaccgcgctccgccccgatgaaatgtccagaaagaaaataccggcgagactgctcctggtacttctggtggccctgatggcctgcgtattcagcacattggataacgcgatcaccctgggccatgcggcgggcacgatggacatcgggcaatggccccgtatgctgctggccctgagcggcctggctgccggtttcctctttgatatccggaaaagaaaatatatgacgctgatgatgtactgcgtgatggtgctctcggtgctgtgtgtgattgttctccggtggggcgggccattcctgaccggagtagcggtcgcctatgtgacctccggattttttgtcgtgttttttaccaccagttttttggagctcgctgcctgtatgcgcctgccggacctctgggccggcatgggacgggcggtgaataatctcgtggcggcgctggttaccaacggctcggtgacgctgctccttgccggcaggagtattacgctgatcgtcctcatgctggtgctgtttgtcgcggccagcatcctgatgtttgcctacacggtcaaggctcatgccgtattggcgccgcccccggctccggcggcgggctacacgccgaaggaaaagttctcttcctttgccagcctctattcattgactgaccgggagcgggatgtgctgcagtatttactggtctcggacggcagcgtgcaggatatcgcgcagcagatggccctttcccgtcctgtgctgtatcgccatatcagaagcctgaatgaaaagaccggaacccagagccggatcggcctgctgcagttctattatgagtggatgccggagaacaagggcgttacccctgaaaaaagcccggatttcaaggcgtgagacaaatgtacccccctgtcattcgaaaaaaaacgatgtaaaataaaaaaagagacaaatgtaaccttatattttaaggccatctatgctacgctttccacagatactggcgcagcatcccggcctacgacaaaccgcgtcaggatctcctggcgcggttttttgcgtccaccccgtccgcagcggtgtgggacgctcaggccaggcagtcgctgtataaggaggaaatgaaatttgagaaaaacaggatctattttagtggccctgctgctcctgtttggcctgactgcctgcggcggtccgggaaacgaaccggagagcgaaagcgtgccgaagggagatggtcagataacatcggagcctgccccatcttcccgggaacccgcggtgtcgatcacggaaacggcggccaggactgtggatttggaactgtatgaaaccccagatttcagcatccagattcccaagggctggacggtcaccagcggcggtacagggatgtatcactccatccggattcaggaccccgctgagcccctcaatcagatgttcgttctcttgaaggcggatatcctgctccacagtcaggagggaaaggacgcctggacctattattccggcgtgaccggtatgcctgatatgcagatatttgcccaggctcccgtgctgtccagcccatctacagagaatttttatcagatcttcccgcagtacgccgactttgccgcccaatatggccccggctatgccggctataccttcccccagtttgaggccttcactgtgaccgagcgtttcccgtccaccggcagcctgagcgcctacgcgctgggcgatgagctgctgcgggccaccttcaccgaagacggcagagagggagaggggatgtttgccgcgtcggtcgtggattttggcagtgttcccatcgcggccggcccgccggtaggctaccagctcccccaggcggacggcgggtattatatggcgtataacatcatggcggtcacagcggccaaggacaccttcgttgagtgggagggcattttgaccgagagcctcggcacactggagtactcggaaaactttgtaaacgccaccatccaggcggggcaggaagtggtacagcaggccatggacttcagccgaaatgcaaacgaggtgctgaacgggatcatgtcttcctggaaggcgcgagacaccagcgtggacatccagagccagaagcagagcgacgccacattgggatatgagcgcgtttacgacacggaaacaggtgatatctaccgggcggagaacggctggagcgacagctattctggggagcgctatcagccggtgacggaagacgagatgtacgtacagcccatcagcggctatattgagtgaaaactgccctgcttacaacgacaggtagctgcatttttttaacgaacaggaggagcgtgaatgaattatagcatctcgaagatcatcccatatgtccgtcggtatgtgctccttggaatttatgacgtgctggacggcgaaagagtgccttatcaaaagaaagaggacacggtcgtggccaaagcggaggtatacggcaatctcagcaccttttctatctctgccgaggagcaagagatggggaccgagctgaaggtcaccctgctgcagccctgcgagggcttgtccaaacagggaaaagagtgagccataaccgccgtggcggatcgtacggtatctggaaaacgagcttttgatacacagcagcgtggtccagatcaccagcgactgctggtcactccgcctgaccatccatcggggccgtcccacacaagcacacagcattgtcagaaaggaaggaaacaaacgatgaaagaaaaacaaagcattattaagttcctgattctggcggtcatcctggcagtggccctgaccgccggctttgccactggtgccatgaaaacggcggccctgaccgccgactggaccctcagcctgagggctatcctgcgtctggcggccatggcggcaggggtgctgctggcggagtgggtggcggagttcttcttgaccctctgcaagcccaggacccaccgggcccggtccatcctctccatcacccgtagcctcctgcgctatgccgcagccattgtcatcctctgctggggtctacacctcctgggtgtgaatattctggctattgtggccagcctgggtgttttggccttaatcgtcggctttgccgccgacagcatcatcgccgacctggtcacgggcgtgttcatcctctttgatagccagtacaatgtgggggacatcatagaggtggacggcttccggggcgtggtgacggacatcggcatccgcaccacctctatcaccgacgccagcgagaacatcaagattgtaaacaatgcggatatgcggaacatcctcaaccgttccgaccacgtgtccaagtccttttgcgacatctccatcccctatacctgtgatctggaggcactggaggagaaattcccgtccctgctggaggagatccggcagaagcgtgcggacgtcatgttggacacgccggtctacctgggggtgcagcagctggctgacagcgccgtggtgctgcgtttctgcgtggacgtgaaagaaaaggacatctatggcggtgcgcggatcctcaatcgggatctgctcttgggcctgcgccagctgggtgtggagtgccccttcccccagctggacgtccactctatgtgagccatgggcgggcagaatctgcggaacgcgccgccgatggagcggagcgcaccgccaaaggaatggaaacttcccccggagttcatcctgccctgggagcctggcgtcccggaggagccccgccccggggcggaggcggccccgcttcccccggagtttcagggcggcggcaggggtgcgccccggaatcgggagcgccggcggggctggcggatactggcctccgtcgccatggcccttctgttgacagtagcggccgccgtcccggcagcggagctcccctctcccgagccgccgacgtcagccggggacccgctccccacggtgccgccggagaccacgcctccgggcggagaggaaagccccggcccagtccagacgccggaacccatcacttttttctcggccatgatgaacggatccgagggttttttgcaggtgaccttcccggagccagagaccattgcctcggccaaggtcacccagtttgacaccatcacccagcgtcctttttatgaggatactttcggtgagggcatcccccgggcggacatcgatgccgggctgtataccgctttctatgtggtttatcccccggatttcgacgactactgggcagaggcgggggcggacacctaccccacctttgagatgcgtctgacggtggaacaggtaaatggggaaacggagacctacaccgctgccgacttgggccgatgcccccagctgcggggagagtatgatgaaacaaccaacaccgtgacgatgaaggtctggtgggacgacggggaggacttcccacaggtggtgcccgtcgcgccggagcaggccgagggcgacaccctaagcgtcaccgtctatgtggacggggagcccctgccgccggaggcctatgccctgagccaggtgcgcgaggaatcccagtactccacctcggacaatccagatgtgcttctgacgagatacacctacatcaccgtggccaccgcctccctgccccagcctctggctgcggagtccgccctgagctgcgccgtccacatgaccctctccggccagccttttacctatagtctgcctatcagcactgccccgagggacatctactggtaagtttttatgatgagtaatttgtatcaactgagtccagtgtttcatcggacaaaggcatccgatattggtgtggtcgactccatggcctttgcaaaagcgcatatgcatatgaaaaggcaggtattgccgtcgcaatacctgccctatcggtttattcaagactatcaatatgcagacaagtcatatgcatattatgactggatgtccagagatttcttcaaatatttattggacaatgcagataaagcgtattggctaaaaccaggcagtaatgaacatgtctacaaaaaatacagtttcaagagcgatgctgaaaaagcatataataaatgtttagaagccttagaggactacagtaaagattatacctattgctggcatcaggattggagggaaatatatggaaacaaatttccagaatcatgatataaagctctataatcaaatagaagaagcctatggaaaagttgtatattcatatactactcaagtaatccatgcggcaagattgtacaagaaatatacggcattaaaatggttgcagttaatcctttctgcggtatcggctggtggttttattggtacgctaattactaaccaaattttgctgacttgggtaggcggtgtttgctcaacatttttgttaattctaactgcgtactttaaggatactgatttgtctgctattcataaactacacttagagacatccaacaagttgtggttactcagagaactatatctatccttacttacagatttttccacactttcaagagaaaaaattgtagttagacgagatgagcttcaagagcgtacagcagaaatatatgcctcggcgccgttgacagacaataaaagctactctttggcacaaaaggcattgaaagataatgaatcgcagtttttctccagagaagaattaaaccaaatgcttcctgaaacattaagaaggccgctgagcaatcaataagtatctgtttgtttcgtggaacaccatggcaacaaaaactcagatagcctctactatctgaacaattgaaataatgccaatactctgaactaaatcccataagcaaatctgtttagaaaacttctgacaggagcctatcggcagtattcctgattcagccgtgtaagcttgacccggtctgtaagcagctgctccttatcatcagaagcttcatccatcaagacccgccgcttccgggtgcggattttcctcttgatccggttctggtattctaacaatttgctaacaatgattgttagaatgttagaataatgattagaaagccgggctttgtaccgctttgttgcaacaaaatagaagtcagttgtaataaatgtcagcaaatattcgaagtatacttacaaatctgcgacatcattggctgctattacaagaatcaacaattccacgtgggctctaactgaaggggcaatgatttctgcaaacacaaggggagcattttccgattcagaaaatgctccccttgttctatctttcagcccttcttcctggggcttctcggttttggtgccaccgctccgatcatggcataatgtttcttgctcttgcgggtgatgttgttgtactcctcagaggtgaggaagtccaggagccaggccttaggaaccatataccggttacaaatcataaaggattttacccttttttcggtacaccaccgggaaaccgtatgcacccgatagccggtgatttgggcgatctgacttacggtcaggacatcggggtaacctttggtcgtctttttcaggtagctgtgcagtttctgctgtgagatggctgcgtagttgagagaatggatcagggaggtagccggcggtttacgctgggggtagttcttgtaccagtcgctgggcggggtgtaatactccggctcggtgagacggcgcagcaggtaggccgccacatctgccttggagattttgtagcaccgagtctttttcccgttgttttcgcaggggaccagtccgctctccagcaggtagatggaggtgcgggttccgatgtgacaggctttccggaagtcggtgcggctcatggggtcaggccaaggagccaagagctcctgaatttgctgttccagcagggtctgcgctgtatttttctttttcatgttcaggttctccttataaaatattgggacccggaaaacctttaattttcagccatattttactatttgtatatttcatatttaataatacagaaaatcctctttaaatcttgcatttgggaacagtgaccttcgggcggggtcgcaaaaaaccagcagccataagggaaaacgggcctgaattatcttgcatgaaatcttgcatttttccaaaaaaatgtgccaaatctccccaaaagaggcatttcccatttcattcgtacccacgccattttttgctttttccctgcggaatggctctgtatatcgtccaaaattcagggacaaactgacccgctctgacctgcttttttctggaaagtccttttcggcacaggactcgaaatcgttttgtctagagataggcacgtgggttcgaatcccaccgtctccgccaccagactgagtctggacgcaattcgcgttccaggctctttttctttgcccaaatgaccggctcgcgtcccagccgctccaaactgaccgggttagccaaaaaatcccgaatgcatctgcatacgggattttttcgtttcatttttcacttttcgtcctttatctgcactccccctgtgttcagccactccaccagaacgactgtgagaatccggccgtccacatccaggctgcagctatggcagcagagaaagtaagtcctgtcgaaaagagaaggccatcattactggaatattcattatcctaaaggaatcagggtaattttggaaatcatatcaatagagtttggtaacttactttgataaaattagtttcaggaggaggtatcatgatgaaagtaaccataaataaggaaaacatttcctctttgctctttctggtatgcgcacttacatttctatccatctatggaggcatgatggcattctctccttatgagcctttctccataggaatgatcattatcatcgccagtgccattattggatttttgattacatgcgccctgtccgcttatggctgccctgaacggaagcccttttatatcggattctttttcggtcttgtaccggcccatgtcatttcactgattataggcgctgccatactgggtttcctgctggggaatacagattttttctcctatataccagtatggggcgtctgcatttttctcggttccgctttttggggccttgcggctgttcctatctgcgctgtcttccgccggatatttgcacagcggtgaaaaggggttcctcaagggtatcgaccacagctatgaatacgagggatacaccgctttccgggccgaggagctgtaaaatctcaggacgctttttcacccgccagccactccaccaaagcggctttgagaatccgatagccccggcctgcccggacagccggaagcgctccaggctctttttgtttgcaaaagtttggctgtatagccagacagtccaatcggtttgcccctgccagatcgaaaagccgttccaggcagggcccttgaattccacatacgctcctgctaaaatttaagcagagaagcaaaacaccttaccaaacaaatccagaatcatgacggagggtcagctatgcgtttcaagaatcaggaactccttacatccgcaatcctctatctgtttccctggaccggcagcctgttcggcggctggtatctggtcgaaggcatcctgccgtcccatcgctatgaaatccccgctgccgtcctcacccttctctgggcctatggggcttatccgctctactgccgcatcgccgcccggaatggccttgacccggtgcgcatgaccgccttttatatctgcccgggcgtcctcggcgtgatgatggcctcggtctggctgttcgcccgactgcctttcctgaacgctctcttttctgtcctgccgccgttcctttccctgatcttctgcatcactctcggcagtctttgctggtttgccccagtggccctgttcgtcagccgccggaccgcgtccccaaaggactgacccccctttctgagaacacctctgcctccttatctgccgccatattcctacaaaataaaaaggccgctggtcagcggtctttttctcactttatcttttttcgctccacacccacagagtttcgccccaatccacactgtccggcgagtcaaaaccgcacgccaccgtgtacccgggctcaggtgtgatgatcagccgggcgccgccttcaccgtgaaggggttcttcggtcacagaggcaatcccctctgcctcagcgcagactgtaaggaactccgctgacaggcccggctctaccttcggcagcaggatctcccccggctccccgggctggaaaacctccggcagcaccacttcagtacttctggggtatccttcccagccggtggtcccggtcaccgcaaagcggagggcaatcctcccatcggtcacctcacagtccccgaagcggtgcgggtactccaccgaatcccccaccatgccgtaccgccccggggcacagagactgttttcggcggtgacttcccccgcagtcagggagtaatccacgctgtccgcaaaggtgcgggtatagtactcacttccatcaaagacaattccgtcggtaaagaaaatccgcaccactgccgggtcggcagtttcctgaatctcccgaatgctgagccgctgccagcagcccagatccaccagtgaaaactccccggttttctggttctccgccaggatcaccgacccgatctgatgggggccgtaccagtgattggcccagtacaggactgtatcccccagtctgcagcagctgtacccgtccgcaaaaaccgggccattcaggagatcctgtccgcccagctcctgcaaggcgctgtccagctgtccggcggtggaggaaaaatcccccgctggctctcccacgcacccggcgcagatcagcaccgccgccagaatcgccaggcccagccgcatattccgcgtcatcgtccccgcccccattctctggctccagtatagcagaaaccctccccataaaaaagaccgtcccccgggaagttccggaggacggtccgcagaagagaggatttatggaaaaagtcagctgtgaatcacagcctgtactttccggcgaacaatcagcgccatgacaaaggccacagcggaaatggcacaggcagccaggaaggccatggagtaatccccgaaggtgctgagcttgacggtgatctgcggacaccccgcctgccccctgacccccgcttccctgacagacagcccgccggaaatgtccccggcaggctgtttttgtctgcgcactccgtggagggtgctgtcccctgccccgggagaatccctccgcaccctccctctcccaccagctttcttgacaggggttgggcgggaatcctataatgaaggcatccggagcgttgccataggggattctgtgcgcctgatgcgggcagaaagcgcatctgcgtccccaggagaaaggagctgctatgatgaaacatcggatttccgcatttctactggctgtcctgctggctgtgactgccgcgggctgttccgcccaggagccggaggattccgccggactgccggagagcagtgccggaaccgccgtgcgttccgaagccttctatcccgccgaagccggatacaccgactatgacggctcgccggtccagggctggtcgggctggaacgctgacggcaccttcaccttccagaaccgcaataccctcaccaccctgagccgggagaatcaggtgctggaggccatcaccctgccagaggaagctctcccgggcagcgaatactccctggaccggagcgacgactatattctggctctcagcaatcccgccggcatgaatgaaccctttggcgttgtctattataccgacagcggaacggtctgccttgccaacctcactctttttgaccggcaggggaatccggtccggcaatacccccgcagccaggtctatgcctatgacgaaaacgatcagaagatctgtctgctgccctgtcctgaaggagaggaagttgccgaggtctatgggctcggcggcgcaatgcccatctactggctggacggacataccgccattttcgattgtcattccttcattatcttctatgactttgcagccgattccgggcaggtcctggacgatatgagcgaaatagtcaaacattacggcaagttcggtgtctactatggaagtcagatgggcggtgttgtggatggtacctattactatctcacccggcgggagagcgatcccatctccgggtataccctctgggcagcggatgccgatggcgcccgggagctgctggacgggcagcggttctggcacctgttcgcggcgaaggacggcctggtgctggtggacgacatcaaccccgccgtcccggaatcggacagccgggtctggtatctccccaccggcagtacccagctcaccctggtctggagcggcgatctgtcccttccctttactgaagcggatcagattgccttcatcagctgggcctggtcgctggacagcagtgtcctttacagctatgaccctgtcaccggcactctctcctcccgggatctgggggagtgcatccagataaacagcctctttaccctggtgcgggacggttccctgcggtactactactcgcagtccaaggacggggaacgcaccagccgggtctatgataccacgaccgataccaccacgcccctcacccgctttgacgggggtctgtatgtctcatggctgagcccggacgggcactactgggccgaacaggacccatccacagacgatccccggctgcaggtgagccgctgggagtactgagcgaaaaatccaccccctgcgcaaaaaggccctccggcttctgccggagggctgtttttaactgtcccgggaatcccatcctccgggcatcaaaaaagagcgaagccggctggctccgctctttattctttatggggcagggatttacttcatctcaatgagctcatattcccggctgccgatgccgatcttctccgcatgggccagacaggtcttgtactccgattcgggagtggagttctcaaagtgatcgtgatgatcgcagaagccctccttgtgcatattgtcgtagagctggctgcccggcagcggctgctgacgcaggcaggcatccacacaggcctgatccagagccagcgggtcgaaggagcagaacataccgatatccggcaggatgggggcgtcattctccgcatgacagtcgcagttcggggagatgtccatgaccagcgagatatggaagcccgggcgtccgtcgatgactgccttggtatactctgccatacggcagttgagttccttggtggcagcgtcattggcaaaggcaatggcatcgaagttgcaggcgccgaca

SEQ ID NO: 712 - DNA, 3503 bp, Unknown
  16S sequences of unknown bacteria
ccgaattccacagccagctttttaaaatcgtcggctgttatggactgaagctttgtctttgccatggaacggattttaacaagaatttcggccgccttttccaccgtgtgcataaggccgaaggtcaaatcgaaatcctctcccgaggcgaaggttccgtgatgggcccaaacggccacatcatatttttccataagctttgcggtggccacggcaatatctctgccgcccggcaccatccagggcacaacgcccactccgtcggggaaaacgacggggcattcggtggccgactcccaaagctcgcgggtgaagatcttatcgtcgagaggaagcacgaatgtcagagcaatgacatttgtggtgtgtgcatggtatataacgcggtggcgtccctttgtcagcctttttttgacctcgtggttcataaggtgggtgggaagctcgctcgtggggcggccgccgtctttaagtccccagcatattctgtatttttctccgctgccgtcgatttcgatgacggcgatgtttgctgccgggtccaaaattacgttgcggaaatattttccgcttcccgtcacgaggaaaaactcacccgaaaggtcgggaaccgaggtgccgatttccttccattctcccgtaaaaacaaggtcggattttatttcctcaacttcttccggttttatgcggtaggaaagatttcctccgttgcgttcgtgccagccctgctgccggccgtcgtcggccattcttataaatcctttaaaaaattccgcattttcgatagacattatttgcgctcctctaaaacctttttctcataatcaagcatttcttttatccagtcgtcctttgcgggaacaccgtgctttttgcagtagaagttccacacatctcccgcaggatacattttaagctcctcaccgagagccataagctcggtgaaacgccgctcgttctgcagctttttcatataatcgttcggggtgagaagagcaagaagcagagccttttgcatatttctcatgccgaccacccatgccgaaatgcggtttatgcttgcgtcgaaaaagtcgagcgcgagaatgaccctttcgggaccgcaatttactatttcctttgcgatttccttggtgtcgtcgtttaaaagcaccacatgatcgctgtcccatcttaccgggcgggaaacgtgaagggctaccttgtcggagaaaagcagcatcgaggaaattttgtcggcaacctgttcggtggggtgaaaatgaccgttgtcaagcaggcagagaatgtcgttctttgcggcatagttcatgtaaaattcatgagagccgacggtgtagctttcaaaaccgatgccgaaaacttttgactccaccgtcacaatgaccttttccttgtcatagggtgtggcaagaatttcatccaaggattttttcagacgggctctgggcgccgtgcggtcggcgggaatatccttaaatccgtcgggaatccaatagtttatgctgcagggcttgccaagctccgttgcgaaatactcggcaattttaagacaggcgatgccgtgccttacccaaaatttgcgtatgctttcgtcctcgctcgagagggtggccttttccgaaagcggatgggagaaaaaggagggattgaaatcaagtcccaaatctctttgcttggcatattccacccattttttgaagtgtttgggttcaagggcgtctctgtccgcggtttctccgtcctcaaatatggcatagatcgcatgaagatttaagcggtgcttgccgggaatgagggaaaaggccttgtcaagatcggccataagctgttccgggccgaaggccttgccgggataattacccgtggtctgaattccgccgctgagggaggccttgccttcaaatcccacaaggtcgtcgccctgccagcagtgcatcgagacgggaatacggtcgagcaattcaattgccttgtcggtgtccacgcctaccgcggcatacatctccttggcggaggcgtatctttcgtctatgttcattttcaattctcctttaaggaatatttttttatgtcgaaggagtttgctatacactctcttgcggcggcgagattttcaagctcgccgagagctataaactgaacggtcaggttgcctatcgcggttgcctccttcggacccgcaagcacgtcgcggcccgaatatatggcggtcaaacggttgagatatgggtcccccgagccgccgcccacaatgtttacggcggcgaattttttgcccgtcagctcctcaagctgagccgccgtttcggcatagcagcgggcaagactgttataaatgactgcggtgacgtctccgggattttgcggcacgtcctgtcccgattcgcggcaggcgtcgacaacggccttcatcatgctttccggctttaaaaagcggctgtcgttgcagtcgacaatggatgcaatggcggattttgaggcggcctcgcaaagatcgtcaaaggaaaatctgtcgtgaagctcctttttgaccgactgaatcatccaaagtcccataatatttttaagaaaacggtagcggtaaaggtatccgccctcgtttgtgaagtttgcggctctgcactcctcggtgcagtcggaggagtcgttttcggttcccataagcgaccatgttcccgagcttatgtaaagaatgtcgggctcgagagagggaacagcaataactgccgagccggtatcgtgggttgcgggaagcacgaccttgcagctaaagccgaccttttcggcaatgtcctcggtcagctcgcctatcaccgtgccgggaacccttatgtcgcggaaaagccgctcgggaaggccgatgcggtttattaaatcgtaatcccaatttcgggtcacggggcttacaagctgagtggtggtggcgttggtatattcggtgaatttttcgccgcaaagacggaaattcagataatcgggtataagcaaaatactgtcggcagcgtcaagctgctcggggtggcgctcccttaaatatgtaagctgataaatggtgttgaaaagctgcttttgaattcccgtgcgggcataaagctcctgttcggaaacatattgcgaaagcaccttgtccatgccgtctgttcggccgtcgcggtaggaaacggcttgtccgacgggatttccttcgccgtcgacgagcacaaagtcgaccgcccaggtgtcgattccgattgttctcggaattttgcccgcgtcgccgcattttttcattccgacaattatttcgtcgaaaagatgctcgatgtcccagcaaaaatgcccgcccatgttttcaataccgtttttaaagcggtgaatttcctcggtaaacatttttccgttttcaatgtgaccgaggatgagacggccgctgctggcgccgatgtccaccgcaagggagtattcagacatattttcactcctaattattcacgcttcgggagtgcctaagcacagaattg

SEQ ID NO: 713 - DNA, 19466 bp, Unknown
  16S sequences of unknown bacteria
tttgttactttgttaattcttttttgctgttctcgctgacagcttgattataatatcagatgttcaagcatttgtcaagaacttttttatctatttttttggcggagaaggtgggatttgaacccacgcaccgctattaacggtctactccctttccaggggagccccttcaaccacttgggtacttctccacaaggctctcactgaaaaaaatgataaaaatggcggagagggtgggattcgaacccacggcccctttcggagtcactggttttcaagaccagctccttaaaccactcggacacctctccacagattttctttagttttgccgctcacgtgtgccgtgaacaatagatataatacacaagtcttttatgtttgtcaacactttttttcattttcttgtaatttttttcacacagccttaacacagcctttattatagccgttccggggtaaaaaaatactccgccaaatcaggcggagctactgataataaacttatttaatttagaaatagaatgcacataacagcataaatataaaaaggattacgtcaatgggtctgaattttacattatcgatttttctctctttactcataataattcccctttctacatgcacctgattttgtcggatccccaaacctataaatatcatactttaaccgctaactaaactttacattatgttcatttatttagacaattctttgaactgtcaaaaaatataatggttctaccaattggtaataccattatataatttatattatcgttttgtcaatgttcttttaaccaaaattattatttcagcgttatttataaattcaatccgtattgactgttgtttaagtatcttttccggcaatacatacaattattcttgaccttcatcctatttctataccgatttcaaaatttattttactttccttggctctaagcccttttttctttatataccttattacatttgcactaaagatttattgatattcattataaaaagttcttcacacacactaaaaaaccgccctgtcttttaacagagcggttaactatctcatattagaaatagaacgcacacagaagtgtgaatattaagagaagtatatgaactatactcattttgtatttatcgttgtcagccatatcgatatctcctttccttatctccgaatattacatataatatccggggaagaatacaaatacataaagcattgctgctatcatttcaccaatcataagtattgcaagagcaggaataacctttctcatgataataccttcctgattctggaaattaacagtggcacaaacagcgataacgttgttaggacaaatcatgttaccgagagctccacctgatgagttaagagctgtacagtaagcagggctgattccgagaatctgagctgcttcgatatgcataggatggaacatgatgtttgatccaagcgttgtacctgtcataaatgatccaagacatccgatgaatactgccgctgcagggtatccgtttcctacaacgtctgcaagtgctttcgcaaggattgaaagcatacctgctgatttcatagcctctgccatacctgaaaggaatgccattgctataagggcgccgataacgctcttgaatgaaactgccacacacttatggaaattctttgtataaccgagcacaatagagccgataaagcatacgccgagaattgtagtaccgatccatactgcgaaacctctcttgaagagccatgttccgtcaatgctgaaacgcataacaggaagagcaataagaagaagtacgtatgtaaatacagctttccatgcaggcatgtcgctcttcgtctcaggaggagctgttacgaattccgcaggagtagcaggtttagcagccttgaggtaaataaagtttgctgcaactattatgatacctgaaataatagatgtaaattcgaagccgattgtatgtgttacaagaagcatagcacctgctccgacaacactgttaactaaaaggaaaggaacaagtcctttgaagccttttttgccatagcaaacagctgtgataacccaagggcaaagtaaagctcccactgcgttaactcttgctgtagccattgagagcatattgtatatctctgttacagacatattatcaagtgcaggccagctatatgtagctcctcttcctgcctgaaccatagcttcgaaaccgcccgaacatgtaagtccggcagctccccatgatgaccagataccgttagcgataagtgatccgagaactgctgatacagggcttattccaagacccataagcaaaggcgcgcaaactgcagcaggtgttccggcaccggcacacccctcaaggaaagctccgaaaccgaaagcaactattataacgtgtttacgtttgtcatctgtaaggctgatgataagttctttaatcttatccatagctcctgtgtcaagaagcatgttaagaatacagaaagcagccatgatcatgtaaacaacttttgttccggcaacaacgcctttccaagcgtccattccgagaacatcgattcctacgccaaagtagaacataccgataaggaaagtaactacaaacgcaataggagcaacaatactcgaaggcttgttgagcacaatgataccgataagaactataagaataggtaccaatgagagaataatatccatgaataattcctccttaaataaaactttatatcgtccagttttttcaaatgccttccccaaagcatatattatgaaaaaacactcttgaacaacaatacgtctttctgctccccgacaaaacatattaacattttgttgttcatatatttatcttttcttcaggattaaagaaaagaccgcctacaacatagtatcagttcacagcaaaggtgattttattcatccgatgttatggaattgtcaaagtacacttcaaaaagagtttatcatctctttctttcacgttttttattataatggcttttgtaaattaatacaagcaatttttatatgaacccaaataatcatataaagtgcagtaaataacagagataaaacccttaaattattatatatttttcacattattacaaagcggtgtcaagtgtataatttgttaatagtggtgattatcttgtataatcataataacgtcatattaccacatacaaggtatgtggtataatacaatatataattaaaaggaggtatttacatgttaaatattatggacagatttttaaaatatgtaaatatatgcactacatcagatgaaaattcaaactcatttcccagttctccgtttcagttggctttcggtgaagctctcgccgaagagtgtaaagaaataggacttaaagaagtcagcgttgatcattacggttatgtaagtgcctttcttccgtcaaatacgtcaaagagggttccgtccgtttgttttatagcgcacatggacacaagccccgatgcttccggcttcaatatcagaccgataataacggaaaattacgacggtggaattataaaacttaaaaaccgtgaacttaaccccgacgaattcccgtctctcaaaaattatatcggcgatactataatatcgtcagacggaactactctgctcggcgctgatgataaggccggaatagccgaaataataaccgcaatggaatatattataaaaaataatatcgttcacggcgatataaaaattctgttcacccccgatgaagaaatcggcaaaggcgtcgattatttggatgtagacagccttaaatccgatttcggttttaccatggacggcggtgaaatcggcgaacttgaatacgaaaatttcaacgcctcatcggctgaaattacaataaaaggcaaaagtgtacacccgggtactgcgaagggtgttatgcagaatgcagctcttattgctgcggaatttgtttctcttatgcccgatgaaacgcctgccaacaccgaaggatatgaaggattttatcaccttgcaggcataagcggaggtgtttccgaggctaaattatactatataataagagatttcgacagcgaaggctttaacgcaagaaataaaaaaatccaatccgtaaccgatataataaattcaaaatacggaaatatcgcatcatgtgaaataagagagcagtacagaaacatgcgtgaaataatagaaaataatatggatataataaaactggcagaaaaatcaatggaggactgcggtatcattccgaaaatccaacccatacgcggcggcacagacggagccagactttcttttatgggtctgccatgccctaatatttttgccggaggccataatttccatggaccttatgaatttattccgttaaattccatgataaaagcctgcgaacttattgttaaaatatccgagaatataaccaatgctgactaatttgaaaaaaattgttttttaaaacagacattttttatacttgatttataaatagaactatgttagaataaccccagtttcatatttggcaatgacggagacaaatttcagtctttaccggttacaatcagcagagagtatgcgtttggtgcgagcatacagcacggtaacagatgacctacatctcaagagccttggaaaaccacggtttatgcccgttacagcatataaaggcgttgattgacgcaaattaaggtggtaccacgaacgagttctcgtccttttcggaagagaactcttttttattactaaaaattttttattaaacataaaggagtgtaaacgatggaaaatgcttttgaagtattaaaagaacgtgggttcatcgagcagatgactcatcccgaagaaatcgaacagttatttaaaaatgagaagataactttttatataggttttgaccctactgccgacagccttcatgtaggacactttctcacagttatggcaatgagccacatgcagagatgcggacaccgtcctatatgccttatgggcggcggtaccggtatggtcggcgatcctacgggaaagacagatatgagaagaatgatgacagttgatgaaatagaccataacgtcaactgtttcaaaaaacagctttcgaggttcattgatttttccgatgacaaagcgataatagtaaacaacggagattggctcagaaatcttaattacatcgaatttttaagagaaatcggttccgtattctcggtaaataaaatgcttacggctgaatgtttcaagacaagaatggaaaaaggtctttcattcctcgagtttaactacatgataatgcagagttatgacttccttgaactgaataagcgttacggatgtgttatgcagttaggcggaaacgatcagtggtcaaatatactcggcggcgtagaccttatcagaagaaaagaaaataagcctgcttacggtatgacattccagcttcttacaaacagcgaaggcaaaaaaatgggcaaaaccgaaaaaggcgccgtatggcttgatcccgaaaaaacttctccttatgagttttaccagtactggagaaacgtaggcgataaagacgttgaaaaatgtctccgtctcctcacattccttcctatggacgaagtaagaagactcggcgctcttgaaggaagcgaaataaataaagcaaaagaagttcttgcatacgagcttacaaagattgttcacggcgaagaggaagctaaaaaagccgatgttgcggcaaaggcccttttcatgggcggaagcgatggaggttccatacctactacggaagttgcttcggcagaccttgaaaatatggacattctctccgctcttgttactacaaaacttactccttcacgttccgaggcaagacgtgccgttcagcagggcggagtaaaagtaaatgacgaaaaaataagcgatgtagatttcaaaataacagaagacttatttaaagacggcatagttactctccagagaggtaaaaaatcattccacagacttaaacttgtttaaacatacaaaaaccgctgaaaataattttcagcggttttttatgcccttgggtgagatttattatatacttctttcaacttgtttctgttaagccttacatacatctgcgtcgtagctatatccgaatgtcccatcatttcctgtaccgactgtatatcggctccgttttctatcaagtgtaccgcaaacgaatgtcgaagcatgtgcggagtaatatcggtctttatccctgcgtttgaggcatatatttttattatcttccaaaagccctgccttgtcatcggcgaaccaaaacagttcacaaacaaagtgtcttctttttcgtccttaaccaaagaaaatcttgctctgctcaaatactgcgatacagcttcgattgccttggaacccaacggtattattcttgtctttcccgaggatttacagtttaaatattccatatcaaggtttacgtcggcaactttaagtgaaatcaattcgcttacgcgtatacccgtagcatacataacctccagcatagccttgtctctcaaacctttgatttcagataaatcgggctgttccaaaagcatttcgacttcatttgtggaaagtatcaccggaatttttttctctactttaggcgtctccaatccctcggcaggattttcatcaacagcttttattttatccaaatatgaataaaaagctctgattgaagccgcatttcttgacaccgtagacggcgctttatttttcgcttgaagttcatatatatatgtcataatattggttctgtttaccttagtaaaatcctttattccgttttcccccaaaaaacgcgcaaaagaattcagatcccttatatatgagctcttcgtgttttccgacgccccttttaccttcgtcagatattcgctaaactgttctatgagtccgttcataatctacccctcaaaacccattttgttaacattattaactcaattatatgacttttcccacaaaaagtcgatatattttaccatttttccgcaaaaaacaccgttatttcagattttatccaccacatcggtcaaatttatgtttatatcttatataagtatacttctcgctatatatatttcaaatatacaagctgcggaattaacagccaaagcgcacaccaatattatcaaatgttcttttaaatgtttccgccgctccctttttattctgcttttaggaccgtaataagtaaacttgtccagtacaaaattcatcgtccatacagctgtcaatatataaagcggtataagaatggaactttgcggaaatatgcccgataacacgccgcttattccgctttttataactgctatagttgaagaaaatccataaaatattccgctgacaaaaataataattattactataacagctcccgaatatataaatcccgaaagccaaattcccaatatatattttccgtgttttataaaaagatttctaaacccggcgtcagctaagaaccctccggaatattcaccgagtttttgtatctgctctgtttccgtagtcgctgccgaaaaagctcctattatcgccccaataaaaaagcagacgcataccgtaaataatatagtatgccatctgcttgtttttctgcctttcatagagtatccaccgccttcctttttattaataaaatatatggaagcggtacatgctctattacatattatatttgtccttttgcgacaagctccttataggcaaggatgcccattacggtttttgaatcgcgtattgtcccgtcaaatatcatttcaacggcatcttcaagagaatatctttctatttctataaactcgtcctcatcaaggttttgtactcccttttcaaggtctttggcaacataaagatatattctttccgtacacattccaacggaagcatacgtccaatttacataggtaagtcccattgccttatagcctatttcttcttccaattctcttaaagcgcactcataagggtcttcattatcttcaaaagtgccggcaggtatttcaagtatcatatcttttgcagcatgcctgtactgtcttacaaaaattatgtttccgtccttatcaatcggcacgatagccgatgcgttatgcttttctacagtttccctgaccgccgtttttccacccggcattgttatttcgtctttaaacaccttaagtatttttccggaatatacgctctcgctctttacaacatcgtaatccatgtttgatcctccgattatcagaactctgcgttacgcactgttctgggataaggtataacgtctcttatgtttgacatcccggtaatatacattataagtctttcaaatcccagtccgtatcctgcgtgtcttgttcctccgtatttacgaaggtcaagataccaccaatagtcctctctcttaagtccgagttcgtccattctgttttcaagaatttccagtctttcctctctctggcttcctccgattatttcgccgattccgggaacaaggcagtcggcagctgcaactgtctttccgtcatcattaagtctcatatagaacgcctttatttctttcggataatcggttacgaatacgggtttcttatagacctcttccgtaatatatctttcatgctccgtctgaaggtcgcatccccactcaacgggatattcaaatttgtctcctgcttttttgagtatttcaatcgcctctgtatatgaaattctctggaaatcggaatttacaatgttattaagtctgtcaataagtcctttgtcgacaaagttattgaaaaattccatttcttccggtgcgttttcaagtacatagctaattacatacttaagcatatcctcggcattatccatataatcgttaaggtctgcaaaagccatttccggctctatcatccagaactctgccgcatggcgcgtagtatttgagttctcggctctgaatgtcggtccgaatgtgtatacgtctctaaaagcaagcgcgtatgtctctgccgaaagctgtccgctaacagtaagatttgtctgctttccaaagaagtcctttgaatagtctacctttccgtcctcggttaaaggagggtttgacatatcaagcgttgtaacctggaacatttctcctgcgccttcacagtcgcttccggtaattatcggagtatgaacataaacaaatcctctctcctggaagaacttatggattgcataagccgcaaggcttcttactctgaatgtagccgaaaaagtatttgttctcggtcttaaataagctatgcttcttaaaaactcaaaggaatgtctctttttctgaagaggataatcgggagtagtgcgtccttcaacaactatttcctctgcctttatttcaaagggttgttttgcttcgggagtaagtacaagcgtaccctttactataattgcagctcctacgccgagttttgatatttcagtatagttatcgattttatcttcttcaaatactacctgaacgcttttaaaaaacgatccgtcgttaagctctataaatccgaaagcctttgatgaacgaagagttcttatccagcctccgacctctactgttttatccgcaaaatccgctgtgtttctgtaaaactcttttactcttgtcagtttcatctgcaaacacctccaattctcattacttaagttctttcaaaaattcttcaagtttattcatgccttctgttatattctctattgatgttgcataagacaatctgatatggtcaggcataccgaaatccgcacacggaacaactgctataagtttttcatcaagaaggatagcgcctatctgtgcagccgattccaacactatacccttatagctttttccgtatgttccggaaaagtctacaaaaaggtagaatgctccctcgggtttaactgtttttacatatggcatattaacgactctgtcatatatataatcacgtctttttgcaaactgttttctcatatcctcaacacagtcctgagggccttcaattgccgccaacgcagctttctgtgcaatcgaattgggatttgacgtcatgtgagactgcatgcttgacataagctttgcaataggtgcaggcgcagccgcatagcctattctccaacctgtcattgcataactttttgaaaccccgtttattgtaattgttctgtcatatatttccttgttaagagaagctatgcttatatgtttcttatcctctgaataaataagtttttcatatatctcgtcggcaataaccgctatatctttctcaaccgcaaaatcggctatttctctgagctgaccctcatccatcactatacccgtagggttgcttggtgttgttatgatgacagccttagttttatcggaatatcctttttcaagcacctttcttgtcaaagcaaatccttcgttctgatccatatatacaactactggtgttccgcctgccagtctcaccatttccgcatagcttaaccagtaaggcgcgggaataataacttcgtctcccggatttataattgccataagggcatttatcaaagaatgttttgctccgttgcttattactatctgtgtataatcataatcaagaccattgtcttctttaagtttttttgctacggcctttctcagttcaacaatacctgccgcagcggtatatcttgtaaagccggcattaattgcgtcaactgcggctttcttaatatgctccggtgtgtcaaaatcaggttcgcctatgctgaagctgattacattctttccttcgctcctgagtatacctgctttttccgtaatagataatgttgacgatggtttaataccaagcgctttttcagacaatttcatttcgtttcctcctccgtactccaatggataaattgtatactattgtaaatacaaatgcaagccataattatatgagcatatctgttatcctgataaaattggcgaacgctattttttccgttatctcttttccgaactctttttccatggactccaaaacatattctattcgcgcaacattttctataccgtcgggcgtaatcggtatgccgtcgaagtcgcaccccagagcaacggagttctctccgcatatatcaagcatatgttccgtatgtcttatgacatcctctatccctgcttttccactgtcgcttaaaaaatcaacgcacatattaagaccgactataccgcctctttcccctataactctcaactgatcgtccgtcagatttctgggaaaagaacaaattgctcgacaattggaatgtgtggctataaacggtttttccgtatgtttttcaacatcataaaatccctcatcggacaaatgcgatacatcaactatgatacccagtctttccatttcttttacggcttcttttccgaaatccgtaagacctcctccgtaaccgctctccattacgcccgtagcaacgcagtttttatagttccatgtaagggtggcaattcttatacctttatcatacaatattctcaatttttctatgctgccttccaaagcttcacagccttctattgataaaacggctttaatttttttattttttttatgaatatctccgctgtttttgacaatttcggctttttccgaatttatttctatttcctttgtaaaatagtctattatccacgtcgttatatcaaaggcattggtatagtattcttttttaagccatatggcaaatacttgaatcggacttatatatttttcaagcatttttatattgatatgtccgtcggaatcatataaatgaagtttgttttcaaatatataagaagccgtatcacagtgcatgtcggcaaaagttttcataaaatcacctcaaatatttatccgtttatatgtatattaatttatttgcagagcatactatattcagcccgtatacatgaaaattacgagcttataaataattttttaggagatgttaataatgaacagacccggatcacaggaaataaaatgtactgtaaaatcatgccgttaccacgacaaagataagcattgtactcttgccgatatagttgtcggtgaaaacgtagcaaacgcttcggaaaaatgcgaaacagactgtatgagctttgaagctctttaacatctgattaacggcgcggtattattatcgcgccgttttctgttttcatagcacgtcctctaaaatcacttaattatagcatacatttttaaattgtaagtgaagtttagcaatgttataatacattatcaaatataaaaacttcgaggatgagtatatgaaaaaaacaactgtcggcattatatgcgccggtgatgatgaactggctccgttcctgcctatgataacagattgcaatatatcggaaaaagctatgcttaaattttattcgggtaaaatagacgaaaccaccgttacagctttattttccggagtatgcaaggtaaacgcagccgttgcggctcaaatactgattgatacatacaagtgtaatattattataaactccggtacagccggagcggtatcccataatatcaaagtgttagataccgttgtttccacagaaacagcctatcatgatgtgaacaaagatattttgaccgattttcacccatggttaagttccgtatggataaaatccgatgcatttcttacggagttggcaaaaatttcggcaaaaaaattatcttccgatttcaatatagttttcgaaaaaaccgtaacgggggagcattttattaacggagaagaaaaacagagtatcgcaaaaatattcaatccgctgagcgtagatatggaaagcgcagctgttgcccacgtatgctatgtaaataaaataccttttatatcagtcagaacaataacagatgttgccgacagctgtgcggaagaactttttgaacaaaactgtttaaatgcgtcatgcaaatcggctgattttgtaagacttatgttaaacgagcttcataaaaaataaatttatctttaaaacaaaatatggtgtatccgtaacggatacaccattcttttctcaatcatttagcatactctattgctctggtttccctgataagatttacctttatctgtcccggatattccagctcgtcctctattttcttagccacttctctggcaagaagtgtgagtccttcgtcgtttatatcctccggtataaccataatacgtaattctcttcccgcctgaattgcgaaagatttctctactcccttaaagctgtctgcaatttcctcaagtttctgaagtctctttacatacgattcgagagtttcgcgtcttgcgcccggtcttgccgccgatatggcgtcggccgcctggacaagcacagctattatactctgcggctctacgtcgccgtgatgcgcctcaacagcatttataaccaatgaagattctttgtattttctgcacagcccgacacctatgcttacatgcgaaccttccatttcatggtctacgctcttacctatgtcatggagcaaaccggctctcttggcaatagtaacgtcaactcccaactccgctgccataagacctgtaagctgtgcaacttctattgaatgtttaagtacgttctgaccatagcttgttctgtatttaagttttcctaacagacgtataagttcgggatgaagtccgtttactcccgtttcaagagtagccgcctctccttcatctcttattataacttctacttcttttttagctttttcaaccatttcctcaattcttgacggatgaactcgtccgtcaacaataagtttttccagggcaatccttgcgatttcccttcttatgggatcaaatccggaaagaataaccgcctccggagtatcgtctataataaggtcgatacccgttaatgtttccaaagcgcgtatatttcttccctcacggccgataattcgacctttcatctcatcattgggaagctgaacaacagaaaccgttgtctccgcaacatgatccacggcgcaacgctgtatagcgtttgcgataatatccctgcttcgcttttcagcctcgtacttggctttagcttcggcttcttttatcatcaaaatagactcatgtttaacgtcgttctcaaccattgcaagaagataattctttgcttcttccgaagtaaatccggatattctctccaactcctgaagctgcttttcatggagcttttcaacttcttccttttgtttttcaaggtcttccaattttctgttcatctgctcttcgcgcttttcgtaggcgtcagccttgcggtcaagagtttcttccttctgaacaagacgtctctccgttctggaaagctcgtttcttctgtctcttgcttctttttcaagctcattctttgttctgatactctcctcttttgcctccaggagaatttccttcttcttcgcttctgcttctttctttgcgtcttcaactatatcattcgctcttttttcggcaacgcctatttttgcttcggcaatttgctttctatagcagaaaccaataacagcgccaagaattaaagctatcactgcagcaataatggttattggttctattgtaaccaccccctgtttaattttcaaagtacattttaattattataacgtgcataaatgattgtataaaaacttatataatgtgaaaccacatctatataattgtataaccaaccgcaagttatgtcaagaatattgttcttacgttaccgtttcaattaatcacagtgtacgtcgtttccttcaatacagcttaccctgccgctgccgccgcatacgggacagtttttggtcataagctgcattatggactgtcgtttcttttttcttgtcatctgcataaggcccagttcagtcatgccaaccactatagtctgaagcctatcgcctgcaaccgcctcttcaagcgtcttttgaagcagctgcctatcctggctgtacttcatgtctataaaatccactattatcattccgttaaggtttctcagtcttaattggtgtgcaatttcctttgccgcctcaagatttgtctttaatatagttttttgaagatctgcttttccggtatactttcccgtattcacatctattacaacgcacgcttccgtctgctcaattacaaggaaaccgccgcttttcagccatacccttttgttaaacgcctcttttgcctgcgcctcaacatagtatgacgaaaacaacggcgttccgtcgtcatggtatataaccttttttatgtccgtattcagttcttcgcaaagcctgcgcaaagtttcataatcgtcttcggaatttaccactatttcgtcaacatcgtcgtgaaataggtctctcatgaccctttccactccgttggcgtctgtatacagcagtgccggcgcttttatatattccgcctttttcattattccttcgcttatggaaatcagtctttcaaactcatttttatatacgtcatagcttttgccctgaccgtctgttcttataatagctccgtaccccttaggcaggaattcccttacggtatcttttattctctgtctttcctcatcatccgttattttttttgaaattcctattttattgtcattcggtactaaaactataaattttcccggaaatgatatttttttcgtaagcactgcgccttttttgccgacttccgccttttcaacctgaactataacgtcttctcccgctttcggctttattatatttccgttttcgtctttttggtctccgtaataaaggaaagcgtttttttctcttcctatatcgacaaatgccgcctgcatccccggaagaacattaacaatttttcctatataaacatttcctataataggcattgaatttttgcgttcatatatgagttccataagaacgccgtcttccacaattcctatccttgcgccgtaatccagagagtcaaccaatattcttttcacttcatagccacttccttatcaagtggaacaaacttttcgtctgaaaggcgatacatttccgttctgctgaattttattttgtatttattaaactccgctccgataaagtcataaaaagtctgtaccgtcaaatctgctcttaggcttcttatacttcctgccgccaaaacaagcctgattttcgccgtatcgttatcggaaatattctcaatggaatatatgtcaggacgtatatccgtctctttcaagttgttttttgtctttttcattactactatttctttctgcgccataaattcaggcaatttttccgcaaccgtttcaggctttacgttatcgcttaaaatcgcctcatattcgcaagcgcacagatccgccatagccgtaagggcggtctgagacagtcttgtcgctctttttacttcaatcccatcgttcatgaccgaattaagcttttttactatttcctctgtatcctcttcccttgtaaactcaaaatcacagtactctcccgtacttgtcatgccaagcgaaagcggattaccgaaagacataagctgatgcggattaaatccgtgcgaataacctattggcagtcccgctcttcttaccgctctctggaataatctcatcaagtccaaatgactgacaaatcttacctccggtccttttgtatactttattctgtacttaaatcttatttttttctcttgattcaaagcatacacctcctccgaaagccgccgctccgcagtttgaacattgttcacggcagttaggcgtagttatagccatttcggctttttttctttcgtttattaaaaactgtttcgttactcctatggatatgtgatcccacggaagtatctcgtcaaaacttctttttctgttagcatagaaagcagggtctactcctgtttcttcaaacgcttccatccacttgtcaaaaaggaacagctccgaccaggaatcaaatctacagcctttttcccacgctttatatattgccgccgaaactcttctgtctccccttgccattacgccttcaagagagcttaattttgcgtcatggtaattatattttatctgttttcttgaaatatgagatttaacgattttcgctttctccgcaaactcctgataggtatcctgagcgtcccactggaaaggcgtaaacggtttcggaacaaaacaagaactgcttgcgacaaccgttacaggtcttggctttttgtccctgggtatttcgtaatacttgtccacaacttttgccgaaagatccgcaattcctataagatcctcttctgtttccgtaggaagtcctatcataaaatagagttttactctctcccatgaacccgaaaatgccaacgcacatccgttcaaaatgtcttcttccgtaagatttttgttaattacgtttctcagcctctgcgtccccgcttccgccgcaaatgtaagactgctttttcttacttcctgtattttttccattaagtccagtgaaaacgagtctatacgaagcgatggaagcgaaaggttaactttatcctttgaaaaatcatcaagcagaccgtttgccaagtcatggaaacatgtataatcgcttgtgctgagagatacaagcgatatttcatcatctcccgaggcgtcaattagggaatgagcctgtttaataagagtttgatattctttttcccttacaggtctgtatacaaatcctgcctggcaaaaacggcagcctcttatgcagcctctgaacaattccagagttactctgtcatgtaccgtttcaataagcggaactatcatcttgggcggatagtacaccttatccatatccgtaactattacctttttaatagttttaggagctttagggtcattcggttcaaacgaagcgatttccccgttttccttatactttacatcataatatttcgggacatacataccgggtacatcaagcagcttatataaaaattcgtctcttgtgccgccgttcttcttatgctccttgtacatttccattatattgtcatactcagcttctccttcgccgagataaaagaaatctacaaaatctgcaagcggttcaggattgtaggcacacgaacctccgcacaatattattggatcatcttcgcctctgtctttggaataaacaggtattcctgacatatccagcatatttataagatttgtataacacatttcgtactgtaaagtaaatccgacaaagtcaaattctttcagcggagtatatgtttccagagagtaaatcggtatattattgtctctcatagctttttccatatccgtccatggtgcaaacgccctctcgcagtacgtatcatcacgcctgtttaaaaagaagtataatatttgcagtcccagacacgacattccgacctcgtatacgtcgggaaagcaaaatgcaaaccttatgtcaacgctttcggggtctttttttaccatattcagttcattacctatatatctggcaggcttttcaacctgcatcaaaatttcatcgggaacagtaatcctactcatgatctcctccgtttaaatttttaaatacagcatagttattcattttatataataacttatatctctctcaattgcacgaactttttctttctttttattttgctcaggctaataggttatagcattgtcagttccgccatgcgttgaacagaccccaaaaatatgataaagtaaataaaaaaggaatatgattgcaaaaattattttttgtggagtgggagttctcatgaaacgtaagacagttatattaaccgttgcggcaattctgttagtcggcatcactttttggtataacgccccgattgacttgataaatttaaatcacaatgatgtaatggaaattgttgtctttaacggcaacagcggaaatacaacgcatattaccgacaaagagcaggttcagcatattgtagaaaatttaaatgacattgaaataaagagagcaaaaccgtctgtcggttattgcggttatagtttcaaattaactttttatctgtctgacggcagtgaagcagatgattggaataactttattattaattcagacgatactatcagaaaagacccgtttttctattctgtaacaaaaggtaaaatcgattatacctatatcaagaatatcaccgaataatgcgtgttaattttcgcagattactttcgttttatcaaacagcttctgttttcccatatacatcatcctaccgatttggtaaaaacggattattttacagaaatcagtaccaacacaaaaataaataacttatcggatttatataatatttgtcaaacacataaagacttccgcagtatttctgtggaagtctcagattatagacaaacagattttaggttagcggaagggttcgggaaacagctccgtttcccg

SEQ ID NO: 714 - DNA, 5167 bp, Unknown
  16S sequences of unknown bacteria
acatcttgcaaatgacagcgtgacaatccgtactggttcagcctgtctattaattctgtcacttcttccttattcggtgacacatcttggacagacacttcatcacatttaatgccgtatgtggtctttaccgctccatcaatattctttttgtcttgcgtaattgtatacatagttatatcttagtcctttcttcccctatgctatataatacaacatatgccacttaattacaatattgtttgatattttgtaaataaattgtaaatcgcaagtaaaaaaataagggtggcaattgccacccttattttcaattataaaattcatcaatgagaatttacagaattgcgtaatgtgtttttaaatcattaaaataactatactttatatagttttctttttgtaatctaccaactacaattccaggatccaccccaatttcttttgcaaagttaagaatatcatttttataaaatctatttgcgtttataaaatcgacaaatttatttggtggaatgagtatatctcttgcaaaaatatctgcagctttttcttcttccacacttgttcttccttgtgtatttatatgtccttcaataatatggtacacttcatgaaataagctgaaccaaaacttatccgcatcttttcctcttacagttaaccctaatacaatatgtttattatccacgaacgatgccccatgcaaaaaagaaccacctatatgaggcaaaaaaactattgcaattccacatgaagctaatagcaatctcagtcttccacaaaaaacatctggttttagtattgtcatttgtctaattgcctccaccgagttttctaatttttttatatttatagagtctgtttctatctttcttgcttctatttttgctttttgtgaccaagctgccaaagcataatcacttgttgaattttccccattagtcctataagctattcctggtatagataaatcatctaatatatttagctttgcgacctcaaaaaaatttctcaaagcttttgttttttcttctattgttcgagcctttggtacccattccaactgcgccatcttagaatatggaaatttcttcgttatttcttcgtcgttttctaaagccaattcatgttcaactcttactaatttttcgcgatagattctttctaaattactccaaaaacttgctgggataccaaaaacatcttctaaccttaaagccatttctatggtaagttctactttaccattaattaaattgctaatgtgcttttcagacatatccattctttgagcaaattctttttgtgtcattcctctattttctaattgctcacgtatggtttcacctgggggaatagctataaaatttttactacaaatcatgttactacctccttttattacaccttgctaatgataatctttgatttccattattgttgcaatttgtacagttccattttctacagtaaaaatcaacctatatggatgaactaaatccatagcatactcaccttgtctatttccgtttaatggatggcatcttcctatttcacattttacaaggtattctactgcatctattgctctaatttcgccaattctttgcgcaatcttacttgccatatctcttccgtaactacacacagctgttttgtaattttcacatgttttttccaacttttttgtcctatagttaatttccagtgatgacaccccctgtttacctcataggtcaattatattgtagcacattttattacttttgtcaatattctttacccacgagtaaaccataatatattttagaatcattcactgtatatagtattctactctaataatttttcatacaatccgcagcggtattccctacagattgcccttaagtctttataagacagtccaagacgaccgttttcatcaccttgtaccgcaccgtaatccatagccgcttgcacggcttttcttgcccaatcgggcatattgtcgtccacataatcgtaaatcattgttgtttgtactacagcgaccaactgtctgttgacatcttgtaaatcagcgatttttgccgcttgtgcgttaattaaatcttttagttcattgtactgtgacatagttaattcctcacttcctgttaatcgtcttttaaaatcttcccacagctccggctgacgtacgaatggctcgggacacttcttgtcccacacatcgtagtgtcgcaacacgttttctactggcacaccgtatttattcatcaaataccgtgttaatttaatcgtctgttccaccacgtcatcatcgatataatatttaccgtccgcaccaatacgactgcacatttcaatcgaaatactgttcatattcctgcaatacgggtgtttgtaaatttttgtaccaccgaccgcccacgccgcccatttatcgggtacagattgatatataccgtcatcaccgataaaataatgtgcagacgcaccacgatttgcaccgctgaaataattgcagttgttcaatgccgtatcgccgttatttgacgtaaaatgaatgacgatatatttaatatcgacattcctgtatgtgtagcaattagacgtgtggcactgcggaccctgtttgatttgaatatccatacttattcctccgtatcatcttcgccacgtaattgcaacaatatatctttcaacttttgtggcatgcttggatatatcactgccacattttccaacacgcttataccctcattggctatgtagaacataatcacaatctcacgaattgccacgttatcgcctgtgacctgttgcaaaacgttcgacagtgcaactataatcagtatagttatcttttttagcaatcctttaaatcctatctcgcttgacattgttttcgtgtaaatcgccttgataatacccgtcaaatagtccaacaccattatcactaacaacgcccacaggatgctgtcccacttaccgaatagggcggcaaaaaaaccacccacaattcctataaccgtacttgtccaattaaaaatcttgtccataaattattcctccatcatttgcattaattctttgtattcatcgtcagtaatacgttctgcaagaagaaacacgtcaagtttatccttcatcgaattcttatcatatctaccgcttgcaattatttttttacaatatccgtatgtcatgataaatccctcctatattcccaattctaattttgataatctgtaatcggtatcaattttgaaatcatccgtagcctccggcaaggaagccttgtaagcctcgatactgccgtaatttactatttcaaggatttctttgttctcgtcgcttgtacgaagtttaatcccctccgcccaagcataatttgaaacatcaataattgtctttgatattttttcaagtagctgatgttttggaatgacgttgttctcaagttcatatgccgcttcttcgtttaagtagtagtcaacatcagtataactatccttttttaaagaatcgtagtgcctaacaacaatgcaatacttgttaatgccgattgacctgtcttccgtaacataaaataatcgtatatccatactatacctctctttaataatttacacttaaattatacgcgttgttttgagtgactgtatttcgtacagccagcgttcctttatagttattgcacagaacattcaagcttccttttgaagcagcgtcaatataccacgttccgcttgctccgccatgaaagaaattaccggtaatacttgcagagcatggattatataagtagcacgcaacggaatttgactgatactcgttcaatttcaaaaatttattaccggttatcgttgcacagcgcaaatatacataatacgcacaatacacagtatttgcattaaatactccgcctacttctgtaatgcttgtattgtagtgatatatcctcgaattgcttgagtgtaaataaatcacattacccgtaatatttatagctcccgaattaactatgctgctttttccgctacaatgtataatactatttgatatatatcccgtcattgctaaatatgcaaaattcaactcgaaagaagtgctgttactattattgaacaaattaatttcactatcatccactttaagtactccgcaattaattccggaaaaacaatttgatgatgtacttaatgtttttatagtcatagtgcttcctcttagtacaaagcacccttgttgcaattctcctgacgaaccccctccggggtcttctcctgtatattgtgtatttaaatccgcaaacacacccacattagaggttgaatttctgacagaaatataacaattctcaaaagttaaattatctccactgtcaaagtatgggccttcatttaatccatcgcaggttaaatacaaatctttaaagcaaagactatcaaaattcttcataaaacattgtaggtcttttgtttgtatccatgtagaaaaagggccttcccctttaaatgtaaaaatatcttttgttatggactgacctatgcttatggtagaattaatattatatactcccgtcttaacaaggattgttcctccatatcgccacatcatagaaccctctttcggcggatttctgctcgaaatagtttttatgcgtctaattgctttattaaaacattcagcgtcattcgttccgtcgcatctgaagtcgcaaaagccctgtgttttagtagtgcctataaccacggtggcagactgtgcaccggtaataaaacgcatatcggatgcaatcgcaacccaataactaccgtcatacactaactccacagtttcacctgcaagccatgaaaaataatctttaacaaaaatattatccgtgccacaatgcacgacaatattttttgcgcctgttgaattgacatttaatgtagctgccgttgaagaagtatgctcataagtaaactttacaagcacccttactcctgtcgtcaatttaaaattgcttatagacaccgttttcacggcggtgtttcccgatgttgagcataccgcatatgacggcggtttccaaacaggagcaccgctgccgttgctaaccatttcataacccgaagttccggctgatgttggtgcataccacgacttactcgccgacgatgcaccgttatag

SEQ ID NO: 715 - DNA, 2923 bp, Unknown
  16S sequences of unknown bacteria
atggcatttttccgatattcattgaaagctccttttaattcagcatactcggtgttcccggttcctatgccgaaaagtttgcaaaggagcacggaataaaatttgtttcaaacgcctttatgtacggcgacattgacggcgacaaagaggtcaaggttggcgacgcgcttatggctcttcaagctgctgtcggaaaaatagcacttggcgacgaagcgcttgctgccgccgatgttgacggaaaagagggcgtttcggttgccgatgcgctttgtattcttcaatatgcggtcggaaagatacaaaaatttcccgccgaacagtaattatatattcacggccgctcgaaaactcgggcggcttttgaattatttcggtttacaaaaggaatatttcgtgttagaatatctctgttataaaacgatgggagtataatatgaaaaaacagtttatcgaaaccggaaaaataacgggaacccacggaataaggggagaggtcagggttcagccatggagcgacagcccggaatcccttgcggaatttgatgttctttatcttgacagagagggcaaaagctctctgaaaatcaagtctgcccgggctcataaaaatatggtgctgatgaaaatcgacggagtggacacggtggaggccgccgaggcttttcgtaacaaggtgatatatttgaaccgcgatgatgttgagctccccgaaggcagccattttattgacgatcttgtgggctgcgaggtttatgatacggcgggcggtgagctactcggaaagctttgcgatgtttcggctaccggcgcaaacgatgtttggcacataaaaagagacggcagggaatatcttgttcccgccattccggatgttgtggatgaggttgacatcgacaacgaaattattaaaatcacacctttgaaaggaatttttgacgatgaggattgacatattgaccctttttaccgaaatgtgcgaccgcgtgctttgcgagagcataatcggaagagcgcgggcaaagggaataatcgaaactcattgtcacaatatcagagattataccgaaaacaagcaaaaacaggtggacgacgcgcccttcggcggaggcatgggtatgatagtccaggcgcagccgatctatgattgctttaaggcggtcgaagcgagcggaaacggccaaaagccatatgtgatatatatgtctcctcagggaaaaacgctgacgcaaaaaaaggcccttgaactttcgaaaaagccgtggcttgtgcttgtttgcgggcattatgagggcgttgacgaaagggtaatcgaggaaatcgtggatgaagaggtgtccataggggactatgtgctgacggggggagagctgccggttcttgtgcttgccgatacggttgcaaggcttgtccccggcgtgctttcaagcgaagaatgttttaccgaggaaagtcatttttccggccttctcgaatatccccaatattcccgtccgagggtttggaacggcagggaagtgccggaggttttgctttcggggcaccatttgaacataaaaaaatggcgcaggcaaaaatcccttgaaagaacctttttcaaacgtccagaaatgcttgaaaatgccgagctttcaaaggatgatttggaatatattgcgcgcctgaaggccgaaaacgacaaataacaccattatattgtgataaattttcgcttttttcgaacactcaaattgtgtatagtgtcgaatatcgacatatatttttataaaaaatgcacaaagcaccgcctttatatttgtccccatttggcgtgtgagtagaactttgaaattaaagccaaaagtttggccgaatttcgttgactgacggaaaaaatgtgatataatgtgtaataacaaaacaaatacattcgggagagattcataatgtttgttaaagacgtaatggttcagaacaaggtaggacttcatgcacgccccgcaactttctttattcaaaaggccaacgagtataagtcttcgatttgggttgaaaaggaagagcgcagagtgaacgccaaaagtcttctcggtgtgctttccctcggtattatcggcggaacttctatccgcattattgccgacggtgccgacgagcaggaggctgtggaaggtcttgtggatctcgtgctctccggttttgcagaataattttttgcgttttttcgccttcgcttttgcgagggcgtttttatttttgtaaaaatgttgctttgcattctccgcgggcatttgcgtcaaagccttgcataaagccgtccagcgcggcggtgcatatatctccaccgatgattttcccgttaaaaaccaaaacatttgcaaaggcctcgctttttacttccgggtaattgtttaaacgaaatgtgtatcgttcgacagtctttccggcatattcttcaaggtcaaagccctgtgatttttgcagatcattgtacttcataaatacatggtcatttttttctgcaagtgtttgctctgtcttttcgcaagaggaaagctcggcctgccaaccgaaagaatttaaaaattcaagtacctgttcttcgcttttaaccgatatttcggcatttacccgtttgacggttttcggaagcaacgagccgagcagataaattagcataacagctgcgattgcggttgacattattataaaaattctttttttcattcgcttgcccatataattccccctatgataaatatattaagaaaatatgaatttcatgacatcttatttaatggttgttattgacaagtttagtaaaatgatataaaatatttacgtaaagttataaactttacgtaaatacagatatacagaaagggagattgtaatgaaaaaagcaattgcgtttttactgtgcctgtgtcttttcgccgcggct

SEQ ID NO: 716 - DNA, 3224 bp, Unknown
  16S sequences of unknown bacteria
gggagccatagttgatcgcgatattgaggatcagccccgtattttcagcagtgatgcgcacagcatcctcgatgaccgtcctggtctcctgcgggaagcgctcgagctcaccgatgaaacatacccggatattgcgctcgttgagctcacggatataccggttgaaaaacagcttcggcagtccacagagatagctgacctcatcctggggacgtttccagttttctgtggaaaacgcatacagggtaagcacctccacctgcaaacggctgcattccaccgcgatcgtgcggatcgtatccgcccctgcgcggcagtccctgcgcctttgcccagcgcccgtttccgtccatgatgatggcaatatgccgagggatctttctgtccatatgttcctcctgtgctgtctgacgactcctgataaagcaaaacccacagttatgtgggtattcacttgttattcattatactgacatgatctcgtctgatttctctttgaccatggcgtcgatcttcttgacatggtcgtcggtcatcttctggatcttttcctgcgcatccttcttcatgtcctccgtcagttctttgttctttttgaccatatcatttccctcacggcggttgttgcgcaccgcgacctttgcctcttcgccgaacttatgcgcgtccttggccagctccttgcggcggtcctccgtcagcgccggcacgttgatgcggatgacatcgccgtcattctgcggcacaaggcccaggttggcagcgccgatcgcatgatcgatctccttcaggatggaacggtcatacggcttgacgaccagctgacgtccttctactacctgaatggaagagatctgattgatcggtgtcgggcttccatagtattctacgctgacgcgctcgagcatattcgcattggcgcggccggtgcggatcgtgcgaaggttggcatcgagattgtccagcaccttgttcatcttcttttccactgtgtccagaatctgtttcatttacttgtcctccattgtcttcttcgtgatgatcgttccggcgatgtcgcctctgaccgccttcaggatattgcccggctcgttcatgttgaacacgatcagatcgatattgttatccatgcacatgctcgtcgccgtggaatccatgacctgcagctcacgctgcagcagctccatataggagagacggtcgaacttgacggcatccgggttcttcttgggatcgctgtcatacacgccgtccacgccgtttttcgccatcaggatcacatcggcgccgatctcgctcgcgcgcagggcagccgtcgtatcggtagagaagtatgggcttccggttcctgcgccgaagatgaccactcttcccttttccagatgacggatggcgcggcgctggatgaatggctccgcgaccttctgcatttcgatcgccgtctgtacgcgtgtcggaacacctttctgttccagggcattctgcactgccagggcgttgatcaccgtgcccagcatgcccatgtaatcggcctggacgcggtcaacgcccatctgttccatcatcttgccgcggatgaaattgccgccgccgaccacgatggccagatcgatccccagatgatgcacctctttcagctcatcggcaagcctggagagcagcatgggatcaaacgcatactccgcagaagagagcgcctcaccgctcagctttaacaacactcttttatacataatatagtatggccccttccgtgtcctcaaaacactcaattcatcttagtaattatacaataaaacaccatgctttaccaccggttttttatctttaccctcaagagtccccaaaaaaaggcggcattcatcaaataccgcctttgatctgatcaacccttgatctggctcatgacctcttctacgaagttttcctcttttttctcgattccctcaccgaccgcatagcggatgaaagaggaaacggaagcgttgctctgcttcaggaaagcggaaaccttctgatccggattcaggaagaactcctgatccatcaggcactgatccttgaaatgcttggagatctttccttcgatgatcttggagagcatttcttcggacttgccggccatcttcggatcttccttcatgatgttcatctgcacgccgcgctcatgctcgaccacatctgccgggatctcatcacgagtgatgtatgccggagacatgctggcgatctgcatcgcgatgttcttcgctacggaagcatcctcctgtccgctcagcttagcgagcacggagatcttgccgcccatgtgcatgtacgcaccgaagaactcatcgtcattcttttctacgacagcgaaacggcgcagcgtgatcttttcgccgatggtcgcggtcgcattggtgatgacttcctccagcgttccctggccgctgtcgcatgccagcgccgcagcgagatcagccggacgcttctcgatcagcacctgctgaatggtatcgagcagtgccaggaactgatcgttcttggcaacgaaatcggtctcggagttcacttcgaagatcacaccgacattgccttcgacggcaacgcggctcagaccctctgcagcgatgcggccggatttcttcgccgccttggcgattcccttttcgcgcagccagtcgatggccttgctgatgtcgccgtcgcactcagtcagggccttcttgcagtccatcatgcccgcgccggtcttctcacgtaattcttttactaagcttgcagtgatcatgctcgtatcctccttcaatgattattcagcggctgcctcggcaggctttgcctctgtcttggcttctgccttcggctcagccgttctcggtccttccttcttctggaacggcgctcttccgtcacggcgcttgcggtcgtacggacgacggttgcggcgctcctcatttctctgacggcggcgtctttcattctctgcgatctgctcttccacgttgatgatgacatccttcatcgtgacgtctgtctcgttctcatcctggctgtgtgccacgctgagcagtccgcccttcgcctcgacgatcgcatcggccatcagcgtcgtgatcagcttcacggaacgcatcgcgtcatcgttggacgggatcgggtaatccactgcttccggatcgcagttggtgtcgaccatcgcgaataccggaatgcccagcttcttcgcttcggcaacggca

SEQ ID NO: 717 - DNA, 11926 bp, Unknown
  16S sequences of unknown bacteria
atattcgcggtgcagcagctcgcgcacgagcacccgctcccagcccatcggataaacatccggcaccggggcgacattgacaccttctacgtctgcgcaggcctggcgcacctgctcgatcagctttgggtgagagaccttgatggcgatgagcgcctcttcggccccggccatccgcttcatgacgcgggtgcccaaaagcagttcctccagatgcgtgctgaccatctgatgatccgccgtgatatacggctcacactctaccgcgttgatgatcagcttctcgatgttcttcgcggactgatacttgacatatgcaggaaagcaagcgccgccacatccgacgatgcctgcgtttttcatgaattcgacaagttcttccactgacgcctgatcagggtcgatcggcgcaaaggaagcgaccttctgctgctcggcatccggctcgatgaccagatgcatgatgggcttcagtgaagaatgcatgatcttctgcgtcccttttacgatgcctgaaacgctcgaatagatcggtatgcacatccggtcagtgcattctgccaccttcgttcctgcgctgacatggtctccctcgttcaccagcagatcaaacttctgcgagtggctggcatacagcgggatgaagacctgcttccctggcttcacttcgatgacgcccttgtgctccgtcatctccttgaatccgggaatatgctgacgcattggtcccagtaacaatgacatggtgattcaccattcctttcttttcgcattttcatgccaaatcaacgctattataacactgttaaatttatgttaaaaccgaaaatgcgcttttttttcatgattccgttcccttttccctatattttttagcagttttccttataataaatagacaggtgatgccaatgaaagagaaaaacaaccgcgtccgttcatggatcgcgctgtccttatgcttcctgctgctgatcggggcactttacgtcgcgctcactggccgttccccatctgcccagacgcatcagcagaccctgaccgatgtcggcttcgacaccttcgtcaccttctctcaggaaggcacgcaggaggaattcgacaagaacctcgcctttatccgcgagcgcttcctgtattacaaccagctgtttgaccgctaccagagcgatgagggcgtaaacaacctgaagaccatcaacgatgcggccggcgatcacgcggtagtcgtcgatgacgcgctgatcgactgtctgctcatggcccgcacttataccggctacagcccgcacttcgatgccagccagggtaccttgctggaagtctggcacacataccgcgaagaagggatctcgctgaatgaagcgggagaagacggacggctgcccgaagaagcagagcttcaacgcgccgctaacgcgcagagctgggatgtcgtgcgcatcgatgaagaaagcaatgaggtcatgatcatcgatcccgatgtatcgctcgatttaggcggcatcgccaaaggctatgccgtcgaacaagtcaagcgggaactggaagaaaaaggcgttgatggcgccatcctcaacgctggcggcaacgtcgtcaccatcggtgagaagagcgatggaagcgcatggcgcgtcggtgtccagatgccctcctcgctcagcgacagcaccctcgccgtcctcgagctgaacggttcccacgccatcgtgaccagcggagattatcagcgctattatgaggtgaacggtgagcgctatgcccatatcatcgatccgctcacgctgtacccgccccgctatttccgcgctgtcacggtcgtctgtgacgacagcgcggctgccgactgcatctccaccaccctcttcaccctgacttacgaagaggggctggcgtatctcagcacgctggaagaacagggcatccacgcgcaggcgctgtgggtgttcgacgacagcgagacgatcccgcagagcgagcataccttcagcacgcaaggctataccatcgtgacgacgccggcgctctttgatcacgtccgcgtatcctgacaccggtcacaaaaaggctgcatgccatcgcgcacatgtgcgttttcggcatgcagccttttttcatcgcttaagcgcagccaggaagcgttcgcggatctcctgggcatccgggatatcatccccgtattcgcccattcggatgctcggcttatgcttgccgtgaaaatcgctgccacaggtgatcagcagcccatgatcggcggcgaattccgcataatagcgattatgccgctcttcatgataattgctgaaggcctcgatgccgtcgatgccggcatcgatcgctttctgcagcagatcttcccgctcataaaatgtctggaacggatgcgccagcacggcgatgcctcccgcggcatggatctgctccaccgtcgatgcgaacgacggatagtccacatgcacatacagcgggctgcccgcctgacacttatcccaaaagaaattcaccggcgccggatcgctgcgcgctccgcctttgcggtacgcatcgaactcgcggatatgcgcattggccggatcggcaaacatgcgttcgcacatcagaaaccagggattctcatcaccggcatcctgcaggatctgccgctcatcgatccggatgtgataatgcgcctccagcttgcatacccgctgatgaaacgcgtcatccatcagtttctggatccgctcaggaagcgccgtaaaataaggctggcggtaatcaaacccatagccgagcagatgacattcccgctcttggtcaaacagcgtcgtaaactcgatcgcgggaatgacctggatccctgcgtgctctcccgccttgcgcatctcgtctatgccgcgcatgcagtcatgatcagacaaagcgaccagcgaaagcccgctctgcctggcgatctcgatcagccgcgacggcgtatgttccccatccttgctgtaacaagaatgcagatgaaggtcaaaatcgttcatgttcatcaccccgctcattataatctgttctccttcttcacgcaacaaaaacaggatgcccgtctcatgagcatcctgtcgtgtcgttttattcagccagcacacgggcgcagcgcgcgcaaagaccatcttccgcatcagattccgtgatgttccagcagcgcgggcatactgtgccggcacacttgtccacgcttactccgcagtgttcatacgccggcagctgctcgtccgtgaaggtcaccttggacacgatcagccactgatggaaagtgtctgggaagatctccgcgatgagggcacgatcctcctcgctgacattcagcgtgacatgcgcctccagcgacttgccgatgatcttctcattgcgggcattctccagcgccttgagcacatcgctgcggatcagcagcagccgctccatcttgcggatgatcgcatcggcgtcaaaggagagcgtcagatcggcaaatttgcccagatgcacgctttccgcatcgaactgcatgatatcgttgacttcctcgcaagtatggcagaggatcggcgcccacaggtgaaccagcacatccagcgcgatgtacagcacgctctgcacctgacggcggcgcagggaatcctgcttttcgatatagaggatatccttcgtgtaatcgagataataagcagagaactcgttggtcatcagattggtcagcgaagtgaccacatcagcgaaacgatattccatatatgccttcttcgccttctcgttggccgctgccagcagcgcgatcatatactgatcgctcagcggaagggctgccggatcctgcagatcctccttcgtgaagtccccgacattggccatcaggaaacggaaggtgttgcgcaccttacgatagctgtccgcacactgcttgatgatgttgtcgccgatgcggcagtccgcctggtaatcgatgctcgtcgcccaaagacgcaggatatccgcgccgaactttgtcgtgacctctttaggagaaacggtgttgccgcgggatttgctcatcttctccccgttctcatccatgacgaagccatggctgagcacctgacggtacggtgccttgccatgcacggccgtgccgacgatcaaagaggagttgaaccatccgcggtactggtcgctgccctcgaaatacaagtctgccggatagcccagaccgcgcgcgatcatggcgccggtatgcgaggagccagagtcaaaccatacgtccatcgtatccgtctccttgcggaagatgccatccggagaacctggatgtgtgtatccttccggaagcagatccttggcctcacgctcgaaccacacgtttgagccatgctgctcaaacaggtctgccacatgcgcgaatacctgctcatccatgatcggcgtatcatcctgcgcatagaagatcgggatcggcacgccccatgcgcgctgacgggagatgcaccagtcagaacggtccgcgatcatgttgtgcatgcgctgtctgccccaggaagggatccaatccacttcgtcgatctcctgaagcagcgtgtcgcggatcttgtcgatcgaagcgaaccactgagtcgtagcgcggaagatgatcggtttcttcgtgcgccagtcatgcggataagcgtgggtgatccactccatcttgagcaggcagcccagctcatccagcttcatcgttacggtcttgttggcatcatccacatactgaccggccagccattcgccgcagtcttccatcatgcagccatgctcgtcgacattgcagtacgcgtcgatgccatatttctggcagacgaagaagtcatccgcaccgaatcccggcgcagtgtgcacgcagccggtaccagcgtcggcagtgacatgatcgcccaggatgaccagcgattcccgatcgtacagcggatgctggcaggtgatcatctccagctgtgcgcctttgtacgtgcccaggatctccttgcgctgcaggccaaacttctcccacagctgatccaccagctcttccagcacgatgaactttcctttttcgctgtcaaccagcgcataagtataatccttattcaggcagatcgccaggttggccggaatggtccacggcgtcgtcgtccagataatgaagctcgtatccgtatccaggatgccctttccgtctttgacgcggaacgccacgaagatggtcgggctcttgatgtcatgatattcgatctccgcctcagccagcgccgattcagaggacggcgaccagtagaccggcttgagccccttgtaaatgagaccgtccatcgccatcttgccgaagatgcggatctgacttgcctcaaattcctttttcagcgtgatgtagggatcatcataatcaccgacgcatcccagggacaggaatccgttcttctggttttccacctgcttcatcgcataatcgtaacaaagcgcgcggaactccgccagcggcatcttcttgcggtcatagcccagcttcgtgatggccgtctcgatcggcaggccatgcgtatcccatccggggatatacggcgtataatacccgttcagataatgtgagcgcacgatcacgtccttgatgatcttattgagcgcatgtccgatatggatgtccccattggcataaggtgggccgtcatgcagcacgaacggctttgccccttcccggctcttcagcatcttctcatacagtcttccatcatgccagcgcttctggaacttcggttccttggtgggaagctttccgcgcatctcaaacgcggtcttcggcatgagcaatgtctctttgtagtccatcttcattcctccttaacaaaaaagacgccctgatctaaggacgtcatcaacgcggtaccaccttagttcacaccgggtcccggtgtgccctctgcctgctaacgcgaggctgacgtgtcttcctactgcattcagaagaccggctccaaagtgattcccgttcacctgcgccgcagattttcaccagccatctgctctctgtagacttggtcaacggacatgtctttttcttcgccttttcatttatccaacagatctgtgcccggaacaggcacgcgctcgaactcatcgagcaggcggctgatccgttccgtctgcctgcgcatcgttcccttggcatcctcggtctcatccgcaagcttgacgatatcggcgagcatcagcctggcattgagcagcgcttcgctgacgatcacgtccgcgttctgctttgccgtggcgacgatcgtatttgcttccttcatggcgatggcgaccatctgggacgcggcatcttctttctcacgcagatgctccacgggagaatcccctccctttcccatggcgctcacctgttcctccagctgcgcgcagcggtttcggtaagcctcattggagcgttccagactgctgatgtgcatattcagttcctcgatgagggcatccacctgataacggttatagccgtccttcatccgatcgaatttcacacccatcttctcacctccaatttaacaatagacgagtatctcgatgacatagcggttcttcttcgtcatcttctgtacgcccacaaattgaaagcggccatgcccgcgaacggaaacagcacagttattatcgcataaagcactgcattgttcaagaggcaggtcattcacttttaccattccgccttcgatgagcgaagccgcacgggcgcgggaaatgcgacagatggcgctgacgatcgcatccaggcgcagcgaagagacattgcattcgcggcgctgcacgcgaggcgcgatatccggcacgcccgcataccgggaaaagcgcaggccgctgcggcggatcatggggacctgatcgatcagataagcgctgatgggctccagcgccatcacatagatctcgttttcctcgatgaggatatcccccagctgcgcgcggtcgatgccctgatgcatgaacgcccccagcacatcgcggtgcgtcagccggccgaaacgaggctgatacgacgccttgagcacacagacaggaaactcgatatccatctcgacaggaaggagcgcataacagcgccgctgggcatgggcatatccgccccagctgcgctgcagcctgctcttgccacagacctgctccacgatgcgcccttcgctctccgataaaaaaggggtgaagatcacccggttctggcgttcacatgccgcaagcatgtcttccagcctcgcgataaaatcctcatgcccccgaaaatgctccagacggctcatccttccgcgccgttgtccacgttgatctgtccctgcacgccgatctcagccggagagcagaggatgacgttcgtgccgaccttctggatctttccatcaagcgcgaacacgacaccggtcagaaaatcgatcgtacgctgagcatattcgcgatcaagcttatgtaagttgacgacgactgcgttgccttctttcagacgcttggccacctcatcggactccgagaaggaacgaggctcaaacagcaccatcttcgtcttggccttcattgtattcgctgtattcacatttttcgtcttcggcctctcgtagcgggaacgcggcgtttcttccacttcttcctccacttcgaggatatcgtcgccctcatcatcgatcggtgcgacgaactctttgaacttatctacgactcccatcaggtacacctccagtataagcacattataacatttaccatgaaaaataaaaagtggctatgttacaaaatgcgcaaaaaacagccactttcagcacgttgagacaaggatgacatcttttccgacacgcacgatctgcgagatccgcaccattcgctcctcgccgtgaaagaaccaaggaaacagccgtttcatgcccgaaggccggctcatgacatagagcatgcagatctgataatgctcatcaaattccagatcgcagggcatgccgagcagctcgccattgtcgacgctgatcacatctttggtacaaaactctgagaatctcatcatatcaccagtaccatcttatgcgccgaacggataaatgtgaactactgatccatctgccgccgcagcgagcggatcgcgtttttctccaggcgggacacctgcgcctgagagatccccagctctgtcgcgatctccatctgcgtctgatcctcgtaataccggcggcggatgatatccagctcccgcgcattgagggcatgcatgctctgatgcagagagatgacatcccgctccttagcgatctcatcatgctcgtccttgatctgatcgagcagatagagctcatccccatcgctgctgtagatcggctcaaagatcgacagcacgctctgacaggcatccagggcatccgccacatccttctccttcaccccgcactgctctgccagccaggcgatggaaggctcttcctgatgctcatgcacataagcctccttgagccggaagatctgataggcgagatccttgagatgacgggacacgcggatgaccgaattatcccgcaggtaacgccggatctcccccatgatcatcgggacggcataggtggaaaaccgcacctgatgcgacaagtcaaaatgatcgatcgccttcaccaggccgatacatccgacctgaaacagatcgtccatattgtcacagcgcgcggcgaagcgctgcacgatggagagcaccagcttgagattgccgcagatgagctcttccttggcctgcgcatccccgccctgatattgtttgaacagcgcggtcatctgctcattgctcagcacatgcagatggtcggtagacagtccgctgatcacgactttataacgactcattggcattcctcccagtcaccctgtactagcagtctgcccgtgcgcccccttctctattctgtccgccccgctgtcagtaattggaatccgctgccgcttgacaaaagaaaaaacggaccgtcagtccgctttgaccttcatctgcaccttcagcttctgcaggatgcgtttttccagcctcgagatatacgattgtgaaatgcccagctttctggcgatgtccttctgggtgagctcttcatgctcgatgccataacgcatctgcaggatcatccgctctctttccttgagccccttcatcgccttcagcagctcgcggcggttctcatttttttcaaactcacggatcaccgtgtcatcgtcggtccccagcacatcgctgagcagcagctcgttgccgtcataatcgatgttcagcggctcatcgaagctcacttccaccttgcgccggctcttcttgcgcaagaacatcaagatctcattctcgatgcagcgtgacgcataagtgaccagcttgatgttcttgtcccgccgaaacgtgttcaccgccttgatcagcccgatggaaccgatgctgatgagaccctccatgaagatcggattggtctcatagcgcttggcgatatagacgaccagacgcagattatgctcgatcagccggcttctcgccgcttcatccccgttctcccaggcgatgagcgcctcctcttcctcttctctgctcagcggctgcggcagcacatcatgcccctgcatgtaaaacaaagatgtctcttctttttcccagaacagcttcttgagccagttcaaccatttcatactctcacctcatactcaacattttcagattcaggatcatggcgcaattgcgccgcagggccagaccgtcgacaaacacggcaaacacatgacatttgcggcagccatccacctcacacaggatgcggtaagccttcatcttcctggcgccgtggatgctatgtacctcgatggtcgtggcgtttccttcaaacagcggctcatagcgggcattgacaaagacgaccggctgatgctggcactgcatcaggttgccgctgtccatatatcccttcagccggatcgtctgcgtgccatagagcgtgcatccatagacgaaccgctgccgcatgagcgtcatggcatgggtgcgcagatagatgaacacaaccagatagaagatccagcagatccagatcggcgtatggatccaggggaagaaagcccccagatggaagctcccctcccagaagacgaaagccgtggcatgccagagcgtgcgcatgagcaggtttacgccatacaatgccgcctgccggtaaaagaccatcacgaaggccgctgcttcgatgagcattgcgccgagccatccgccttccagaaagacaaatgagctccaggctgaagcgcacagcgcatataatgccactctgccgccatgcagcggacgctgaacgagatacagcgccatccatacgctgagcagatccgtcagaaaattgtgaatgaacgcggcttccacatagctttccacagggcatcctccctgccctacagtatagcggccgccgttcacacaagctgtcggtttctgtcccggggctcatttcactgcattgtatgtccgcgctctgcgttctatgcccaacaccggctgcacccgcgcccagacgccccggctgcgcagcatctgtgcgatgtctgcggccagggcataggagcagcggatccgctcctgatcccgcgcggtcaccccatagcgcccgcttctgcgatcatagaacccgatccatccctcgctcagctggatactgtatttcatccgatcacctccagctgcagcataacccatattgtgacagcatcgatgtcacaacaaaaaaaagcgccgccgtacaggcgaacgcttggtatacatcattctgtttcgatcagaccgtatcctccgtcatttcgcttatatacgacggcgatctcacgcgtctcatcatcgcggtagatgaagaagctgtgtcccagcatttccatgcgcatgatcgcttcatcgagatccatcagatccggatcgatggtcttggtgcggaccacttcgtcatcgctctcatcatactcgtctcccagcagttcatgatcgacgaacgcttcagccagcttcgtcttgttcttgcgcgtcaggcgcgtcttctgccggcggatctgatcctccagcttatcgacggccagatcgatggcggcatagagatcatcatgcaccacctctgcgcgcaggacggcatatttggtcggaatggttacctcgatcttctgctttgtcggatagacgcggacaacgacgttggccgtgtcatcctcttcgatgatgaagtacttattcagcatattaagttttttttcgattttttcggcgattgccggagtcacggtaatgttcttaccataaatttggactttcataaaatccctcctcgtttctacctttattataacctgcctcatctgaaaatacagtctaggaatttcatccgatctatgatagaatatttctgtaagggatttcatcaaaatgaaaagattctcacggcattttcagatgccgtttttttatcggcgccctgttccttcagccagcggatcagcgcgccggcttcctccggtgcgccaagcccgctcaccccatcgccgctgcctgcataatagcgttcgaaatcaaacccgaacccgacatgcgcttcgccggccacctggcacagatgatcgatatgccgggtgaaatgcgcaaagtcccggcattcttcccgcttatcgacgaacgcgccgacggccgctgcaccgatgagcccgccgcggctggcgatcagcctgatctgctcatcgcgcagattgcgcggatgcggacaaagcgcggccgcgttggaatgcgaagcgaccagcacgccctttgtctgtttcgcgatatcccagaacgtctgctcccccgcatgggagacatcgatgcgcatgccgatccgttccatatggcgcacggcgcggatgcccagcggcgtaagcccccggctgctgc

SEQ ID NO: 718 - DNA, 32759 bp, Unknown
  16S sequences of unknown bacteria
gatgaaagcagggaatttctgcctttcgcggaaaggaagtgcgatatggaacaggctgttttttggggacgggaaaccgaatctgcccatctggctgggaatacccgggcttatgagtggatgggatgccattacactggggacgaaggctatgtattccgcgtgtgggcacctcatgcggggcgggtttccctggtgggggaattcaacgcctgggatccggatgccctgcctatgtcccgtgtgggcgacggcagtatatgggaatgtgtgacccaggatatccgcgaatacgatgtgtacaagtattatatcgaggcacccggcggcaaaggggtgatgaaatccgatccttacgcctttcactttgagaccaggccctcgaacgcctccaaggtatataacctggacggctatgagtggggggacggcgaatggctgcaaaaaaaggcggatggctcgctttatgactgcccggtcaacatctatgagatccatctcggctcctggcgccggtaccccgacggcgcccccttttcctatgacaagctgggggacgagctgatcccctatgtgcaggacatggggtatacccatatcgagctgatgccggttatggagcacccctacgacggctcctggggctatcaggtgaccggatactacgcgcccacctcccgttatgggacaccgaaggcttttatgcggtttatcgaccgctgccacagggccggcatcggcgtgatcgtcgactgggtgcccgcccattttccgaaggacgaatgcggcctgtaccgtttcgacggaactccctgttatgaatatgcggatccccgcaaaggggagcaccgggagtgggggacctgcgttttcgattatgggcgcccggaggtccaggcgtttttgatctcgaacgcgctgttctggctggataaataccatgtggacggtatccgggtggacgccgtcgcctccatgctctatctcgattataaccggcgggatggggaatgggtcccgaaccgttacggcggcaaggaaaacctggaagccgtggagtttctccgccggctcaatgagcaggtgttcgccgcctatcccaaaaccatgatgatcgcggaggaatccacctcctggcccatggtttccaggccggtaggggacgggggcctgggcttcaactacaaatggaacatgggctggatgaacgatatgctccattacgtgtccctggatccctggttccgcaaattcaatcacgacaacctgaccttttcctttttctacgctttttcggaaaactttgtcctgccgatttcccacgacgaggtggtgcacggcaagggatccctgatgaacaaaatgccgggcagctatgaggagaaattcgcggggatgcggtctttcctggggtatatgatggcacatccggggaaaaagctgctttttatgggctgtgaattcggccagttcaaggaatgggattttgaaagcggcctggactggctgctgctggactacgaatcccaccggatgctgcagcatttcgtccgttccctcaaccggttttaccgggagaacgcggcgctgtgggaaaacgatttttcctgggacggattttcctggattgcgcacgacgattatgcgcaaagtatcattgtgttccgccgcatcgatcataagggacgggggctggcggttctctgcaacttcactccggttgagcgcaagccttaccggatcggcgtcccggtcttcggcacctatgccgaggtgttcagcaccgacgcggccgaattcggcgggacgggaatcagcaacggggtcatcgaaaccgagccggtctccatgcacggcttcgcccagtccctgaatttgacggtgccgcctctgtccgtcctgtttctggagctgaaaacggaaaagccatatccccaaaaacaggagaaaaaagcagggggcaaggcgccttccggaaagccgaagggcgccggagcatccaaaaaatccaaaacaagcggctgacagccgttttccctttcatcactcttcaaggaggtcgtgttcatgtttcgcaagcaggagtgcgtcgccatgctgctcgccggcgggcagggaagccgcctgtatgccctgacccggaatatcgccaagccggcggttccctatggcggaaaataccggatcatcgatttccccctctccaactgcatcaattcgggaatcgaaacggtgggggtgctgactcagtaccagcccctcgagctcaacgactatatcggatccggccagccctgggatcttgaccggatggacgccggggtccacgtcctgccgccctatcagcgcaacaagggggcggattggtacaaagggacggctaacgccatctaccagaacatggcctttatcgaacgctacgatccggaatatgtcctggtgttgtcgggcgaccatatctataaaatggattattccaaaatgatcgcggaacaccagcgaaacaacgccgactgcaccattgcggtgatcgaggtggagatgtcggaggccagccggttcgggatcctgaacacccgggaggacggctcgatctacgagttcgacgaaaagcccaaggtgccaaaaagcaacctggcgtccatggggatttacgtgttcaattggcggaagctgcgggactacctgacggacgacgaacgcgaccccaaatcccaaaacgatttcgggaaaaacgttctgcccgccatgctggcggcaggggagaggatgttcgcctaccgcttcgaagggtattggaaggacgtcgggaccatcgacagcctttgggaagccaacatggatctcctcaatcccaaaatcccgctggatctctccgattcggaatggaaaatctactcccgcaatcccggcctgcccccgcattatattggggataccgcaaaggtggagaacagcatgatctcggaagggggcaatatctacggtaaagtggatttctccgttctcttttccggcgtgaccgtggaggagggcgccgagatccgcgattccatcattatgccgggttcccggatctgcagaggtgccgtggtacagtacgccatcgtggcggaaaacgccgtgatcggggagggggcggtggtcggcgcccgtcctgaaacggtggagaatctcaaggactggggcgtcgcggtggtcgcctccggcgtccacgtgggcccggaatgcgtcgtgccggcaaaagcgatgatcgataccgacatggaaaaggcgggtgtgctgcatgcgtaacaacaatgtgctcggcctgctgttctccaacatgcatgacgaggccctgcgagagctcacggggatccgggctttgggctcagtccccttcggcggccggtaccgtctgatcgatttcccgttgtccaacatggtcaacgccggcatctccaaggtgggcgtgattacgaagagcaactaccaatccctgatggatcatatcggttccgggaaatcctgggatctttcccggaaaaacgaagggctgtattttctcccccccttcggcaacaccgacgagctgtataacgggcgggtggcctccctgagcggcatcatgcccttcctgcgcaattccaaggaagagtatgtggtgctttccgactgccatgtcgtggggaacatcgattatgaccggttggtggaggagcacatcgcctccggcgccgacgtgaccatcgcttacaaaaagggcgcgccaccggccgatatggagaacgtgctgctttggacggcctcggacgggcgggtgaccgacatggtcatccgcagcggggggccggaggaaagccggtacggcatcgggttatacgtcatggggaaagaggagctcatgcgcgcggtcgatacggccgtcagccggcatcacggcagcttcgaatgggatatcctgctccggcatgtggaggataagcgcctgtacggctactgtgtcaatgaatacgtgtcggtcatctcctcgttggaacggtatttccgggcgaacatggcgctgctggatcccgatgtccgcagcgagctgtttatcggaagccgcccgatttataccaaggtacgggactgtgcccccgccatctacggcctgcacgcggaggtatcccattctctggtcgcggatgggggcgacatccaggggacggttcgccattccatcgtgttccgtgacgtgaaggtggaccgcggcgcggtggtggagaattgtattctgatgcaggggacgctcgtgtgcgcggattcgtccctgaactgcgtcatcacggacaaaaacgtcgtaatcaaggacgaccgcaccctgcgcggcttcgacagctatccggtgttcatcagcaaaggagcggtggtttgattcccacccggaacgcatgaaaaggaggaaatcggatgaaagtgttgtacgcgaccagcgaagccaagccctttgccgcctcgggtgggctggcggatgtcgcgggttctcttcccaaggccctgcgggtccgtctggtgggctgccgtgtggtcttgccgctctatgaatcggtgccgcaggagctgcgggagacgatgacgtttttgaccagtttttcggtgccggttgcgtggcgccgccagtactgcggggtgttcgaggccaagcacaacggtgtgatctattaccttttggataatcagtactatttcaaacgggcggggctgtacggccactatgacgacgccgagcggttcgccttttttgcccgcgccgttattgaaatgatccggtacatcgattttaagcctgatattatccatgcaaacgattggcagagcgcacttattccggtttactactccctgttctatgccgggcaggagggatatgaggacatcaaaaccgtattcaccatccataatatccagtatcagggcaaatacgggatggagatcttggaggatgtgtttggtattccccagtctgcccgccccattgtggaacaggacggctgtgtcaacctgatgaaaggggcgatcgaaaccgccgaccgtgtgacgacagtcagcccgacctatgcaggggagatcctggatccctggtattcccatggcctcgaccccatcctgcgtctgcgggagtggaagctttcgggaatcctcaatggcatcgataccgacgagtacaatcccgaaaccgatcctcagatttaccgccatttttccgcggaggatccttccggcaaggcggagaacaaacgggcgctgcaggaaaggctggaccttccgcagacggcagagctgccgctgatcggtatggtcagccgcctggtcacgcataagggcctggatctggtcaaatacgtgatcgatgaattgctgggggattcgctccagatggtcattctcggatccggtgactgggtttatgagaacttcttccgtgaggtgcaagggcgttttcccgacaaattccgctactgcgccggcttcgttccggagctggcccaaaaaatctatgccgcttccgatattttcctcatgccttcaaagagcgagccctgcgggctgtcccaaatggtcgcctgccgctatggcgcggtgccggtggtgcgggaaaccggcggcctcaaggattccattcaggactgcggagacggcttcggcaatgggttcaccttcaagacatacaacgcgaacgacatgctgtacgccgtccgccgagcccttggcgcgtatgccaataaaaacgactggcctatcctggtcgaacgcgccctgcgcagcgatttcagctggggccgttccgccaacgaatacatgaagctgtaccgggagctgctgaaagggtaacggcaaagacgagcaaaaggggaaaacgggtctgcccgctttccccttttttgtaccggtcatcgccgcccggcggaaagctcgtcgctcacctgttccaggatatccggttccctctggttgatcgcggcaacatggtcatggatttttttcagcggtgccgaagcgggcgcaagagtatatttgaatgtcagattgaaaagccaagcggcgtcctgtgccagggtttcgtaagcatcgataagctccgcgttttgcagaaagcctttttcatgcagagtccggagccgtaagagcatcagctgtttgtgctccatgaagcatcggccggcgcgcaggtcgatgggctcgttcggatccgcggcggcgagggattgggcatattcccgccaaaccgcaataccgaaggatttatccgggtggatgacggggcctaaattgcgggaatgcagatagctctgtaagctcgactcgatgacatccgggtttatgacgggcacaaacgtctcgaccggatgccgataggcaataaagaagcttgcttctgaaatatttttcacactttccaggtaattctcataagggatgtcgaaatagtcgtatttcccatcatccaaataccctaccgaatgaaagactcctctctcgtcgtcatatcccaaaagaagataatcgtggttgaagtcgaattgccgataagcgctcttgcgtggtatgtaataatcgttgaaagagccgttgatataatgcccgttatccagcatttctttattcagtgccatcagatcaatggaacggcggttcaggatatcgggcttcagccacatctcctgcctggatgttgcccctctttcaacgcaccaaccgtcatagtccagcaggcaataaacattgccctcatcatggttatgggtacagttgataaacatatcgcacaacaaggtggaaaaatcagccacattggctttcaggactcccgcggcaaacgcctcgccctgataggcccgaaacggtacatttagagtaaacggcagttttccatgtcttttcattattccctccttttaattgacaagacgtctgtataaagttatatacataaaaataatgcgttgccgacaagcatctggcaacgcacagtagggtgtatatgaactactcattaaccgtccaagcgatcataaattctttacttcggaagctctttaaccatttgggcataggggagagaggtatatcctttccgccggtaaagacggacagcagcatggttctcctcctccacctccagacgaaaacgcaccgcccggtcccgatattgattttcaatatacccgatcagctccgtgccgagtccaaaaccacgggcgaaatcccggatatagagttcctccagccacaccaccaatccgcccgcttcgttggaataggtcagcgacacgaggccgtatcccgccggcgcgccctgatgctcagcgatataggcggcaacatacgggcttttttgatcgagcgcatcggctgtccggataaaatacgtatccggaaccggatgcaatacggcgggagaggcataaaattcccgcatcatgtggatcagattgtcacgatcagttgcttgtagatctcgaatcaacgtcatccagcctttctagaatcatcatggggaattataaatggtttcatccggccggggtgcctggaagttggggatcggaatcatcacgggagcccttcttgtgttttttgacgatgatagagtagaccttcatgccgatgaggctgacgacaccggtgacgacaaagaggatgatggcttcgacataccgtgactggccgatgaagtgtcccccgatcgtggacgagaccagagaggggatacgggcgatcatggagataatcagaaattcatgcagtttgatacgggtcaggcccgcaaagtatgtcagtaaatcctttggcgttccgggaataaaaaacagcagaaaaatcatccgcttgagcttttcctcgctgttgatgaagcgcagttcatcgattttttcgcggctgatgaatatttcgaccagccggacacccaaaaatcgtgtgagcagaaacaccagcgaagaggcggctgccaccccgatcatgcagatgagggttccctccactgctccaaaggcatagcctgtcccgacctctaccagttctcccggtatcagggcgatgacgatttgcagcacctggatgcccagggcgacgaaccgccccttccagccgtaggaatcgatgaacgccttgaattcctccggattgttgttaaaagcgaggaatttcgtcataatgaaataggttagccacccaaatagagcgatgacgacggctagggaaaccaagcccagaatccggcgccgccgtatataccggcgggtgtccggatccatcggaacggctgctttcgatttttcgattgcctttttcataaccatcctgtttgccccgtctcattgcggaaatcacgcataccgtatttttactattgcataatcagtatatagcatctttgggaaataatacaggggaatctttttaacaatttattaagttcaccgaacaaatcgatatatggtagaaaatttgggaaatccctttctaaaagacgcatcttgtgataaaatcgaaatgtccagaatcgaaaagggatggcgaacatgcagaagaaggccgcggttatccaggatatatgctgtgcgggcaagtgctctttgacgatcgcgcttcccgtgttatcggcggcgggggtgtcctgctccattctgccgacagccgtcatgtcgacgcatacagggggattcagaaatgtacacggccgcgatttgacagaggatattctggccattgtccggcattggaagcgggaggggctctcgttcgatgctctgtacagcgggtatttgtattcttccgcgcaagttgaaacagtcaaaaccgcaataagcctcttgcgtgccgccgccatgcctccgctgctgatggtggatccggccatgggggatgggggaacgctgtatcgtctctgtacccccgacatggtggaaaaaatggcggatctgtgtgcacaggcggatttgatcgtccccaacatcaccgaagcggctttcctgttgggggaggtataccagacgccgcctcataccaagccttatatcgagaggcttttaaagggcctttccaagctgtgtaaaggcaatatcgtcctcaccggtgtcgcattgacgtcgtccgaactcggttgcgcctgtctggaggggcagggcggcgcggttcaatatgttatgggggagcgaaaagaaggcacttatcatggaaccggcgatttgtttgcttcggcactgttgggtggactgctccatggacgttctctggaatatgccattcatctggcaatgacactcgtatcggatgcgatcgtcaaaacacaacgagagaatgggcctgaaagggaaggcgtcctgttcgagccttgcctggccgactactcaaaggccttggccccgctgtgaaacaaatgtttcacagcgggcagaaccttcaataaatgcctttttatccgcactttgcatatccgttatttatcccgctgatattcacccgaaaacatcagccataaaacatatatcagcacataaaaaatcaaaaaagccggcaaaggattttgaaaaaggccccggcgggatagcccgacatacggcgatccaaaatcgatttgtctgggacacagagataaatacagtacgtgggccaagggaaaggaaaagcgaaaacaaaatgagtctgatgagaatctgggacggaaaataaaggaaacgtttatatgcagatgttaataaggtaaatcggatatacattcgcatataaaaaacctatctcaaactttagcaaatgcatgtaacggcgggactacaaaccaagagaaaagattatccataaggaaaaacaaactcacccaaacaaacggaatgctctcgcttatgaaatgatctaactatacaaaatgaatgttttgtatagtttaggggagggacaacatgaaaaaggcgtatttacaggaatgccctccggttttgcgggagtatttgggatatacggaaaccatcaagggccgttccggaaacaccgtagacgagtattttatcgatttgcgcacattttttcgatatatcaagcaaatccgcggcctttgtccggcggccgccggcccggatgaaaatatctccatccttgacgtggatatggcgctgatccggtcggtgactcttaacgacgtctatgaatttatgaattatctgaaaaccgaacggcacaataccagtaaaacgcgcgcacgcaaaaccacgtctttacggatgttctttcggtatttaacggattataagcatgtgctcgacgtcaacccggttcagaacttggacacgccgaaacaaaaaaagagtctgccgcagtatctcaccctggatcagagcatggcgcttttgcagtcggttgacggcgaatttgcccagcgggattattgcatgctggttctttttctcaattgcgggctccgccgggcggagctggccgggatcaatctgcgggatatccggcctgatcatacgctgattgtccgcggcaagggcaataaagaacgcatcctgtacctaaacgaagcctgccaggatgcgattgaacaatatctcaaggtacggccggtcgacggcgtgcaggataagcaggccttgtttttgagccgtctgaaaaaacgcatcagcctgcaaggtgttcactatgtcgtcaaacggtatttgcatcaggtcccaggcgcggagaacctgtcgacccataaattgaggcatacggcggcgacgctgatgtatcagcaaggcggcgtggatatccgggttctcaaagatgttttagggcacgaaaacctcggcacaaccgagatttacacccatttgtccagcgcgcaggtccggcaggcagtggaggacaatccgttgtcccatgtcaagcgaaaagccggcccggccaagaaacggggcccggattcggaatgacctctcccctctcattttaccatatattggattttaaaggctccggtcctaaagagaccggagccttttgcgtcagatggtatcgtcgtcgtcagagccgccgctccgccggcgataatattgcgaacggagcagttcctgctcgttgtactgcttggggagctcccgttttggggctgtttcttcttcctcttccctttgctcattgccgagatcctggaaaatcgcctcttcctcatcttcggcggccatttcctcatcctcaatgttcagggcgcgtttagcttcccggtcctctccaggatgatccttataataggggtcgatgataaatttctggatcacggggaacatgttgaattggatcagaaaggagcggaaggctggaaaaaccaggatgtacacgaacaagagaatcggaaggcagatatacagcggtacgtaaaagaggataacaataccgatagcgtaaaagaaaagaagcacgaccgaaaccagcagattacgccccagccccacgaaggcgagcagcagcgcgtttttgagcagctgcttgatcgtcagcttgaaggtaatcatcatcaaatagatataataattcatgaaggaatagaggatcaccagcatgaagctgaccgccaagccgatcataccaaagaatccttcggtataaaaccagaaaaagtaaacgtcgaaggcaataatcgcaccgaaaaccagattgagcaagcccaaaggcagcgcctgcttccagtttttcttaatggtatccataaaatcggaataaataaacgcgtgcttttcccgcacgaaattccgggtgatgtaggtcaggcctgcgttggcaaagccggtcgtcaccaccggcagggataccagcacatacagcagattggccaggatgagtttccagaatttccggaaataaagctcaaaaaagatgacgatcccttttttctggggcccgtttttgtccactcctggtcctggtttgttatagtcgaacagtccgaaaaatccagccaccgttatccttctccttactttttcacgtcggggattttactagggtacatacaaccgccggtcaggcggggataaacaggttcaggaacgccagccggaatccgacgtcgagcacaccggccccgaacgctacgcccacgagcagtaaaaagcgcatacagtacagacgaaaatcctgccagaggccgccgcagttggcggcgtttgggaggagctgcccggcaatgagcagggacatgcgcaggctctccgcgcagcccatgagtagcgcggcggccgtgaccaggctgtgcggcagtaccagcaaagctacaaacgccaccccgccagccccgaagccgtaataatacgcctcggtcatgcccagccccaatccgaaaaacaccgggaccaggacactcactggcgcaccgcaggcggaaaggccggtcagaaacaggagggccaggagacagaaggaggaaaaacaagacgagaacagttctgaaacgctgccttgtatgcccccctcgatcggcgaaacctgcagcatgacggtcaaatcggccgaaaacaaggtgtgggatacggtaaacgccaggctgcctcccagcactccaagcagcagcagagccaggaagagcagcagtcggcggttatccgacagaaactcccggaaggagtttgtccgattcatgggcaggcctccgttcatagggtttttgtaaatcctatgaacggaggccgcgatttatgcctgccggtcccccgccagggccgcctgaatcatgatcgcgcattccaggcgcttcttctcgagcgcgcaggacaaggcgtgcggccggagtagatcgccctcatactgctggttattggcgttgcagccgccggaacagtaaaacttagcccagcaggaccggcaggtctctttatgatacaccgaggtgcgggcaaaccgctcctttttggaaaggtcgtattctcccgtgaggacgtttcccatctgccattcgggctgcccgacgaactggtgacagggaaatacccggccctcggggtctacggccgcatattcgttgccgcagccgcagccccgcagccgtttgatggcacagggaccctgttccagatcgagcataaaatgaaaaaagttgaaccgctctcccctgcgtttcatttccaggatggtgcgggcgagacgatcatactcttcaaaaatcgccggcagatcctcttcccgcagggaatacggcacgtccgggtctgtcaccaccggttctacggacacctgatcgaagccgagctccttcatatgcaggacatcctgagaaaaatcgaggttgtcccgtgtaaaggtgccccgcacataataatcgcggtctccgcgctgggcgacaaagcgctgatatcgggggacgatggtatcgtagctgccctttcctcccgcgttgggacgcatggcgtcatttatatctttccggccgtccagcgacaggaccacattctgcatttctgcattgagaaacgcggtggtctcctcatcaagaaggacaccgttggtggtcattgtaaagcgaaataccttgtcgtgctctttttccagacctcgtgcgtacgctaccgtctgtttgacgacgcccaggttgagaagaggctccccaccgaaaaagtcgagctccagatgccgtctgggacctgattgtgcgaccagaaaatcgatagccgccttggcgacctcgaacggcatcgtctgaggttttccgccataaatgccctgtccggcaaagcaatagcggcaacgcaggttgcagtcgtgtgaaacgtgcaggcacatcgccttgaggggcgacgcagtcaacgcatcggcatatggctgataatcatcttcgctgtaaaggagtccgcctttccggagctccaggagctcggcatatgtatcccgtacttcatcctggccatatcgccgggaaaaatgctccaggagagccggggggcaggtttccggaaggtcgtccggaaaagaaagaagcaactcgaaggccagctcgtccaatacatggaccgcaccgctgtgcacatccaacgcaatgcgcaggccgttgttttcaaagcagtggatcatacgatgtttaactcccgtttcttcatacaatacttcggtttcggcgccggcgggaaaacagagaaaacagggcggaatgttccgccctgtcccccacccggtcagcttacttttcgcacttctgattggcaacggtgcaggaagtcttgcaggcggactggcaggacgcctggcactcgccgcatccgcctttggcagcggtggacttcaggttctttttgttgatcgtctggatgtgtttcattttctattcctcctaagaactgtacatacacataggctattttaccggcggcgtttcatattcacgccgatgatgccgcccacggctcccgatgccaccataactgccagctttaccaagatcgtggtgccccgtacgtcctgcagcacggcgaacccggcgatgatcaccaccacatacaggagaagcccggcgccggcgccgtaaagcagccccttttccccggaaatcctcgccgagacgatcccgccgataaaggagccgaacgcggcggcgacgatcgccatgggggtaacggcggccttggggatattctgcgccgccataacggccgccatcaccagcagcaccagcaggcaggatatcgcgcccacacaggcgccgatcacgatgggacgcgcaatccgtttcaggatcgccgaatcctcgttgtgcgattttgctttcatacctcaccctccgccttcctatgaatcgagtcccttatccatagcttattctccggcggacggttttagtactggccttggggctttctttgatgagtcaggcaggcgggtttcatccggctgcgtcaatcgtcatcgtcgtcgtcatcgtcgtcgagctcgttcggatcatggatggtctcgcagctctgcaacgcccactttttgatcgtcatcttgttccggtcggcgccggtttcgatgacgagggcatcctccttgatattgactacacggccgcagatgccgccgatggtggtgatttcatctcccacccggatgctgttgcgcatccgctgctcttccttctgttttttgcgctggggacggatcatcacaaaatacatgagcaccacgatcagcacgatcgggccccacatgatcagctgcgccagaaattggttggtgggctctgtcgcctgttccccttccgcgagaatgggcataatgtctatcaaatgtagcacctcctaaaaatcccttctattatatcggttttttgggacaggcgcaaccccttttcacggaaaagaaaaaaatttacaatcccggggccctcttatccaaaatctcccggtattcttcataaaacgcagaaaatgtcccattttcgaggctttcgcggatccgttccatcagggtattgtaaaagaagagattatgcatcacgcacagccgcattgcgagcatctcccccgctttgaacagatggcggatatacgcccgcgagtaccggcggcaggccgggcagccgcatgcctcgtcgaggggtgagagatcccgttcatactgctgattgagcaggttgcgccgcccgctccaggtgaacacatgcccgtgccgggcattgcgggccggcatgacgcaatcgaacaggtcgacgccgcgcgccacgccttcgaggatattgaccggtgtgcccacccccatgaggtaacggggcttatccgccggcatatacggttccaccgcttcgatgacgcgatacatcaccggggcgggttcccccaccgccaggccgccgatggcgtaaccgtccaggccgagggcggcgatgtctttcatgtgggcgacgcgcaggtcgtcgaatgtgcaaccctggttgatcccgaacagaagctgccggggattgagggcagcgggcagggcgttcagccggtcgtgctcctccttgcatcggatcagccagcgggtggtgcgcgcgcaggactcccgcgcgtagtcataggccgcgggattctccacacattcgtcaaaggccatggcaatggtggaaccgaggttggactggatccgcatgctctcctccggcccgataaagagccggcggccgtcgacatgggaggcaaacgtcacgccctcttcccggattttgcgcaggccggccagggaaaacacctggaaccctccgctgtcggtcagaatcggcccctgccaacctgtaaaggcatgaagccctccgagttcccgcaccagttcgtcccccggccggacgtgcagatgataggtgttgcagagctgcacctggcatttcaggtccttcagatcgtgcgcggataccgcgcccttgatggcgccgcaggtcgcgacattcatgaacgccggggtttcaatcgtcccgtgaggcgtctcaaaccgcccgcggcgggccgtccctatctgtgtgagtatctccataaagccctcctgaagtgggttcctttgtcgaaagcagtatcagtatagcgcatcggggcggcggcatcaagtatcaagaaggcagctccgtcaaaagcacccgcagagaggggacgaaccggcaggggccgggggccggcttcccacggcggttgagccacacggccgggatccccactgccgcggctccccggacatcgctggaaaacgagtccccgatgtgccagacctctcccggctgcaatcccgtccgacggagcgccaaatcgaacagctcccggcgcggcttgtacgaccgggcgtcctcctgtgccagggtgccgtaaaaatcgagaaacagggccttgatcaactcgtctccccctttttgttcacttttttccagtctagcagatgccacgggattctgcaagccggataaaatggttgcaatcgcaactgctttgtggtatattggttgcgaccgcaatcaattgatgagaaggtggaaacatggactccctcatgaaatatatcagccggatccatcgctgctccgggcggttccggggcgataagatcgaggggctgaacggacggcagcacacctatatctttcacgtctgcaaacggccgggaatttcacaggatcagctggcccgtcacatctgcgtcaacaagagcaacatcaccaggcagctgggggcgttggagcaggcgggattcgtccggcgggaatccgatccggacgaccggcgggtcctgcgggtatatccgactgaaaaggcggaggcggcgctgccgcgggtctgcgagctcatggaggaatggaaccggctgctgctggaggagctgaatcccgaagaacaggcctgcctcctcactttactgagccgtgtcacgagaaaggccatcgccgccgcggaaccggccgacgcgccgcggccggacgccgatatgcctgtttgataccgggtggccgaccaacacagtgaaaggctggatcacttgccatgaaaagaatcttcccctatctgagaccgtatctcccccgcatctccctggggctcgcgatcaagttcaccggcaccatcatggatctgctgctgccctggattctatcgtatatgatcgacgatgtcgttccgctgaaagaggtgccgcgaatcgttttctggggcggcgccatggtcgcctgcgcggcggtggcactcattaccaatatcgtagccaaccgcatggcgtcctgggtcgcccaacataccaccgaagccctgcgtcatgacctcttctccaaaatttcgcatctctcctgcgggcagatcgacagcttttcgatcccctcgctggaatcccgtctgacctcggatacatataacgttcatcagatgatcggaatgatgcagcgcctgggtgtccgggcccctatcctgctcataggcggcatctttatcaccctgatgctcgaaccggtgctggccctcatcctcatcgccgtcctgcccctgatcgccctggtcatatacggcgtgtccaagaaagggatacccctttacacaaggctgcagcagggggtggatgcgatggtacggacggtccgggaaaacgttaccggcatccgggtgatcaaggcgctctccaagaccgactatgaaaaggagcgcttttcgtccgtcaacagcgaggtggtcaggcgggagaagacggccgggatcaccatggctctgaccaatcccttgatgaacctctttttgaatgtgggtctaaccgtcgtcattatcgtgggcgccttccgggtcgacagcgggctgacccagccgggcaagattctggccttcctcacctatttcaccatcatcctcaacgccatgctctccatcacccggatgttcgtcatgctgtcgaagggaaccgcctcagccgaacggatccgcgaggtgctggacacgccggaggatctggccctccttccttcggacgatatggatggggcgtatcacatcatatttgaccgcgtcaccttttcctatcagaaaaaggaggccaatctgcgggatatctctttccgcctgaagcgcggagagcgcctcggcatcatcggggcgacgggctgcgggaaaagcaccatcgtgtctctgctgatgcgcctgtacgacgcagacgcgggcgagatccggatcggcgggcagcgggtggaggcgattccgccggaagtcctgcacaccaagttcggcgtcgtgtttcaaaacgatatcctctttgccgacaccatcgcggaaaatatcgatttcggccggggcctctcccgggaacagatcgaaaaagcggccgcctgtgcgcaggcgatggagtttatccagtcgctgcccgacggattcgaacaccggctgacggccaaggggaccaacctgagcggcgggcagaagcagcgcctcctcattgcccgtgctctggccggcgatcccgaaatcctgatcctggacgattcctcgagcgcgctggactacaaaaccgattcccttctccgtcaggccctggccagggagtatccgggtgtcaccaccatcgtgatcgcccagcgggtcagctccatcctccatgccgaccatatcctggtactcgaggaaggacgagagctcggatacggcacccatccggagctgatggagtcctgtgagctctatcgggagatcagccggtcgcagatgggaggtggcgaggttgcctaagggtccccgtggaatccccgaaaagcctcaggaccgcaagaaggtcctgatccgtttgtggggatatctgtaccgcttcaaatggatggtgctggccgcccttctgctgacggtcgccagcaatctcttcgccctggtcggtcccaccttgtcgggacgggccatcgacgccatcggcacggcgcccggcggggtggatttccccgtggtgttctattactgcgggctgatgatcgcgttttatctgctctcttccctgctggcctatattctttcggttctgatgatccgattgagccagaaagtggttttccagatgcgggaggatgtcttccgccgccttgtggaactgccggtgcggtatttcgacagccatcagaccggcgacatcatcagccgcatctcctacgacatcgacacggtcaacgcttccctttccaacgatcttctccaggtagcgaccagtgctatcaccgtggtgggatcccttgtgatgatgctggccatatcgccgatgctggttctcgtcttcgccgtgacgatccccatttccatcctttttacccggtatatgacccgcaaggtgcgcccgcttttccgcaaacgctcgctcaagctcggagaactcaacggctttgtggaagaaatcatcaccggacagaaaacgatcaaggcctaccaccaggaacagaccatgaccggccgtttcgacgtcaaaaacaaggaggctgtcgacgcctattacaacgccgattactacgggagcatgaccgggccgtcggtgaatttcatcaacaatctgtcgcttgccttaatcagcatgttcggcgccctgctgttcctgttcggcgggcttggcctcggcgcgctttcctcgtttgtgctctattcccgcaagttttccgggccgatcaacgaaatcgccaacatcatcagcgaactgcagtcggcctgcgcggcggcggagcgggttttccgcctcatcgacgagcccgccgaaccggaggaccgggcagaagcggctgtgctggccgatgtccgaggcgaggtggaaatggcgcatgtccggttcggctatctgccggataaaaccgtgatccacgatttgaacctgcgggccgagccgggaaatctggtggccatcgtgggcccgaccggggcgggaaaaaccaccatcatcaatctcctcatgcgtttttacgatcccgacgccggatgcatccgcctcgacggccatgagatacggcaggtgacccgaaagagcctgcggcttgcctatgccatggtcctgcaggacacttggctctttcacgggacgatattcgacaacatcgcctatggcaaaaaggacgcctcccggccggaagtggaggcggccgccaaagccgccaggatccattcgtatatcacccgtctgcctgaaggctacgatacgatcctcaatgaggacggtatgaatatatcccaggggcagaaacagttgctgaccatcgcgcgcgccatgctcctcgacgcaaatatgctgattctggatgaagcgacctccaacgtggacacgaggacggagatccagattcaggaggcgatgcgtgccttgatgaggggcaagacctgcttcgtcatcgcccaccgcctttccaccatccagaacgcggataccattctggtggtgcgggacggcgatatcgtggaacagggcaaccaccagtccctgatggagagcggcggcatctacgccgagctgtaccgttcccagttccaataattccgaaaggcggcgcccgcatcaaacgggcgccgccttagcttcattccaccccgatgcgttcccaggaaaaaagcgcgcccgggtcgtttttcgagggattgtactcctcgtgaccgagaatatgcgaccggtcccgccgtatggccggatagcggtagaggatatcgtcgagcaaaagacgaagcgatgcgtactgcgcgtcggtgaagccgatccagccgggatccaaggcggcatattccgccggcgtcacgtacaggctcatttcctcttccgtgcccattcccagcagctcgatgccgatcgcatactgattcatccggttggtatagcgcccatcccgctgccaggtccccttgcccgcgtgccaggcggccctttcctccgggatcaggcgatggatgccgccctcccggtcgatgatgtaatgggtcgatacgccgccgtccagcagggtagcgcggcagctctccatgttgtaaggatcggccggattggtcaccagtgcgctcatgaaatggaggacgacatgggaaatcgactcctccctgtcgctggagtactgttcgaccggcagaagggcctccaggatcaccggctccggagggcgctgcgcggccggcggtaccgagccttccaaaacggaggaagcagcctcggcgggaccggataccggcggggccgtcacaccccctcggcatccggaaaacgccagcagggccgctggcaatatccaggacaaccatcgtttcatacgtatgatgcacccctcccaaaaattgatgtacggttcgggcggctttcacgccgcatatccaactgctccggccgcttccaaaaggccgtgctcacaggatgatgctcggcgataaaccggtacgggctttgacgacaggacgcctccgtttcccgatgtcccccgccaaggggacacgccgcttactggtattgtagcataatgggaggcggccggccatcctttcgcagagattcattgacattccggctgttttccagtagtcttgatctatgcactggatctatacaccggcatcctgccgtccttttcccacgggagaccggtggcgcggagttcaaaggaggtttaaactttatgaaaaaaattggcattgtatgcgccggcgataccgagctgcagccctttctccctcatatcgaagaagtgaagatcaccgagcatgccatgctgcggtattatgaggggacgatccgccgggtccctgtcgtcgccttgtacagcggcgtatgcaaagtcaacgcggcgatcgcgacccagatcctgctcgaccgctttgccgcccacatcgtcgtaaacgccggtaccgccggaagcatggacgatacggtacggctgttcgacaccgtgattgcggaacggatggcctatcacgatgtagccgacgatattttaacggacttccatccgtggatgccctcggtttatttccgggccgatgaccggcttttagagcttgccaagcgatatgccgggcaaggaaaacacccgattcatttcggattgagcgtcaccggcgagcggttcatcgagcatgaggaacgggacaggatccggcgggacggccatccgctgtcggtcgacatggagacggccggcatcgcacatgtttgctatgtcaaccgcatcccgttcctgtcggtacggacggtcacggatacaccggcagaggacggcatcgcctattttgaggaaaactgcgaaaaagcatcgggcatatccgccggtatcgtgatggatctgctggagccttttgcacagatttcctgatccgtctgtcatgccggtaacggctgaccgctttgggtatcccgcttatacgaaataaaaaaacgggtggtctgaatgaaagtttcaaaaagggcgttgctgcttatcgctggattggtttgggggatcgcagggggaaatatcctgcgcatcgggttcgccgcgtatacggcatactggagcgtgtggaacgttttgatctctttggcggtctatctggcttttgagctgtgcatcttttcccgtatggtccgcaaacataccgcgcgtatcctgggttacgcggaggaacggcagttttttctcaagtgctttgatgtcaaggctttctgcatcatgggattcatgatcgcgatgggggtgggactgcgggtatcgggcttatgccccgatgtcttcattgccgttttctacacggggctgggagcctctcttgtgactgccgggatcctgtttttgaggaattatatccaagctggggcggccggcaccgaggacgccggccagggtaaggaagaaaccgacggcgatgcgtaggagtatcggatggaaaggccgtcttttttacttatgatattttccgcccgactgaatctgcatggaccggtagagctgttcgagcaccatcacccgcgcgagctggtgaggaaaggtcatgggggacatggagagccgcagccgggccgtctgtttgacctcctccgacaaaccgaaggagccgccgatatagagcgcgatgtggctggccccctcaaccgcccatttccctatggtctccgccagcttttcggatgacagccgtaccccctcgatacacagggcgattcctgccgttcccgtgggggtccgatccaggagccgccgtccctcagcctggattccttggaggatctgggccggggatggcgcggagggcagcctctcctcctccacttccacgatctggagcttcaagaatcctcccagacggcggctgtattcctcgcatgcggcccgccaatacgcctctttaagacggccgacacagagcagcgtgcagcttagcatcgtctttcctcctttttggaaatgtgcctatatgcagtataccatggcagccggccggctttcaattgctttcaaacagagatcaaaaacccaaagatttttcacatcgatatctcacgaagctctatgaaagcaggacatcctgtggtatactggttttgtccaatcctttcaccgaagaacggttccagccgatctgatcggatagacggtggtctgtccgggtgagcgtcaacccatgcaggcccgtggaggatgtcctatgaaaaaacacgatctgaccgatctggttcaaaaaacaaaaaccagcaaagccaccatcagccgtgcgctcaaccattgcccgggggttgatcctcagacgcgcaggcggatattggaggctgctggaccgcaatcctcttcctccgatgccgatttggtgatgatcctgcccgataccccccgctatttttggaatcccgcctttacggcgctgcaggcggatacagcggatatgcggcggcgttttcatctctactcccgcctctatgatacaagtgaggtcggattgtatctggaacaggctgccaggcacgaagcgcgtctgatgctgctttcgatcgcagatacaccggaaaccctgtccctgcttcatgcctatgccgggaaaatccctcttttcttcctctccgagtatctcgatgtccccgggacattctacataggcagcgacgcacacgaggatggaaaacggctgggtgaagcctatttggcccattttcgccgcttctcccgtgtggtctgcctttccagccacgccaacggaaacgggcgccgccgtttggaaggatttaccggagcgctcctgaatgagggaagcccgccgccctgctccatcgccctgccctcgcctggaaagtccctgccggcccagctcgcccgtctgcttcacgactcttatccggatggattcgactgcatcgtgtgcgcggatggatttcttccccaggtctgtctggccgtacaaaagctggggctgcagaggcaggtgatctgcctggggtttgaaaatccgccgggcaaccatccttatcttgaatccgggatgatcgccgcgtatgtggagcaggacatcgtcacacagtgccgcaccgcggtcactctggcgagacagttcctcgaaaccgggacctatccggcgtctaaatacacctactgcccctcttccctgacgatcaatcccctggcgcttgaatgaaacgggttttctcccaccagactccccgtcttcattatttcttccactttcctccgttgtatcttttccaaaaacggcgtacaataccatcagagctttaccggggaggttgcatccgatggagacgtgtatcaaagtggcttcattcaatatcaagcgggattcccgttttcaaggcgcacatagctggcggaaccgccgggagctggtggccgacatcatccggaaatcggggctggcgatcatcggagtacaggaattgcttcccacaatgcgggaggatctgggtgagctgctccggggatacagcatctttggggacggccgcaaacgtgaccgcgacaatgaacagtcggctatcctgctgcgggacaacgatacgaagctgctcggcggccagacattctggctttccaagcatcccgaacggtcgggcagccgcgcgtattttgctatgttcccccgtatctgtacgatgtgtgaggtgtatgtgctggaatatggccggtcgatccgggtgttcaacacccatttcgaccatatctgcggcccggcccgtacacttggggtgcggattatcctggagtatatgcaccggatgaatgagcgcgcccctatgccttctatcctgatgggtgacctcaacgcttcgccggacagcaaacccatccggatcctgcgggagaatctccacacctatcccgacatccatttaaactgtgcctacgatctcgaacagaaccgggtatccgtcaacacctaccacgggttttccggacgtatcaccccgcatcctcctatcgactatatctttgtcagcgatgaattcgtggtccgggacacctatctcgacaccacccataccggcggcctgtatccttccgaccattttcccctagtggcggtgttggagctcaaaaagcagaacgcggtgttggcgggataatcgggactgaagcaaacgggaaagcggccgatcggccgttttcccgtttgcttttatatggggccggtcatccgccattacgggatcccacaatggccctaaaaatccaagcatcggggttcggggggaaactcccccgacggttctttcccccttttcctttataataatccggggcaaatgcgtgagcattggcggggaccgaaggcagaccgcgcatgttcctatccacgtgcagtccggcccttttgcgtcaagaaaagggggccctcaggccagaacttttgttgcggtatgtccgcgcatacggtaggcaatcaaatccgatagatcctttatgcgcggccacctcctttctccgcgcggagaaaggaggcaaagaagcgccaaggaggctcccctttggaccctccagttagtgttttttaatctttatgaaactgaccggcgcgggatttcgcgccggtcagtcgttttatttggttccgaaaatccggtcgccggcatcgccgaggccgggcacgatatatccatggtcattaagatgctcgtccagagacgcacagtatacctgcacgtcggaatgggctgcctgcaatgcctccagcccttcaggcgcggcaatgatgcacatgaacttgatgttcttcgggccccgctttttaatctgggcaatcgcgtcaaccgccgatccgccggtggcgagcatcggatccaggacgatcacttcccgttccgagatatcgccgggcagcttgcagtaatactccacgggtttgagggtttcgggatcgcggtaaaggccgatatgccccactcgagcagcgggcaccagctcgagcgcaccctccaccatgccgattccggcccgcaggatgggcacaaacgcgagtttccgccccgcaatcaccttggatttggtgatggtaatgggggtttccacctccacctcgcacaagggcagatcccgtgtcgcctcatagcacatcagctgggtgatctcctgaatcagctcccggaactccttggaccccgtgttcttgtcccgcagcagggtcaccttgtgctggatgagcggatggtcggcgatgaacgctttgtttgacatgacgaaacctcccgatttttacatctatactgcataattcagttcccttgctcagggggagcttgccgcctggcccgcagctcccgttcggcctggggcagccgcagataccgcggcataagcccgtccgccgtgataaggccgcctttcccagcgaccatggccgcttccagagccacccccgccgcctgttggtaacgcagcgtttcgggtgccagaatcaagcccggcaccttgtccctcaaagcattatagcatatttccgcgccgtctccaactataaaaatggattttttcgcaaattccggaagattttgaagccgtccgcccacttcctctatggttagggcctcgtcgggcgtcagccgggatatccgtcctttttcgcaggcaaatgacgccgtatagatctgagcgcagcgggcatccatagccgccagtacgataccctcaaagggcatcccctcaatcccccgcgccatggcggcgagggtggaaacccccgcacaggggagattacgggcaaacgccagccctttaaccgccgacacgccgatccggataccggtaaaggagcccggccccgccgacaccgcaaggatgtccacgtcgtcgatcgacaggcccgcatggcggagaaggctgcccaccattgggaggagtgtctggctgtgtgtcaatcccgtatgtgctgctgcacttgctacaagccggttcgtccccttcgggttccaacgcagcaaggcgcaggaggccggtcccgccgacgattccagcgccagaatgagctgccctttcccggtttcatccatctgtgtcgtgttcatccgcacctgtcctcctccacgcctgtgaccgtaatccggcgctttgtctcccccagcgcctcgaaccgcacccggatggcgtcggggggcagggcggcttcgatgttctcgctccattccacggcgagaaccgctccccggccgatatagtcaaagaaaccggtggagtcgagatcctcccacccgttcacacggtacatatcgaaatgcacgagaggcggcgtgcccccatattcgtgcaccaacgcgaaggtcgggctcgatacttcggccgaaaggcccatcccttcggccatgccgcggacaaacgcggtttttcccattccgaggccgccgtacaaggccaccacactgcccggatgcagccgggcggccagccgggctcccgccgcctccgtttccctttcagaacaggtttcccactgcacggccgccctctccttcctcaaaaagataaactttcttaaactataccacatttttcataaagtgggaagacggaaacttgaatagcgacgcaaaaaacggtataatactcctaatgtgagcagttggaaagaaattccggttgtcggcttcagaccaaagagttttcgcaagccccaaaacggcaggtacgagtcgctgcacggggctggcgggccacgcattgctggtttgcgaaaaatctgtgtaatcccgaaaaaagcatgacgctttgcggacctctaaaagtgtcggaacggattacatatgttcaaagttatcttcatcgttacaggaggccgccttgaaaacactcagaaaaatcacccgcgcggtggggatgttcatacggcagaccgaccgtctcctcatcatactctgtaccctcgcggcttcctacggctttttgctggtgtattccgccacgacaagcgcagggggcggcttttccgactgcctgatgcagctcgtctgcatcgcgctgggcatcgtcgccgccctggtcatatccaggctggattacgagttcatcgcgtccctctggccctttctcgccggagtatcggtgttgctggtgctgctgaccttcacctccctggggtacagtgtgcccggtactgacgatcaaaactggctggaaatccctctggggccaaagacctttctcttccagccgtccgagcttctcaaaatcgcgtttatcatcaccttttccttccacctctccagggtccgcgaacatatcaaccggccgctgaccgtccttcttctgtgcgctcacggcctgtttccggcccttctggttttcgcgcagggggacgacggcaccgccgccatcttcctctgcattttcatggggatgatgttcgccgccggtctcaaacccctttatttcctgatcgggtttgcaggggttttggggcttgtcccggtcctctggagccgtctggacgagaacaaaaaggcacggttcctgagcattgttttcgtcgatcaatatgtggaaagcaccggctggcagcagcagctcggcctgacggctatgggatccggccagctgtggggggtgggctatctcaaaggcggggggcatcagctctatgcccggaacaacgacttcatcttcaccgttgcgggagaggagttcggcttcgtcggctccctgcttctgatcgccctgctggtgctgatcgtgctggccatattccgcaacgccatgacggccaaaaaccgcctgggcatgttcatatgcgtgggcatgatgtcgctgatcggcttccagtcggtgatcaacatcgggatgaccgtccggctgctgcctgttctcggcatcactctccccttcttcagctcgggcggcagctcggtcctcaccctcttccttggtatcggcctggtcctgagcgtccatcatttcagccatgccggaaaaagggaaaccattttcaccaaacgttcttaaaagcccgccggcctcgccctctatggaaaggggcctctcctttcggagaatccaagcggggattgatcgcttgataggacatcgctccgcggagttttccgcggagcgatgtctcgtacagtatgattttatagccatccaagccctcaggacggcagcccctttatgtatgggcgttggttcaaaagattccgtacccgccgactttcctaaaaagaaaatcggcgtaaacgccggcacctgaacctacgccatacagagaggggacccgggtgtctgagtggtcatcatttcataaaaataaaaccacccgttttgccggcagagcaacaagctccagatgtggagaaaacggcttatctgttaccgtccggcaacggcggaaccggacgccggatcccggcgttttttcatctgccggtccaattccgccagcagggcgggcagttcatccggacgggccaccacaaaatccggcgtctcctccggcacacgaggctgcaggcggtaccgcgtcgtccagctcatcagaatggaggtgagccccagccggttggcccctgcgatgtcccgttcgaggttgttgcccaccatgacgatccggtctttgtcggcatcggtaagccccatctgttccatcgcggaaatgaacatccgcgcatggggtttacagacccccaggtcccccgatatggccctggcttcaaagcagccctccagcccatgctgccggtatatgcggtcaaaagaggcgcgcagtccatccgccaccagggcaatgcggtagccctgccgccacagcgtcctcaccgcttcggcggcgcctgggatcagttccgcctgcacgaccacgccggtatcgtcccgtatttcggtggactcatccaccagtgtatcgccgctgtcaataaacaggatcaaatccttcaatatccgcccatcctttgcgtgaaggtattcgtcagattttggagtagccgtaactgttgacgatggcgtcgatcttctgatgtgcgcggcattgctcacattgggtggacagagaggtccgataatccggcagatcctgcgcggtgaatatcgcattgaccggaatctcccccgcctggtcgatggcgctgaaaatagcggatatccccaccagttggcccgaatagtattgcaggcattcgatgctccggttgatcgtctttccggtcgacgcggaggagatgaggagcaggatgcgtttgccccagatcattttctgtgtgttatcgcggaaaatcatctggttattcgcgttgagctcgggcgcgatgacacagatatcggcgccggtattcggccccctgttcccggttttggacagttcatccgccaaaaacgcgccgagcatatccgtgccttccaggcagatgatggtatcgataggcgttgccgctgcatacgccgcagcgagctccgccgcggccagcctggccatctggtaccggctcttgatgcttgtcatatccacgtaataattcacatgagaatggttggtcgcaaaatgccctggtataatgccgattttgatgcctttgttgccacgggcggcgatctcctgaattctggtttccatgcggattcctcctgtcgtttgcggcgtgtgccgcatgttgtggataccgggtcccccacgagacccggtagatagattgtaccattttttataagatattgcaatgagtatatggatttttatggaacatatccgaagactgtgtatgatttcgagaacatcgaaaccgcttcggcaaggtacagggatacagaaagccccgtcttccgtatgaatggaagacggggcggatggcgggaacaactcaaagcagggattcgtacagggacacgatatcctctatcgtcggatctttggggttgcccggggtacaggcgtccttggccgccgattcggccaggaaggggatatcctccctatggacgatctcccccagatcggcggggatgcccacatcggcggagagctgccgcaccgcatccacggcggcttttcggtattccgcctgcgtcatggtttctgtcccctggacccccatggccttggcgatggcgcggtatttttcgccagtggcgtccgcattgtattccataacggtcggcagcaggatggcgttggccacaccgtgaggggtatcatacacagcgccgagagcgtgagccatggaatggacgatgccgagccccacattggagaagcccatgcccgcgatatactgggccagggccatttgctcccgtccttccttcgtgttccgcacggcatcccgcagggagccggcgatcagctcgatggccttgagatggaacatatccgtcatctcccaggccgccttggtgatatagccctcgatggcgtgggtcagggcatccatgccggtggcggcagtgaggccttttggcatggacgccatcatctcgggatcgacgaccgcgacgaccgggatatcgtgggtgtccacacagacgaatttacgcttcttctccacgtcggtgatgacatagttgatggtcacctcggcagccgtgccggccgtggtggggaccgcaatgatcggcacgcaggggttcttagtgggagccacgccctccagactgcgcacatcggcaaattcggggttgcgcacgatgatgcccaccgccttggcggtgtccatggaagagcctccgccgatggcgatgatataatccgcccccgcagcctgaaaagcggacacgccggtctggacgttctggatggtggggttaggcttaatgtcggagtatagcgcataggcaagacccgccttctccagcagggcggtcacctttcccgtaaccccaaatttgacgagatcgggatcggagcagacaaaggctttgcggt

SEQ ID NO: 719 - DNA, 7465 bp, Unknown
  16S sequences of unknown bacteria
gaagatcaagttcaacaaggtcttcggttattatctggaagtgacgaattcctacaaggatctggtgccggaggattatatccgcaagcagaccctgaccaatgcagaacgctatattactccggagctgaaagaactggaagagacgatccttggagcagaggagaagctgaccgcattggagtatgaattgttcagtcaggtgcgggatcacattgcgtcccaggtgcttcggatccagaagaccgccaaggcggtggcaaagctggatgtatatactgctctttcttatgtggcagaaaaaaataattatgtgcgtccgaagatcaatgccaaaggtgtgatcgatattaaaggcggaagacatccggtggtggagcagatgatatccaatcatatgtttatcagtaatgacacgtatctggataatcagtccaaccggatctccattatcaccggaccgaatatggcaggtaaatccacctacatgcgtcagacggcactgatcgttctcatggcacaggtgggaagcttcgttccggcagacagcgcggatattggggtagtagaccggatctttacccgtgtgggtgcatccgatgacctggccagcggacagagtaccttcatggtggagatgaacgaggtctccaatattttgagaaatgcaaccgccaacagtcttttgatcctggatgaaatcggaaggggtaccagtacctttgatggcttgtccatcgcatgggcagtgatcgagcatattgcagataaaaaactgctgggagccaagaccttatttgccactcattaccatgaactgaccgagctggaaggcaccatggaaggggtcaacaactactgtatcgctgtcaaggaaaaaggcgatgacatcgtatttttaagaaagatcgtcaaaggcggagcagataaatcctacggaatccaggtggcaaagttggctggtgtgccggacagcgtgatcgccagagcaaaggaactggtggaagaattaagtcaggcagatatttccgtcaaagcgaaatcaatcgctgaggaaagccaggcaaaggcaaagcagaaagccaaaccgaagaaatacgacgaggtggatctggagcagatctccctgtttgatgcggtgaaggatgatgacgtggtgaaagaacttcaggagctggacatctccaatatgacgccgatggatgccatgaatactttgtatcggcttcagaataagctgaagaaccgttggcagagctgaacatagagagaatagaaaatgggaaagattgcagtattagaccaacagacaattgataagatcgctgccggagaggtggtggagcgcccggcttccgtggtaaaagaactggtggaaaatgctattgatgccaaatccacacaggtgaccgtggagatcaaagacggcggaatcggatttatccggatcacagacaatggaagtggaatggaaaaggacgatattccgctggcatttctgcgtcattccaccagtaagatccgaagcgcggaagatctgaacggagtgtcctcccttggattccggggtgaggcattatccagtatttcggctgtggctatggtggaactgatcaccaagaccagagagagcatgatgggaaatcgctgctgtattgagggcggtgtacagaagacactggaagagatcggtgcgccggacgggaccacatttataatccgtaatctgttctttaacactccggcaagaaagaaatttctgcgaagtgagatgagtgaaggttcagcgatccatgagttgatgacccatctggcattgtctcatccagaggtggcattcaaagtactgatcggtggacagatgcggatccagacttccggaaatggaagcctcaaggatgtgatctatcatatctatggaagagatgtggccatgcgtctgattcaggtggatcggcaggaaggccttgtgcatattacgggattcctgggaaaaccggagatctcccgtggaaatcggaattatgagaattattttgtaaatggaagatatgtgaagagcaagatcattgcaaagggtatagaagacggctacaaaagctttatgatgcagcacaggtatccttttgtatgtctggaattccagattgatgggactatgctggatgtaaacgtgcatcccaccaagatggagatccgattcagcaatcagaatctgatctacgatctggtggaacggacggtgaaggatgccctgtccggaaaagaattgatcccggaagtgacgctggatacaccggcgcggaaacccatagcaacgcagacatcagagtcgagatcgcagatgagcacatctggtatgccggaacagcgggtatctgcgcccatcacaagaacgatcccacagcgggcagtggtcagtgagcagcccatggagtggaaacgaccggagagcagaccggcagccgggattgtgcaggattcagcaccggcgagggcagtgcagacagagaaagttccgctggaaaagctatggaagacaccggaaccgacaccgatgaaagagcagccaaagccccaggatgcaggtcttgattactttatggagcagatgcgcaaaagggtggaagagcgtcatcgtcaggaggcggaagccgtagccgagaagcctgtgccgaaaatgccaacagtagaggatcagacagcactgccggaaccgactgtaagtcagccgactacaccggaaccgacccgacagccaccggctccccagatggacaaaccggagcagatggagcttttcgacggtaaactgctctcaaaagaagcagcgatccatcatgtgatcatcgggcagttatttgatacttactggctggtacagtatgcagacaagctttacattattgatcagcatgcagcccatgaaaaagtgctgtatgaaagactgatgaaagatctgaggaaccggacattccagtctcagttattatcgccgccgatcatactgaatttaagcatgcaggaagaggaattgttcctgaaataccggaactgttttacagacatgggatttgagatcgaggagtttggtgatcgggcctatgcggtacgtgcaattccatctaatctgccaggaattgccaagcaggatattctgatggatctgctggatggtctgtcagacattacggggacagccagttcagagacgctgcttgacaaggtggcatccatgtcctgcaaggcagcagttaagggtaatcatcagatgtcttccatggaggcgaaggcactgatcgatgagcttttgtcgctggaaaatccttacaattgtcctcatggaagaccgacgatcatttccatgagtaaatatgagctggagaagaaattcaagagaatcgtataggaaggaaagaggcttatgaaggagccattaatcatattgaccgggccgaccgcagtgggcaagacccatctgtccattgctcttgcaaaagcagtggggggagagatcatttcggcggattctatgcaggtctacaaacatatggatataggttcggcaaagattatgccacaggagatggacggagtccgtcattatctggtggatgagctggagccttttgaagaatttcatgtggtgcgctttcaggagatggcgtgtgctgccatgaaggagattcgaagccgcggacacattcctattctggtgggaggaaccggattctatattcaggcagtggtgcgggatattgattttacggaaaatgaagcaagtccctatcgggcggagctggaagcactggcagaggaaaagggaagcacctggcttcatgaggaactgcgtaaggtcgatccagaatctgcagaagccattcatgaaaacaatgtgaagcgggtcatccgtgcactggaattttacagactgaccgggaagaagatctcggagcacaatgaagagcagaaggagcgccagtcgccctatcattttgcctattttgtgctgaatgatgaaagagaacatctgtaccggcggatcgagcagcggatcgatcagatgctggaacagggattagtggatgaagtaaagaagctgaaaagcatgggctgccatcaggacatggtatccatgaaagggcttggatataaagagattctggactatctggacgggatcactacattgccggaagcagtagaggtcctgaagagagataccagacattttgcaaagcgccagatcacctggtttaagcgggaagaagatgtgatctggttaaacaagcaggactacgcatatgatgaggacaagatcctcggtactatgctggaaatattaagagaaaaggatattataaaatgaacttaagtgaaatgtatcaggagatgggcattgatcaggatgtatatgcctatggacagaaaataacagaggatttaaaggaacgttttgcagcgatcgatgagaccgcagagtacaatcagctgaaggtgctgcatgccatgcagaaaaaccgcgtcagcgatattcattttgctgctaccagcggatatggatacaacgatcttggaagagatacactggaatccgtatatgcagatactttccatgcagaggcaggactggtgcgtccgcagatcacctgtggaactcatgctctggcaatcgcactggcggcaaacttacgcccgggagatgagcttttagctgtttccggaaagccttatgacacgctggaggaagttattggaatccgtccaagcaatggaagccttgcagagtatggcgtgacctatcgccaggtggatctgaaagcagacagcagttttgatctggatgggatccgtgcagctgtcaatgagaagaccaagatggtgcatattcagcggtccaaaggttaccagaccagaaagaccctgtctgtgacagagattggcgaggtgattgcatttgttaaatccatcaaaccggatgtgatctgtatggtggacaactgttatggtgaatttgtagagcggatcgagcctacagatgtgggagcagatctttgtgtgggatccttgatcaagaacccaggcggcggactggcacccataggaggctatatcgtaggaaaagaggcttatgtggagaactgtgcataccgcctgacttccccgggtcttggaaaagaggtaggagcaactcttggagttatgcagtctttctatcagggatttttcctggctccgaccgtgactgcaggagcactgaaaggtgccatctttgcagctaatgtgtatgaaaaactgggattttctgtacttcctgatggaactgagagtcgtcatgatatcattcaggctattacttttggaaaaccagagggtgtgatcgaattctgtaaaggaatccaggcagcagcaccggtggacagctatgtggagccggagccgtgggcaatgccgggttatgacagcgatgtgatcatggcagcaggtgcatttgtgcagggatcttctattgagctgtctgcagatggaccgatcaaaccgccctatgccgtgtatttccagggtggacttacctgggaacatgccaaatttggtattctcatgtcgctacagaagttgaaagatgcagggatcgcaaacttataggatgactctatgaaatgtgcacattgcggggcgaatctgaagctgacggatgaatattgcccttattgcggaagaaaaaatacgcagagcagtcagcatgtaaaagaaaagaaatattatgaaaaggattccacagatacccgggagaaggtacacactgtataccggagttcttcggaactgcgggtgcggggaatcgcgatccttatattggcagtgctggtgatcgctcttctgtttgtcactttttatgtggatgacagaatatattacaggaagcaggaatgggcggtgtcccatgaggatgaagtatccgcacagatccgtcagtatctggatgaggatcggtatgaagctttttatggatactgcgatgcttataacctgactggctggacggccgggccgtttctcaaataccgtccgcagatggaagcagtccgtattggtatgtttattgaccagcgggcaaatgaatatctgactgcggattctgtctatgggcagaacagtgcaatggagagcatcagcggccttctgccggaattttacaacagagacagcctctgttatcagtccagagaggtcatggatccggatgaagtgaatgaagatctgaaccgaatctatgagcatatggaagaaaaattgatgatttattttggtctgacagaagagcaggcgcggagcctttcctctatgagtgaggaagagattctgcttctgctggaggaggcaagagatgagtagcatacaatgcagatcctgcggagccatatttgacgatcatctgactgaatgtccctactgtggcgcaacttgtatcaaagggtcggagaacgcgtttttacgatatcttaagaaactgacaagaagggttgcagatgctccggcgcagtatgccagggaagggcagaaagcatggaaacatgtggtgatcctggtcgtctcgaccatgctggtcgtgatgctgggagctacggcattatttacatacagtaacatggaagaacaggcaagatgccgacagatcaaggaaaccatattacatgaacaatagagaacgaaaagaacatgcaaaaagcatgaaagaatttgaccgtgactatcggaagacaaaggaaggtgtctggaagcagaccagacagtatcagactggttcacgcaaaaaagtggtgattggattggctggatttttcctgatcgtgttctgcatttttatggcagaattacaggctggagcattggaaaaatctcttcgccgctggaaagcgggaaacaactatgatacagttatcagtcagattcaggagtatctggatcagggcgaatatggaaagttatttgagtatggagaatattaccatctgacggattcggaaaaaggaaaatttgcggactactacaatgtgttctggtgtgcatggagatacgacagaactgccggtgatattgacagctatttaagaagtcaggactatgaagatcagagcatcagagacagttatttacagagtctggcggatagtctgtcgtctttttatcaggagagctggccggatcagtacccggaagagatgcgctccatctatgagaccatgagaaccagaatgggagaattgctggaagaaagaatcggactttcggaggaaacagttgaagaactggatggaatgacttctgcaaggatcgcgaagcttcttcgggaaaggggacaggcagaatgaaaaagttattaagtctggtgatcgtcattctgacagcccttatgagcattgaactgatcgccattgcagacaacgccattggatttctgccg

SEQ ID NO: 720 - DNA, 32759 bp, Unknown
  16S sequences of unknown bacteria
atagtcaagctgttgctgaacggtgcaggtttgttcttttattaaaatccccgaggaaaaagtgaagaaccaaaagaagtgtatctcgttttttgcgagatacacttcttttgttttaaagactaatcatcatcgtcgtcgtcgtgatcgtcgtgagaactctttttcgatgatgccgctttcttcttggcagcggcggcttttcgttgagccgcttcacgtgctcgatcggcaaagtaggtggaacgtccgctttctgttcccttggtatagtattcgccgttgacgtgagttacgtcacttggttgggatttataatgtcccttcttcgctttcggaatctggttcataatctttccccacagagctgcagccggtccggacatggaagtgagctgcatgttcacgtcgtttccgatccacagcgctgccgcgtaggatggggtgaatccatcgaaccaaatatcgaactcgctggaggtcgtacctgttttaccaccggcctgtacgccgctgattccggccggggatccgattccctggctgacaacggatttcagcatgtctgtcatgacaaaggcaacaccttcatccagcacctttgaggattcagacttgctggtgagcagtacctttccgttgcggtcggtgaccttggtatatgcaatggaggattgacgcacaccgccattcgggaatgccgcataggcctgtgccatctccagcggaataacaccgttggtgagaccacccagagccaatgctgccgggttcaagtcgttggtaccgccttcccggtctaaagtggtgattccgaatttctccacaagatcggcaatgtactccgcaccgacctggagttccagcttaacggcgcagacgttgatggaattttgcaatgcctttcgcatcgttactgcaccgctgaaggagttgctggcgttctgcggccaggtctgtccgttaaaggtcattcgttcatccacaataacggaggacgcggtcaggtaatcgccgtaatacttgctgccctgtcggtcatggccggtatccttgaacgggaatttctttccttcggatgccaggtcataactcttctggagtgcgcccgaatatacggaaatcggcttgatggaggatccggactgacgcggattcagtgctctgttgtagagctgacgtccttgctgttttcgtccgcctaccatcgccttaatcttaccggttccgacctctacgataaccatggatgactgtggctcgatggttttctccggaagggtataggcattctcggtgatggttgccgtgttcttgcctagtttaatccaatccggatacttcttgaagaatttagcagagatgacaagattatcgttgtcatccatgctcttgtatttctccggaatattgatgtatccgccgttgtacatgtagagcttaccgccttcgttcacgtaagtcggtttgaactccaaactgtaaccggcactggtgttgtagatgttcaagcggtagccggatttgatggtcagagaaccgtcctcgttaaccttgcattcctggcttttcagcttaaattcattcttgccgttaaagaagttgcggtaggaatacaacataattccaccgccggaattgatgatatttccgtttccgtcggtgctgtaaccggcgatggacgggaagttggaatccttattgaattcttttacgatcattgcctgggcatgtgagtctaccgtggagtagatgttcaaaccgccggtgtataccagatccgttgccttgtcttcggaataatcgtacttctccatcagatcctgaataacttcatccaacaggtattcatggaagtaggaatatttgctggccttgttggagagctgtgcgttcaggaacttcgacagcttctgtcccttggctttgttgtactggtcttcggtgatgtaaccctgatccttcatcagcgccagacaggtttcccgacgattcttggattcgtcgttagctacgtatttgttcggacgttttttgatgatggtatcgttgtcatccggtgtttcaccggtacccagcatctgaaccagtgcgtagctgtccggtgcctgtggaagagctgccagagaagcgcattgtaccagcgataagtctttcggcttctttccaaaataagattcggatgccgcttcgacaccgtagttaccaaagcccaaataaatggtgttcaggtaggcttcgacgatttccttcttcgagagctttctttcgattacagcagcgtagtacatttccagcactttacgcttaatgcttcgggtgctcatggtttccggcagatagacgttacgcgccaactgctgggtaatggtactggtaccgctgatctttccggagccggtgatggactggaacaccgcaccaatcatacgagtccagttgaagccgtggtgcttccagaaggttttgtcttccagtgcaacaaaggcgtttaccaggttttccggcatatcttcatatttgcagattttccggtcctgcgtgtagtaggccgaatccaccgctctgccttcatcattgtagatgacagaactctgctggatattgtcgtagatgttcaccggatcaatcttcggggcctttgtaataatcacaaaggaataacagatgaaaatcatgacacagagaacaccggcgaggataatatctcggaaaagatggaatatgctgaatttcttcggcttattcttgatgtgctttccttctttcactatagtctctccttgagaggaatcgtaatccggattctccacgaaaagagaaaggaaacgagcaacgcgtttgcctttcttctggcgagcagctttcttttcctggcgagttaatttcggttcctttatttctttgacatctgctgcatcgtcttccagaagaacatcggaaacggcggagatttccttacttcgaatcaagtcttccgaagaaacttcgtccggttcagtttcttcggcatcgtgtgaatcttcctcatcgtgtggattttcatccgcattttcttctgactcggcaggctcctccgtcggaggcgcttccgtttctgtttcggctgtgtcatcagcctcaatcacatcatcatcggaaaggggaaggccggtatcatccggttccgtatcagtatcgtcaatgacctccagtggtgttacatcctctgtggcattttcttctgattctttggagacatcttcttcagcatcggagtccgggcattccgatgcgccatcttcaatcggctcctcggcatctgccgctgcagcttcgcttccagatgatatcaatgaattagcgtaggctgcacctgctgccgcatcggagctctccaaatcggcatccgaggcaatgtcgtcgtttaaatcttccagattcaaatccgtctcatcggaattgcgagaatcgatgctttcgaaatcgaaatcgtctgcttccgaaggtggggcatccgtttcaggttcttcatctacaacctccggttccaattccgtttctgaaggagtcgattctgcattcaaggattcttccggatcgtcaatcaagaaggacgagatatccgtatcatcctgaacttcttcgtcggcgccgaactgagaaagatattcttctacttctaaatctttgtcagtccgctgatcgttgtctttttgcatgttatatcctcccataaagatattccattatagcataatatggatacatcttgtagcttttttgaatttaaaaacaagatgatcgattcgatgttcgttagaatccaaaaatgtttcgatccattatcggactgttcagaatgccgttggcaattttagcggcggttttgtctgtaatctgcagatgaattccatccatgttccgattcttagcggaaaggaacgtcagaattgtgaaaccgcaatccggcttttccggaatcgttgcatcaacggtggaaacgtcattggctttgttatatgcatcctgaatcaattgaaataattcgtttctcgtattctcataaggagaatcggtgattgttgtattgattttcacgtcggacaactcagcagcgttgaggttttcttttacaacctgcttaagatatttgtcgttcatgcccatcgtattgattcggaggttcagcgtggaggaatctgcactgagattctgaatgctgttgatgccgaagatatctttttccttatatccttccgggacgttgtccttgtcaaagcggtaggtgccgtttttgaaggtgtagaggaaggtgatcaggcgatttaccgcttttttggaataagccgtgttcggcagttgttccgtgagctctttgtattcatagtaggaatccggaaagtccttcttgttgtcatcctcaaagtcttcaatccggtcgtccaaataggtggtcacggattccatcgaataggaatcaatcagaattgtggcctgaattccggtaggggacatattgccgttactttcgacctttacatccgccagctggaaggaaacggatttgctcttcagatgcgtgagaatgtttcccagaagcgaaatcgggttcggttgtgcggccgtagattgagaaggaacgccggtcggaatgccgccgattcgaattcggagtgcggagtcgcaccggcgagaaacctttttataaggaatcgacacattctgaagtgaatttccgaaggaacttcgagaaatgtaggaagattccccttgggtcagcaagataactcgagatttcttcggaatatattttttcgaaatattccgtgcgccggtgtgatgattattgtcattataaaagaagacaacgttcacgtcgccgtgattgagcccgtgctttgcgaagtattccgcaaccgcataggcggagatgtcctgctgaaaagttttgttgttgtattccattgccagcacggtggtcggagtgtgtttgtccgtcttggaactcgtctttcggataatcacattcttgttgtcatcgatggtaaactttacgttattcacatcgcaccagtcggtgagcaggtgggtgatgcggtcggtgctgtcaacatcttccatatggctctcgatggagtctcgcatgttgttcagttctcttttatccacgagatcgtacattcgattcaggcgagcgatgctgtagctgaagattccaaccaccaccgcagcgaacactgcgatacacaaaatgatttttttcttttttgtcattgaattataccgtctttccatatataattaatcgaattcattataacccgattcagcagattttaaaagtgaaaaaaataaaaaaactgttgcaaaggattgtgcaagtgtgctataatactacttgcgtcaaatgagatgtaaatttttgagaacaaaggaggtgcggcaaatgtccaggaaatgtgaagtttgcggtaagggacagacttcgggaaacgctgtttctcattcgaatagacactccagaagaaaatggaatgcgaatattcagacagtaagagtcagtgagaacggttcggtcagaaaggcgaatgtttgcacaagttgtctgagatctggcaaggttaaccgtgccatctagtccatacaggctgtgtaaaagtcttaaacggatttccgtttaagactttttttatatgcaaatattgtatgcagagcaattgcgctgtgatacaatttattcgatacgaggtgaaggaggtttcaatatggcaacgatgtcgaagaatgaatacggtgtcatttccgtcgcgggaagtgcaattacccggatgattgtggacaaccttctttcttttgaagataccttgctgccgtgtaatcggaaaggcaagctgcttcggaagggtatttttaccggaaaccatgagcttggaaattccgtcgaaatccgggagaagtcggaaggcattcacgtggatatttttgcggtggcggccgttcacggaactttggtgggagcttcccagcaattgtttaatatggtggaggaagatttcggcgtgctgtgcctggagaaaccggcggaaattcgaatgaatatcatgggctttctgccggagggcgggaagcagccggtgggaagaaagtataccttgagaagaagaaatgtacgggaaaaagagtgacgggatgctgaaattatcggatgacgttgcctcggttcggggtatcgggaagaagaaaaaagagtttctcggaaagctggaaatcgccacggtacgggatttgatggaccattttccggtgcggtatcgggattggcggtggaactggttttccaaggatttggaagacggcggggagtatcgcgtcgccggaaagctggagcgaaagaggttcagcgcgtacggcggccgaaacggaaaaaccccgatgctggaatgcatctttcgggacggatacggtcaatacaaggtgtggttctacaatatgcctttcttggataaaaatctgcggctgaataaagggtacgtcgtctttggcaaatgccggaggcggggctgggacgatctgccgatttttgataatccggaaatctgtccggaaggcagcgcgaaggatttggagcgaaagggatatctcccggtatacgggtgtacggcgggcgttaccaccaatgatttcaatcgatggattaagtatgcgctgcaggcactggaatacgatgcggaatggattccggaggacgtgattcgaaagcggaaactctgcaccgaaaaatataaatacgaacaacttcattttccggaatcgctgcaggggtatcggattgctcggtcgcgctatatatatgaaaatttgtttttataccaacttgtcacgcagtggaatcgagcgcagctctgtcacgaggcgggggattcctcggtggcggaaaccaatctgacgccgtttctggagaagctgcccttcgagctgacggagggtcagaaaagtgcggtgcgggacattcagcaggatttgagctcttcaagaccgatgaatcggttggttcagggagatgtgggctgcggtaagacggcggtggcggagacggcgttgtaccgggtggcggcggtcggcggacagtgtgcgttcatggcgcccacagagattctggcgcggcagcatcatgagaagctgtcggaggattttgaacctctggggattcactgtgttctgcttattagcgccctgagtgcgccggagaagaagaaggtgcttcaagaaattcgggaaggaacggccgatgtggtggtgggaacgcatgccatcatccaggagaatgtgatctttcaaaacctggaactggtgattaccgacgagcagcatcgatttggtgtgaatcagcggcgtttgctgatggagaaatcccgaatccctaacgtgctggtcatgtccgcaacgccgattccgcggacgcttcaggccacagtgtacggagatatggatttttccatgattcggtccagaccggcagagcgaaagagcatcatcactcgggtggtgaatcaccgcttgcggtcgaaagcgtatgctcaggtgaaaaaagaagttcaaggcggaaatcgggcctatatcgtggcgccggctatcgatgaaggggaagaaatggtttccgtgacagcactgtatcgagaggtaaaaaaatggttttccccggcggtggtggccgtgcttcacggaaggatggacccttcggaaaaagaacgagttatggcggagttcgctgaaggaaagattcaggttctcgtatccacggtggtaatcgaggtgggtatcgatgtgccggaagccactgtgatggttatcgagaatgccgatcggttcggcctggcacagctgcaccagcttcgcggaagagtggggcgaagcaatcggcagtcctactgctggctggtaaactacagcgattcggaaggtgcggcggatcgacttcagattatgcaggagacggatgacgggttcctgatcagtgaggaagattatcgccttcgcggaccgggagatgtgcacggaaccatgcagcacggaagcgtgagcatgctgggagaatttttgaaatatgagcgcattcttcaatatgcaaaagaggatgtggaagaaatggatttgcttcatctggatgaaaacgtgcgaaacaaaatgaagcagtacctttgggataattacgagaatacgatataaatattgctatagaaaaaaataaggagcgtgaatcaatgagaattaatgcgggagattataaatttcgaaaaattgagcttccggcggatatccggccgaccaccgagaaggttcgggaggccatctgcagcatggtgatgccgtcaattccggaggccaacgttctggatttgtttgccggatccggggtgctgggattggaactgctttcccgtggggcgggtcattgtcggttcaatgactgttccagaaagcatgttgctatcgttcaggaaaacatcgaccactgcaaggcgaatgacaaggccaccgtatccacgatggatttccgaaagtgcctggattctctgcaggaaaaaatggatttgattatcctggatccgccgtaccgggccggctattacgaagaagcaatcgagaaaataatggagaacgacctccttgcagagggaggcttaattgttgcagaacatctgtacgaagacacccttccggatgaaattgccggtctgaaaaagatgaaagaaaaaaagtacggaaccattggagtggatatctacacaagagcctaaaatggttgcatagcttgttgtattttgatagaattaactgaaaaggtaggtgaagatatgaaacgtaccgcattgtatgccggttccttcgatccaatcacaaacggtcatttggacatcgtggaacgggcagcgcatatgttcgattcgattacggtgggagttctggtgaacaactcaaagaaaccgattctgacactggaagaacgaattcaggtagtgagggaggcaacggcccatctcgacaatgtggaagtggaaagtttcggcggccttttagcggattatgtaaaccggaagcagttcagtgcagtgattcggggtcttcgagcgacaacggatttcgaatatgaaattcagatggcgcagatgaacgatcgattgtacaccggaaatacggaaaccatttttttaatgacgaatccgaaatattcttttatcagttcttcattaattaaggaagtggcgtctttgggaggcgatgtatccggccttttgccggagtgtgcgctgcaagcgattcagcggaaatttgtagagcgaacagaagacggacataattcgaatttatatgtataaatgggaggattaatgctatgagtgatgcatccattaaagtaatgcagctgctggatgaattggaagatatcctggagactgcctcgaaggttcctttctcggacaaggccattgtggatagcgaggagctttcgcagattatcagcgacattcgactcagcatgccgaaggatattcagcaggcacagtgggtgaaggatgaacaggatcgaatcatcaacgaagcaaaagcagagtacgacaaggtaatcgttgcagcgaagaagcaggcagaatatcttgtggagacggatgtaatcaagagagaagcggagaaacgtgccggtgcggtaatcgcagaggcggagagccacggacggtacatgaagctgcgttcttacgaatacatcgacaagatgttgtacgatatgcagaatgaaatcgcaaagctggcgaccgattacattcagccgatgaacgatcacttcacggagatgctgaatggaatcaacacccaggtgaacagcaaccgtcaggaaatgcgggatatggcagagcgcattcagagccgggaaacggcttcggatgaccgctatgcatcctacggagaagatgaagagtaacatcgttggaattgttgcggaattcaaccctatgcacttcggccatcgctatctgattgaagaggcgaagcgccggacgggggcgagtgccgtggtatgtgccttgagtggtaatttcgtacagcgaggcgcgccggcggttttggataaatggcagcgaacggagattgccttgcaaaaccacgtcgatttggtgctggagattccgacggtacactgcctcggaaatgcggcgatatatgcggcttccggagttcagcttctggaggctttcggtggggttacccacattgcgttcggaagcgaatccggtgatttggaaggcatgcggaaggtttctggctatatgcggaagcatgagtccgaacttcgccgaaagattgctttgcgccgaaagtcgggggagagctaccccgttgctcgggagaatgtactgagagaatccgacatgaaggaagtctctatgtatcaggcatctaacgatattttggctttggaatacctgaagaatatccgggctatgaaaccggttgccgtgcagcggcagggagccggatatcacgagacggattcgctggaaaaagaattctggagcagtaccggaatccgaaaggcgatttcggaaaatcggctgccggaggatcgggtaccctggtcttccgagaagctggatttccatatttcggaagagaaatggtttcaaggaattagatatgcgattctcatgaaaacaccggaggaactggactctgctccgggtggaggagaaggtctgggaaaccgcttgaaggaggcagctcgaaaggcgcagtccttggatgagctgattctgaatacgaaatccaagcgatatacttatacccgaatttccagatggctgtatcagattcttctggggattaccgttgacctacagaatcggtcgccggaatacctgcggatactgggtttcagcgagagaggtcgggaaattctgcgggaaaccaagagaaacgaatggaaccgactgccttttgtggataatatcaacaaatccgggctagattcccggatgcttcagatggacatattggcctcggacgtgtataatctgatgaccggtcaatcaatttggaacggttccgacaactgccgaagggtagttataaaataatttagaaaaggcttgacaatatgcatgtgcaaagctataattaatcgttgtaacgcgtaaataaacaaaatcagatagagttataaggaggtgtcgacagtggcagtacctaagaggaaaacatcaaaagcaaagactggaagcagaaagtctgcgaatatgaagatgggcgctcctggactttcaatttgtcctcagtgtcatgagcctaagcttccgcacagagtttgtccaaactgtggttactacgacggaaaagacgttgtaaacgaaaactaattgatgtttgattgtgggtgattcaagcatagcttgaatcactttttttatgcaaaatatatggattttgcaatccaattgaatatggagtataataatacgatatttagttttagcttattttgagtgatatacagggagggacgatggcagtcggttctggaaagaagaaaaaacagacgaaaaaaactgcagcaaaaacaaaagaaactgcatcctctccgcatccaaaggaatggcaggagcagattcgagagcttcaggagcagcggaaacgggattaccgtatactggataagatttggggcatcatatttttggccgtaggaatttttctggtgattacgacgcagctgaacaccaccggcacctttggaaatgcgattcacagtctcgtgtttggactttttgggctgatggcgtatgctttgccgtattattttattgcgctggctctctgcctgttccttcgaaaaatgcagcacatcaatggaaggacgacgtttttctccttcctgatttttgtcatgctgtgtattctgaattcctatcgttacttggatgagacgaacatacagctgtccatctccgcaatcggtgattttttcgacggtggaattcagcttcggaacggcggcgttttcggcatgtggctgggaggattgattgtcaagttgctgggaaaaccggggttgattatttttgcggtggcggtgattgccatctccgttctcttggttgcggatacgccgatttccaagtatcttggcaagaaacgagagcagcgggaagaaaagactattcttcgggaaatgctgaccgagaagagagaagcgcaggcgaagaccgtgccggaagagagcggcgtcccgattatcaccccatctcattcggtgccgcaggtaaaggatccgctggcatttccgatggaggaaggggctcggcagaacttcatgcagaatctggagggggcggatttcggcgagtcgattgtaaccaataccggttttgggctggacggcggaaatgcttccggcgcaggtcttggactgggactttcgggaggctttgcatcgccggaaaacgcggctgcggcgccgaatccttttatggatgattttatgagtgtggattcggtaacgacggagccgatggggctgaatgcggaaccggaaaaagtgtcggcgttgtcgacacccgcggctacggaaaatatcaaagaaatccggaaggagaatactccgacggcactggacaatacggagatggcgcttcaggcggaggaaaatttggccaagaagattccggccacatcctatgtgttcccgcctgtggatttgatgaagaagccgagggcaaagcagatgcagatgaatgaacatcagcttcagcagaaggcggctttgctggagaatacattgcagaatttccacgtggacgcgagagtgctgaatgtcacccagggatcgtcggtaacgcggtacgaagtgcagccggcggtgggggtaaaggtcagcagcattacgaagctggcagatgatatcgccttgaaccttcgggcgaagagcatccgaatcgaggctccgattccgggaaaagcggccgtgggaattgaagtggagaacgagaaaccggatatggtttccattcgggaactgattgattccaaggaatttcggaacgctgcatcgaagattagttttgcagtgggaaaggacatttccggacgcaatgtaattgcgaacctgaaagagatgccccaccttctgattgcgggagcgaccggatcgggaaagagcgtgtgcatcaatacgattatcaccagcttgctgtataaggcttcgccggatgaggtgaagctgattctgatcgatccgaaagtggtggagctgggaaattataacggaataccccacctgctggttccggtggtgacagatccgaagaaagcggcggctgcgctgaactgggcggtaaatgaaatgactcagcggtacaagttctttgctgaagaaagcgtaaaggatttggattcctacaacgagctgatgagagccaatcaggagccggataaggtattgccgaaaatcgtcattattatcgacgagttggcggatctgatgatggtggcaccgtctcaggtggaagaatccatttgccgattggcacagctggcccgggcagccggaatgcacttgattgtggcaactcagcgtccgtcggtagatgtggtgaccggtttgattaaggccaacatcccgtctcggattgcgttcagcgtgtcctctcaggtggactccagaaccattctggacgtgggaggcgccgagaagcttttgggcaagggcgatatgctctattccccggtgggcgagaataagcctctccgaattcaggggccgtatatctctgattcggagaccgcgcgcatcattgattttgtgaaaaaacagggagagaacacctatgatgaatcggtggttcaaaccattgaaacaccggaaaaatcccagtacggagaggtttccgatgaattgacagaggatgccattgcgtttatcctgaaacagaaaaaggcttcagtgtccatgctgcagcggcggttccgtatcggatataaccgtgcggccagcatcattgatgaaatcgaagcccgagggattatcagcccggcggacggcagcaagccgcgccaggtgctctatacagaagaagaatattacgacgcgatcgattcgcagaataacggagcagaggaaacgacacatgagtaaaaaaatttttattgacaccttgggatgtgcgaagaatgagtacgattcccagaatttagcggcacaactgctggaacggggatgcggcttggcggattcgccggaagaagcggacatcctgattgtaaacacctgcggttttattgaggccgcaaaggtggaatccatcgaacatatttttagcatggcggcactgaaaggggaaagcaagaagctggtggttaccggctgcctttccgaacgctaccacgaagatttgtccaaggagattccggaggtggacttgttcaccggcgtaaacgattacgacgacctgccgggattgctgctggcggagagcaccggcgacaaagtgcagggggaagtggaagcggtgcttccgtatcggaaacgcgtttttccggagggaacctacacggccagcctgaagattgccgaagggtgcaacaacacctgtgcgttctgtgcgattccgaagattcgcggaccgtatcgcagcaagcgcatcgaggactgcgtgcgcgaagcggaggatatggcggcggcaggcgttcgggaattggtagtgattgctcaggacacctcgtattacgggaaagacctgtacggcaaggcgatgctcccggaactgctgcacgaattgtgtaaggtggacggaattcggtggattcgtctgatgtacgtgtacgatgacggaattaccgatgagctgattgaaaccatgaagcaggaggataaaatctgcaactacatcgatattccgattcagcacgtggcggattcggtgctgaagggcatgcgccgaaaatccaccggggattcgattcggaagacgattgcgaagctgagaaaagaaattccggatatccatattcgaaccacaattctcgtgggattcccgggagagacggaagaagattttaacgagctcctggattttgtagaagaaacgcggattcctcggttgggcgcgtttgctttttccgatgaagaaggaaccctgtcctatcggatggaaggaaaactggatgaagagacgaaaaatgaacgtgtagaggtgctgatgcgccttcagtcgggaatcagcgattctctgaatgaagagaaaatcggaaagacctacgaggtgatggtggatgaggccgtggatgaagaggcctgccggtacctgggtcgaactcggtacgatgcgccggaaatcgatgatgcggtggaattcaccggaacgacatcccatcagccgggagatattgtgttcgttaatgtaacagacagttcagaatatgatttgtatggtgaggaggtttcacatgaatttaccaaataagttgaccgttcttcgaattatcatggttccgtttttcattgcagcctatatggaaaaatggttctttgtggcattcgcgttgtttatcgtcgcgtcgctgacggatatgttggatggaaaaattgcccgagcgcgcaacctggtgaccaacttcggaaagattatggacccgttggcagacaaaatcctggtgtattccgcattgtgtctgtttgtggaaaacgggaccattccgggctggacgctgattattattctggcgcgggaatttgttgtttccggaatgcgcaccgtggcggcatccgagggaatcgttattgctgcggccatgagcggtaaaatcaagaccgttctgcagatggttgccgtaatcatcctgattattgcggtaggtccggttccgcagctgaagaccattggcatgctggtgttctgggcatccctggtaatgaccgtatattccggaacggaatatgtgctgaagaacaagagcgtattttcaatgtaggagcgaaggagaatgaacacatcgattatcgctgtcggaacggagctgctgttcggacagactgttaatacaaacgcggcctatttgtcggagaatctgaatcatctgggcttcaatgtaatgtatcattttgtggtaggcgataacgacggcagattggagcatacgctgaagcgggcactgacggatacggatctggtaattgttaccggcggtctgggtcccacccaggatgatatgacgaaggaaacggttgcgagggtgatggatgcaccgctgtacttgaatgaagaatgcctggcggaggtaaagagatatttttcgattcgaaatcgggaaatggcgcccaacaatgttcagcaggcgtacataccggagaatgcagtgatattccgaaatgaagccggtacggctccggcctttgctgtgaataaaggggataaatgggtcatctgttatccgggaccgcctcgggaactgaagtggatctttgaagacagcggaaaggatttcctgcgtaagttcaaggagaagcaaatttattaccgggtcattcgaaccatcggaatcggagaatcggatctggagacgctcctgatgccgctgattgacaatcagacggatcccaccatcgctacctatgcgaaggaaggggaatgcaccatccgtgtagcctcccagcgagatacaatggaagaggcgcaggcggcggtagaaaatatgatttcccggatgaataatttgattggttcgtatatctacagttacgatgatgaggaattgaaagcggtcgtagtgcataagctgcagaggcagggactgaccatttcttccgcggaatcctgtaccggcggtgcatttgccgcatccattacggatgttccgggtgcatccaaggtcctgagccgaggttatatcacctacgatgaggaagcgaaaatttccatgctgggtgtggatccgacagtaatcgatcaatacacggtggtaagctcggaggtggccattgaaatggccaagggtgcccgcctggaagcagggagcgatatcgccgtatccatcaccggatatgccggcccggaagcggacgaaggtcgggaggccggaaatgcgtacatcggctatgcttatgacgataccgtcggcgcggtggaactgttcaccaaaagaaatgaccgggcatggaatcgaaactatttccgactgatgatgctgaaagtcgtgaacgaaatattggatgaaataaaatagtactttttcttcggaaaaaagtacccaatgcctggtttcttaaacccggcagaattgacctcataaagtgccggagggtataatggtatcataaaaggaagcccgtaagaggttgacagaaacaggagaaacaggtattataaaagagaacaaatgttcgatataggaggaaacatggcaggaaaatcgaccgcatcggcagcggagaataaagagaaagcattggagcaggcgctggaacagattcagaaacagtacggaaaaggcgcaattatgaagctgggagaggaaggcctcaccggatcggtagacgtgatttccaccggatccatcagtttggatttggcgaccggcgtgggcggatatccgcggggaagaatcattgagatatacggaccggaatcttccggtaagactacattgactttacatgccattgcagaggcgcagaaagcgggcggaaaggctgctttcattgatgcggagcacgcgctggacccggtatatgcgaagaatcttggggtagacgtagatgaacttctggtatctcagccggataccggagaacaggcgctggaaatctgtgagatgctggcacgaagcggagcaatcgatttgattgtcatcgactcggtagcggcactggttccgaaagcggagattcagggtgagatgggtgattcccacgtgggacttcatgccagactcatgtctcaggcacttcgaaaaattgccggaaccgtgaacaagaccaatacctgcgtaatcttcatcaaccagcttcgtgagaaaatcggcgtgatgttcggaaatccggagaccaccaccggtggtcgggcattgaaattctatgccagcatgagactggacgtgcggaagattgaaactctgaagcgaggggatgagatgctgggaaaccggactcgcgtaaagattgtaaagaacaaggtggctccgccgtttaagaaatcggaattcgacattatgtacggtaccggaatttctctggccggtgatgtattggatacggcggtagaggccaagattgtggataaggccggatcctggtacagttacaacggagaacgtatcgggcagggcagagagaatgtaaaggattatcttcagagtcatgaagagatgctggaagaaatccgcaagaaggtgatggatcagttcaaaccggaatccaccgatgatgacattaaggtggacgaagacggcgttgtaatcgaggactagacgtacggcggttcatgggtgcttgaaacacctcaattggaaaataatggcagaattgtattgacataatgcgaaaatcgtgctattattcaatggttagccgctcgggtagggttataagcaatcgcacccgttcccggcgagtctggatagaggaggaaaagtattatgtatgcaattattaaaactggcggaaagcagtacagagttcagaaggacgatgtattcaagatcgagaagatcaatgctgaagcaggcgacaccgttacctttgatgaggtaatcgctgtaggtggtgacaccctgacagtaggaactccatttgttgagggcactgctgtacatgctgaagtagttgagcagggtaagaacgacaaggtgattatctacaagtacaaggcaaagaaggattacagaaagaagaatggccacagacagccatacacactggttaaggttaccgatatcgtatccggtggtcagaaggcagctgcagctgagaagcaggacgatgtaaagccaagcatgtccatgaagaaagaggaacttcttgcaatcgcaaacgagaagggaatcgaagtatccagcaaagctactaaggcagagattctggaagcaattgaagcataagaaattgactttaatttaggaggtgtcattatgtcaagtaaaaaaggagtaggtagttccaagaacggccgtgactctgagtcgaaaagacttggactgaagattggtgctggtcagtacgtaagtgcaggaagcattctcgtaagacagagaggaaccaagttccacccgggcaacaacgttggtatcggtggagatgatactctgttcgctaagatcgacggaaatgttaaattcgaaagatttgacaagaagagaaagaagatcagcgtatacagcaacgaagcttagttttttatggccctttcttggaaagggccatatttttttgtaaaacgggagataaacatgttcgtagatagagcagaaattaatatcgtttccggtaagggcggaaacggagcggttaccttccgtcgggaaccatttgtgccggaaggaggcccggatggcggcgatggcggtaacggcggcagcgtaatctttgaagcggataacaacctgcgtacccttatggatttcaaatacaagcgagtgtacaaggcggaatccggtcaggatggaatgcgccggaaacgtttcggaaagaaaggtcaggatctcatcattcacgttccggtgggtactttgattatcgacaaagaaaccggtctgctgatgaaggatatgaagaatccgggagaccgcctggttgccgcaaagggtggcaaaggcggaaagggaaacgtgcatttcaagaactctgtacgtcaggcaccgaattttgcggaagccggagcgtcggcaaaggaacgcaccgttatcctggaactgaagttaatcgccgacgtaggacttttgggattcccgaatgtgggaaaatccactcttctgtcggtggctaccagtgcaaaaccgaaaattgcgaattatcattttaccaccattgatccgaatctgggcgtggtgaacattcacgacaagagctttgtgatggcggatatcgccggcatcattgaaggtgctcatatgggctttggcttgggaattcgttttctgaagcatatcgagcgtactaagatgctgattcatgtcatcgacgtttccggaagtgaaggtcgggatccaatcgaggattataagaaaataaatgcggaactggagcagtacgatccggcactcttgaagaaaccgcagattatcgctgccaataagattgatttggtggaggatgaggaagcgctggacgcatttatggatttcatgaaaaaggaaggtcgagatgtcttcccgatttccgcagcgacccgacagggcgtggaagagcttctcaatgaaacattaaatcggattgagaattacattcctccggaagaagatgaaatcgaactcttcgactttgaaaaggatgaatacgatgcggattacaagaaactggaagcattcgtggcagaggatggcgcttacgaattaaccggcggtcagctgctgaagattttccgttctaccaactttaccgatgtgggatctatgcggtacttgtatcggtatattgtgaacaagggcggaatcgatatgctgaaggaactgggtcttcaggaaggggatacggttcgaatcgaggattacgaatttgaatattatgacgattagtctcataatgcggctcacggccggcatattgagataaaacgaaaaccacagggtttgtaaattctgtggttttattttttgtggaaaaaatctatttttaaacgtttttttcggttttctaattcattctacgagaaacgtaaaccttttgtgggagttttcggacctttgcgctttcttcttttttcaattatgatgggaaaaaagaaggaggatgagatatgattggttttattagaaaaatatatgaagaaaattccaaaatagtatttaaatttctattgatattgattatagttatattgactgttgttgttagtgtccgacagaatgcatcgaatgaaattgatttgggtgcggcgaaagaaacggacaaggtttccgcggaggaaacttcggagaaggaatactatgtggatatcagtggggaggtgaagaaaccgggggtttacaaggtaaagaagaaaacccgcttggtgtttctcatcgacaaggccgggggattaaccggaaaggcggatttggatgcaattaatcaggcttcctatgtggaagacggtgcaaagattatcattccgaagaaaggagagaataaaaattcggatgaggcgggggcagatgcgtcggaaacgtctgtcggcaatacgagtggaaaaattaatatcaatcaggcttctgcagaggaattgacatcgataccgggcgtcgggactgtaattgctcaacgaattgtagagtacaggaacggtgcgaggttcaacagtattgaggatattaaaaacgtgaagggaatcggggatgcgacttttgaaaaaatgaaaggcagtattacggtgtagacaggagtatttgttatgaataatcgctctgtgttagataattcattggataagaaaaaggattggttagagaaactccacaagacattgaaggaatcacaacattccaccattgtgttcacgttgcaaaacgaatcggattttccctccatgatgcgggaatatgcaccgattataacgtacgaccgaattatggaattggaaacgggaaatcgtgtgatggaaaatattcacacgttcttggaaacatgcaatataccggactctcgaaacggtacatcctatatttacgaatgcatttttttaattcgaaagtataaggatgaaaagtatgcggtgacgaaggatatttatccggaaatcgccaagagaaatcgaacttccgcagcggtagtggaatcggctattcgctgctgtatcaaacaaacttgggaggaaacccgagagggaagtgagacaggcatgcgggcgttgtttcagaagcgtccgtcgaatctagtttttatacggaaattatgcgactatatagaaaatgaagaattgcatttttgtaagtaattcacaaaatcaatacctcaactcattgataagtactaacttccgtgctattatgtaaatgctttgaaaaaaatgaagggggtatttacgatgggtaaaaaaagaatgttaaaaaccatggatggtaatactgcggctgcacatgtagcatatgctttctctgaggtatccgcaatctaccccattacaccatcgtcagtgatggccgaaaacatagatgcttgggcaaaccagggccggaagaatctgtttgaccaagaagtaaagattgtagaaatgcagtcggaaggcggcgctgccggtgccgtccacggttcgttgattaccggatcgttaacatctacttataccgcatcgcagggtctgctcctgatgattccgaacatgtataagattgcggcggaacgattgccgggcgtttttcatgtagcggcgagagctatcaccacgcagtccttgtctatttttggagaccattcggacgtgatggccaccagacaaaccggttttaccatgctggcctctaacagcccgcaagaagtaatggatttggcggcagtggcgcatctggcggcaattaaggccagcctgccggtactccacttctttgatggcttcagaaccagccatgaacagcagaaaattgaagtatgggattacgatacactgggaaagatgctggattgggatgccgttgcggcattccgcaagaaagcacagaacccgaatcatccgcacctcatgggttccgcggagcaaccggaaactttcttccagcacagcgaatccagaaatgaggcatatctggatgcggtagaaacagttgcttcggtaatggaacaggtgaacaaagaagcgggaacggattacaagccgttcaattattacggtgtgccggacgccaccgaagtaatcgtggcaatgggttccgtttgtgagacggcagaagaagtcgtggattatctgaatgcgcaggggcgcaaggtgggtctggtgaaagtacacctgtaccgtccgttctcttccaagtatctgtccgcagcaattccggcatccgttcagagaatcgccgtgctggatcgaaccaaagaaccgggatctcagggcgaaccgctgtatttggatgtggtaggtgcgctgaaggaacagtctcgcagcgaaattaccgttgctcggggcagatacggactgggatccaaagatacgcagccgggagatcttattgcggtatacgacaatctcaatgccgcagatccgaaaatggaatttacgatttccatcaccgacgatgtgacgcatctgtccttgccgagaacctgcaatccggtggtttcatcgccatccacgatttcctgcaagttctggggactgggtgctgacggaacagtgggtgcaaataaaaacagcgtaaaaataatcggagacaataccgacaaatacgttcaggcgtacttccagtacgactcgaaaaaatccggcggtgttaccatctcccacctgcgttttggcgatgaaccgattcgctccacctattatgtaaacaacgcagactttattgcctgccataatgcatcctacatgcataaatatcagattgtgcaggatgtcaatccgggtggaaccttcctgctgaactgcagctggagtgatgaagaactgaatgcagtacttcctgcatcggcaaagagatacattgcagagaacaatatccgattctacacctgtgatgcggtggatatcgccgtgaaactgggcctgggtgctcggagaaccaacacggtactgcaggcggccttcttcaagctgtccgaagttattccaattgataaagcggttggatatatgaaggaagcgattcggaagacttatggccgcaagggagaagatatcgttgccatgaactgcgaagcggtggatgccggaattacccatattcatcaggtagaagtaccggaagcgtggaagaatgcggttgaggaaccggccgacaagtccgtagagacagatcgaccggacctgaaacagtacgtcgaagagatattgattccggactcggcaatggaaggagattccattccggtgtctcgatttgtaaagacgaacgacggaatgattccttccggcacggccgcatttgagaagcggggcgtggccatttccgttccgaagtggattccggaaaactgcctccagtgtaatatgtgttccttcgtgtgtccgcacggcgcaattcgtccgtttgcggttaccgaggacgaagcggcaaggtccggtgcggctgcattggaaatgaagggaaagaatggagacggccggaaattcgctctggcaatctcttcctatgactgtgcaggctgtggttcctgtgtcgaatcctgcccggcaaagaacaaggctctggagatggtttccttcgagtcttcggaatcccaggaggagcagaaggttttcgattacctggagaagcatgtgggccaggaaatcggtgcgacggaggcaaaatccgttaaggaagtgggcttccggaagccgtatttggaattctcgggtgcgtgcccgggatgcggtgagtcgccttatgcaaagctggtaacacagctctttggcaaccgcatgattattgcgaatgccaccggctgcagttccatctggggcggcagtgcaccgagcactccgtataccgttgataagaacggaagaggtccggcgtggtccaactccctctttgaggacaatgcggaattcggactgggcatggcaatttcggttcaggctcgtcgcaaggagctttgcggtaaagttgctcagctggcggcacatccggagtgtgcggaagccgcggaagcgtggatgaatcacatgaatgacggcattgagtcggaggcgaccggcgataacctgctgaaggcaatttcggactgcgaactgccggaggcggcgtatgtacgggagaattccgatttactggtaaaaccatccgtatggatgttcggcggagacggctgggcatatgatatcggttacggcggtctggatcacgcactggcatccggtgaaaacatcaatgtactggtatttgataccgaggtatattccaacaccggcggacaggcatccaaatccactccgacaggtgcggtggcacagtttgccgcaggcggaaagaagaacggaaagaaaaatctggcacagatggcaatggcgtacggttatgtatacgtggcacagattgcgatgggtgcgaacccgaaccaggcgattcgcgcgattcgggaagcagaggcgtatgacggcccatccatcatcgtggcatattccccgtgcattaaccacggcatccgtaccggcatgaagaattccatgcaggagatgaagaaagccgtggaatccggatattggaacttgttccgctacaacccaacaaacgtttcggagaaaaagaatccgctgaccgtggacagcaaggaaccaaccgtagactacaaagacttcctgatgggagaagtacgttacagatcgttacagcaggcggatccggagaaagcggaaagactctttgatgaggcttctgaaaatgcgaagaacagatatgacgcattgattcgccaacgaaattctttggagaaataattttatggagaaagagaaaatcaatagaatcaatcaactggcaaaactgtcgaaagagcgagcgctgacggccgaagaaaaaagcgaacagcaggaacttcggaaagagtttattaaagaaatccgtgccgatgtacggagtcagctggagagcattgaaatcgttgattaagtacaacaaaatggactgccgattcggcagtccattttgttgtacaagattttcttttcgcgtttacgcctgttcttgcatagccttcaatgctctggacagctgatccggacatgaagtatccttgaaaccgcagtgaatgccgctgaggcggtcaatggcattttccacggtcattcctttcagaagtgcggagattccctggaggttgccgttgcatccgccggtaaagcgaacgtcctgaatgatgtttccttcggtttcaatctcgataagctgggaacaaacgccctgcggtctgaatgtaaactggttcatggttgaataatcctttcataataatttgcatttgcgaataacttacaggcccaaaacatccgaaatcttcttcatggaatccatcgcgatgaggataaactcgtcgaaggtgatgcctgtttcttcaatggccatcatgaactgacggttggcaccctttgcgaaacgagtttcgttgaagcgcttcttgatggactttggcttaacgctggccagctttttatccggataaatctgggcaacggctttcacgaatccgctcatcggatccgccgccagaatagcatactgcaaagtagtgtgggcgattacgccggattccggattgtgtgcgcagatggcatcaatcagaacttgatcgtcgtagccttccttccgaagaatgtctccggaaaccggtccgtgagtggacatatcgttcttccagtcgcaagtctcttcgtccaggtcgtgaagcagacccacaatgccccaatattccacatcttccggtgccaggcgttctgccagcccgcgcatgatggcttccacggcatacatgtgcacgatgtaatgatccgccttcacatatttgtgcagcagctcattggctttttctcttgtcagagtttcactcatgatataaatctccttttataaaaataatttattatagcaacatcttacggcagtccattaaatgtttacggcgatgtccacgacggtccggaaggaatccgcaatctgtgcagaagcctccagcacatcggagccgctgaggggtaccggtgaaattcccgccgccgcattggccagcgcagagatggcgatgatttccagtccggcatgttttgccgcaatggcttccggaacgctggacatgcccaccgcatcgcagccgatggtatggagaaaacgaatctccgccggtgtctcgaagctcggaccgctcatcatggcatatacgccttcatacaattcaattccgttagcctgtgcttcccacagcactttttttcgcagatcccgattatatacatcggacatatccggaaaacgatcgcccaatacgtccaagtttgggccaataagtggattcataccggacatattcacgtgatcccgaatcagcatcagatgacccgggcgaaaatccgggttaatggcaccggaagcgttggtgataatcaagcgccgaattcccagcagtgccataacctgaaccggaaaaatgacgtccttcatggagtatccttcataatagtgaaagcggccggacatcaccaggagggaatgaccgcctttgcgtcctgcaaaaagaacccctttgtgattcggggctgtagaagtgacaaagccggggatatctcgatatggaatctcaacgggattctccagagagtcggcgtaggttcccagtccgctgcccagaatgattcccgtgtccggcaaatctccggaaatctgttctctgatatattgcgccgcctgtttcagccgttccaatcgttccatcgctcgcacctcctaatattctttcaacttctagatgttaccacaattcctcatgtctttcaatcggaagaaaagggatttgagaagggagaaaagaacaaaaaggagagtatcccagcagaaaatgtgctataatttagtgattgcaattgttgcaacaaacagagatttgaaaaaagcaatgggaggatagatggagacttttaaagaattgttagtacggtcggtcgagcagttcggaagcggaactgcttttaccctgaaggaggggaaagaccgttatacggacatcagctttattcgattctacgaagaagtgaaatcgctggcgaccgcttttatttccaggggattcagcggcgagcgaattgccgttaccggcaaaaacagctatcactggttcatggtgaacgcggcagcgcagattagcggatgcgtaaccgtaccgctggataaggaattgaagtatggagagttcgaacagtccctggagcggtgcaaggctaaggtaattttcttcgacaagaaacaggagaaggagaccaaagaagcgattctttccggaaagacatccattgagttcgcattcccgatgtacgaagaggaggacctggagacggtcaccacgctgctggaagagggaaaggaactgattggagagggagatgtgtccgtggatcatatgcagattgatccggatgcggtatccatgctgattttcacttccggaaccacgtctcagtccaagatcgtcatgctgtcccagcggaatatctgttccaacgtgaccaacatgattcgaatcattccgttcaagacgacggataccaatatcgcgttgctcccgtatcaccacatgttcggctccaccggtcagtgggtgatgctggcgaacggcgttcgcacggtgtactgcgacggactgaagtacatccagaagaatttgaaggaatacggcgtatccgtatttgtgggtgtgccgctgattatcgaacagatgtacaagaaaatcatgaagacggcggaaaaagaaggcctggacggccggattcgccggttctccaaggtgacccgtctgctgaataaggcgaagatcgatattcggcgtcaggtgttccacggcgtgctggatgcgctgggcggaaagctgcgcatggtggttctgggtgcatccgcggcggatccccaggtcattcagggcttcaatgacttcggtgtgctttgtgtgcaaggatacggtttaacggaaaccgcaccggtacttaccgcagaacgtccggacaagcggaaagcgggttccgtgggagtgccgctggataatgtggaaatccgaattgacaatccggatgaaaacggaatcggtgaggtcattgccaaaggcgacaacatcatgcacggctactacgacaacgaggaagccacggcagcggttcttagggatggctggttccataccggagacctgggatatattgacaaatccggatatctcttcctgagcggaagaaagaagaacgttatcgtactgaagaacggaaagaatgtttttccggaagagttggagacagaaatctccgcacttccgtatcagatggagaatatcgtcgtaggacttccgaagaacggagacgatcgggatctggtggttgccctgaagattgtctacaatccggaacagtttgccggcatgagcaaagaagaaattgagaatcggattcacgaggatgtggagaaaattaacgaccgcatgccgctgtacaagcgaatcaagcgaatctttgtaacggatgagccgatgattaagaccagcaccagcaaggttcgccgattcctggaaattgagaagatgctggaagaggagaataaagatgggggaacacatggaaaacagatttgatcattattggtacactgatatccgtgaaattgtcacactgaaggatatgttggccggaagtgcggataaatatgcgaagaacccggcattttgggtaaaaacaaaaaagggccagccatacagtccgatttcctaccggcttcttcagcacgatgtgaacgccatgggaacctgcatgacggaaatgggatggcagggaaagagaatcgctgtgatggggcagggatgctacgaatggattgtcacctatcttgcggtcatgaacggaatcggcattatcgtgccgattgacaaggaactttccggcccggaaatcgagaacctgctgagaacggcggagtgcgatacgattttctgtaccaaagcggagtgctccaagctgaagggacttccgtccatccgcaatctggtggtgatggatttctacggagatcggctggatgaagaggaagtgccggacgattccaatttgaatttggagaaatacgaaggctggtttgaacaggaagaggagaagaaggtgtatgtgacctcttggaggggaatgctccgagacggcgatcagcttctcaaaagcgggaaagacgaatacctgaaggccgaagtggacccggatgctctggcggtaattctttttacctccgggaccaccggaaatccaaagggcgtaatgctgagtcaccgaaacattacggtgaacatcatggacgtatgccgaatcgcgcatgtcaccacgacggacaagaccctgtccatccttccgattcaccatacgtacgaatgcacgttgggcatgcttctggtcctctaccgaggtgccagcaccgcattctgtgaaggtatgaaatacatcacccagaacatgaaagaagcccagaacacggtcatcatcgtggttccgagagtgctggaaatgattaacgaccggattcagaagggtatcgagaagagcggtaaggcggataccttccagaacatcatgggcatgaacaagaagctccggaaaatgggcatcaacttgagccggacgattttcaagagcattcgaaacgagctgggcggaaagctgcgcttggtcatcaccggagcggcagcgctgtctccgaccatttatcgaaattttgaagacctgggaatcacggttctgcagggattcggcatgaccgagtgcacaccgctgatctccggaacgccgatgagcgcaccgaaggaacggtatcggaaagccggttccgtgggcgttccggtcaaaaccggcgaggtgaagattatcgacaaggatgagaacggaatcggtgagattctgttccgcggtccgaacgtgatgatgggatattacaacatgccggaagccaccgcagaggttctggaagaggacggctggctccacaccggcgacctgggctttatggataatgaaggctggatctatctcaccggccgaaagaagaacatcatcgtgacgaagaccggcgagaacgtgtacgtggaggagattgaggaatacatcaatcagagcccgtacatcgaggattccatggtattcccgtacgacaacaacggcgaggaaatcgtcggcgtgcagattctgccgaatatggaatacgttcggacaaagctggggtacgagccggatcgggaagagctgaaggatttgtacaaaaaggtcattcaggaattgaaccagggaatggcggtgtacaagcgcattcgtgcagtattcgtgcgaaaggatgatttcgttcgcaccaccacaagaaaaatcaagcgccacgaaaatccggttccggaggattagagggagcgggtcaatcccgtttccggacgcgcattgaagcatcgtaaatacaaagggacttgcccggcggcatgtccctttacttatgagatggattatcttagtctctggaaatcagcagctgcgcaatctgaaccgcgttggttgcggcacccttacgcacctgatcgccgcagcaccaaaggttaatgccgttctcgcacaccaaatcccgacggatgcggcccacgtataccaggtcctgatcgctggtttcaatcggcatcggatagatgtttttctctgtatcgtccttcagcttgcagcctgccgcctcggaaacagccttccgaacatcctccagatccagacggtcctttgtgatgacgtttgcggaaatggaatgggaacgctctaccggtacccgaacgcaggtgcaggaaaccttcagctccggcaggtggagaattttccgaccctcgttctgaagcttcatctcttccgatgtgtagccgttctcgccgaatccgccaatctgcggaagcaggttatacgcaatctggtacgggaaagtgctgcattcgatgtccttgccctccaaaatattgcggctctgctcatacatttccttcggtcccttgatgccggcaccgcttacggcctgataggtggaagcgtagagcgcttcaatcggggacaggcggttgatggcgttgattgctaccagcgtgatgatggtggagcagttcggattggcgatgacacccttatgggtgaacgcatcctccgggttgatttccggaaccaccagtggaacctccggatccatacggaaggcgctggaattatcgatgtaagccgcaccggacgccttgatggcatccacaaatctcttggaaatatcattttcggcggcacccagcacgatatccattccctcaaaagcagaatccttcgcttcctgaatggtgacgctgccgtatttctccgtctcgattattttcccggcactgcggctgctggccagaaggcgcagctcctgaatcgggaaatccctctcctgcagcacctttagcatttccatacctacggcgccggtagcacccagaatcgcaacattgtactttttcatttgaacctctcctttatttcgcaaagctttcgtacagaacctgaatggtcttctcaaaatccttcgtgaacacgcctaccataatgttaatttcatcggaactctgctcgatggtgcggatgttaatccggtttgcacccagggcaccgaagattttgccggaaatgccggtgcggtacgccatt

SEQ ID NO: 721 - DNA, 31265 bp, Unknown
  16S sequences of unknown bacteria
tccaaaaggctcccctgcgtagggggagctgtcggcgttagccgactgagggggcgttctattgcgctatcagcaaagctgaccgatggattagaaacccaaaaaccgcaagattacgcatttaaaaatacaatcttgcaatttcgaacgaaagattggctttgtcaatgctctgagggctgcgaaagaacaataaaagttttttcacagccccccaaacatttgcgtttacaccgctgacatggttttccacttgcccttgagatagcggggcaggaagaaggcgatgcgcacgatccagtccacgtacatggcgttccacacgccatagatgcccatatccatcgggccgaggatgaacaggtaactcaggcccacgcggatgagcaccatggaaccgatggacgtccacatggtatatttcgcgtcgcccgccgcgcgcagcgcgttggcaaaggggaacgacaggggccagaagatgctgttgaacaccgcgtattgcttgagcaggtcgatggaaatcgcggtggccaattcgctcagatcgaacagcgccaccaccggcgcggcaaggaagaacaggaaaacgttcagcaccagcatgcagccataggtgaagaacatcagctttttcacgttggtttgcgcctcgcggatggcgcgcgcgcccacgcattggcccaccacggtgatcagggccaggccgatggcgttgcccggcacgcataccagtccggagaccgtgttgcagatggcgttcgccgcgataacgctggtgcccaggccggcgatcaggttggaaaccaccagcttgcccacttggaacacgccgttttccatgccgttgggcacgccgatgccgagaatgcgccgcaaaatatcgccattccattcgaagtggaacaggcggttcacgtggatggggttggacttgtggcagatgagcttggtcacaatcaccgccgctagcacgcgcgaggccagggaagcgagcgccgcgccggccacgcccatatcgaacacgaagatgagcagcgcgttgcccgccacgttgaccacgttcatgatcagcgaaatgatcagcgagatccggctgttgcccatggagcggtagagcgccgcgcccgcgttgtacagcgcgaggaacggataggaaatggccgaaatcaaaaagtagacccgcgcgttttccatcacgttcggctccagcgcgccatagatcgcgcccaaaatcggcccgttccacacggcggcgacaaggccgatcagcgcggcgatcagcgtcgtggaccaaaccaactgcttggccgtgtcgcaggcgcgctcgcgtgcgcgcgcgcccagatattgcgccgccaccacggcgccgcccgtggccagcgcggaaaagacctggatcaatagcaggttgatggcgtccaccagggaaatggcggaaaccgcgtgttcgcccacgcccgtgaccatgatggtgtccgccatgccgatggtcacggcgagtagctgctccaggatcagcggcccgatgagccgcgcgagcgaacggttggtgaaaatgggtttgtccatggtgctctcccttgtttttggcgcgcgcggcggatttaccattttgcctgcggggaagaggggtcgatctgcatcaattcaatggcgttaccatcgggatcgtgcacccaggcttgcaggttgtggtcgctgccgcgcgtgggttcgctcacttcaatgccgcgctttcgcagttgcgccacgtacgcgggcaaatcgtcaatttgcaaacacaggtgcatgtagcgcgtgtcctcttccaccgccttgccttccgggtaaaacagttcgatgaactgcccgggcgcaacgcacaaatactcaatccagggacggttctccttgttggccagcgagaatgcgtgttgcatgcccaggccgttcagataaaaacgcagggaagcttccatatcgcgcactttatacgcggtgtgtgcgatgccatggatcatcattatcgctccaatctcttcgtgcaaggcaatttttggtgcaaattttgcggggaagcaatcgcccgtcttgcctattgcaccgcggtgtggtacaatagaggggattttgaaaggggtggcggaatgcttcaggatgatacgcttttcttccaagggcaggccgtccatttttccacggagtatcctgccgggcagcaaaatggctgcgcgctcctcgtgtgcggcccgggggaaaccgccctgaactggcggcatatcgtgcctgagatgctggcggcgggctttttttgcgccgttgcggaattgcccggccagttgggccggggcggggcaaaccgcaacgaaaaccgcgcgggcgtgctgtggggcgtgctcgacgcgctggaccagcgcgcgggccgctggcgcgcgtggcacattctcgcgcatggctccggttgcgccgccgcgctgatgatggcgctcacgcagccggatagcgtggcttccctggcgctcatttgcccggtgctggagccgccgctgggccgcttggcgctggcgctgatgcgcgggcggtatggccgccaggtgggggaaagctggtaccggcggaacatcgaaagcgagcgcaactttgcgcatctggcggagcgcgcctatggcatgcggccgtctcccgcgctgttgcacgcgttgcgcaagccgcttttgcgccgcggcgcggcgggcagcgtggcgcgcgtggtgcgcgatggctacgcgctcccgcaggaggcgtatgcgccgcagtgcccggtgatggtgctgcgcggcgggcgagacccgtacgcgcgctatgccgggccggagatttccggcgcggagcggcacacgcttcgcgcggcggctcattgcccggcggaaaccgacgcggacgcggtgcgcgactatttgcgcggttggtatagaatgttcctctaaattcccaagcgattttttctggcaaaagggcgccgcttttttgaaccgctggttcggaaaaagcggcgccgcttgctgccagggagatttacgcttcggcccacacggctttgcgcgccgcgtccaggcaggcaaagccttgcgtgcctgcctccacaaagggatccgttttgccttcgatgctcatgcgggcgtcatagccgccgtccttcagggcttgcataattttggcatagtcctcgccgtcgttcggcttggggcattcgcgcccaatcggattggcggtgtgcacgtgcgcgatttggctgccgcacagcgtgagcacgttcaccggctcgctggagatggccatgtgataggtatcggccagcgcgcgaacgtgccgcagttgcaaaatggaggcaaggattgtagcctcgctcaccatgttgatgatgttgctttccgcgcggcgcagcggctcgatggcgatggtgatgtcatggtcgatggcgtggcgttccgccaggcgcaggaaattgcaaatttgccgccaagccatgtcgatggggaagccttccggcacgttgcgcgcgccgctgctgccgaacaccacaatctgtccgcccagttgttttgcgcgggcaaaggtcttatcgaggtattcgtgcagcgcctgggcgttcacatccgaaccggtaacgcgcagcttcgcggggagcatgccgttaaaggcttccacgcggatgggcgcggcctgcacgcgatcgcgcagcgcgcgaaattccgcttcgtcgatctcgctcaggcgcgttaagccggcttccagatagtcaaagcccatcttggccacgacttcgatgttttcaatcggcccacagatgccaagtcgaatcatgcgcgcctcctaatacgtgccttctgtgctcagcacttttcccgcgccgtccttcaggcgcgaagtggcgcggcgcttgttgagctcttccaggaatttgtccgcgtccagcggcagggtcacggtttcattgagccagctcgaaaggtgcatggcgttggaaagcgtgaggccgttgatgccttccgtaccgtcggcgatcagcggcgtgcccttgagcaggtgctgcgcgaaggcgcgcaacacgcccgcgtgctgcggattttcgccatcggtttccacttcgatggtttcgcacttgggcgtgccgaagccgcccgtgtaggtcttcataaactcggggatggaggtttccagcttttccagggtcagggtcttgccgtcgcagatcagcgtgccgccttccagcaccacttccaggcggttggtgccaggcgcgtcgcccgtggaggtgatgaacacgccggtggcgccgttttcaaattccatgtaagcggtcacatcgtcttccacttcgatgtcgtgccacaggccgttgtgcgtgaaagcgcgcacgcgcacgggcatgcccaccagccactggaacaggtccagattgtgcgggcactggttgagcagcacgccgccgccctcgccagcccaggtggcgcgccacgcgccggaatcataatagctctgcgggcggaaccagttggtaatcagccaattcacgcggcgaatgctgcccagctcgccggaggaaatgatttccttcattttgcggtacacgcagttggtgcgctggttgaacatgatggcgtaggtcgccttgctctttttggccagttcgttcacctcggccacggccttggtgtaaacgcccgcgggcttttcgcacatcacatggatatcgcgcttgagcgcggcggtgaccaacggcggatggtcgtagtgcggggtggccacgataaccgcgtccaccaggccgctttccatcatggtgatggcgtcgtcaaacacctttacgtccggatacgtttccgcggcccacttgcggcgctcggggttgatatccgcgattgccgtaagaaccatgtccggcacctggccgctggtgatggttttggcgtggccgctgcccatattgcccacgccgatgatgccaatccttacttgatccatcgatttgcctctccttcccgatagcccgcgtccgtcaaaatggatttcacggcgtccaccgccgcgcggaacgcggttcgattgtcgctatacgcgtacttgtggtgcaattcctcgccctgcaaggcgttcaggccggcgaataccttgaggtgcggctcaatggtcagccccgtttcgtcgccgccgtagtccttcagaatctccggcacgctgccgtcgcccatgccgcagggcacgacgctgccgtccgccaggagcgcgtctttcatgtggaaataatagatatgctttttcagcatggggtacgcgtccgcgggccgcgcgccgcactggatgaaattcgccgggtcgaagatgcacttgagccggccgccaaaggtttccaccagatccaggcagcgctcgggaatgtcgccgtaaatgcctttttcgttttcgtgcgcgaggacgatgtcctgcgcgtcggcggcgtccagcattgcgccgagctggtcgatcacctgctggcggtacgcggcgatgtcctcgcccttgggcggataaaagctgaacatgcggaatgtgttggcgcccaggatcttcgcctgctccatggagcgcttgagcgcctccaggtgctcggcaaagccttcgttcaccacgattttgccgaacggggaaccgatggcggaaatgcccacgcccgcgccgtccagcatgcggcgcacttcgcgcgccttttcgtctgtaagggcggaaacgttggtgccgtccacgccgcggatttcaatgcggtcgatgccagcttcccggagcgcttcgagctgctccgggaaactcgcgctggcctcgtccgcaaaggcagaaagaatgtagttcgcctttgccatatttgcctccaaattatttgtagagcgggccgaagttcttgcacgcgcggtagtccgcgccttcgcgatccttggtgccgaaggcgttccacgcgctcggacggtaaatttcttcttcgggcacgttgtgcatgcacaccgggatgcgcagcatggagcacagggtgatcagatccgcgccgatgtggccgaagttgaaagcgccgtggttcgcgccccagttgttcatcacgctgtacacatcggtgaaagcgtccttgcccgtgaggcgcggcacaaaccaggtggtgggccaggtggggtcggtgcgcttatccagcgtgtcgtgcacgttctggggcagttccgccgtccaaccttcggcgatctgcagcaccgggccaaggccggcgatgatgttcatgcgggtcatggtgacgggcatgccgccgcggctcttgaggtgcgaagaatatccgccgccgcggaaatagcccagatccccgtagcaatactgcgtggcgtccatgcacttggcggcttcctgcgcggaaatgtcccaatagggcttcatggcgggcttgccgtcgatttcgcactcgccgctggcgtccagcgccaccgcgccggaattgatcaggtggataaagccgtctttggccaggccgtccggcttccaacccgtcacgcgctccacagcttcggggctccaataggtgcgcacgtcggcgaacgcgctggccgaaccggtgagcaaatggcccagcagcatgcacacgccgttgagcgcatcgttctccgtcgccaccacaaagggctcgcggatgccgttccaatcgaagctggaattgagcagcgattccatcatatcgccattggggaagtggtccgtccactgacgctggccctggaagcccgccgcgatggcgttgtgcccgcagctttcctccacgaagcccatctccgccaggcggggattgccgatcatcaggtcgcgggcgatcatggtcatcttgatgcaggtttccagcgcccactgcttgtactccgcggtgtgctgcatggattcggggttcttgtcccaaccgagcgtcacgttttccttcacccaggcgcatgccttggcgaactcttcggggtcgtagatattttcgtcccagcggcgcacgaactcgctcatgtccacctgctcgcaacgcatgcccaggaacttttcaaagaaatcgggattcacgatggaaccggcgatgcccatcgccacattgcccatggaaaggtagctcttgccgcgcatggtggcgacggccaggcccgcgcgggcaaagcgcaagatcttttcctgcacgtccgcgggaatttcggtcgcgtccgcgtcctgcacgtcgtggccgtaaatgccaaaggcgggcaggcccttctgcgcgtgcgcggccagcacggcggccaggtacaccgcgccggggcgctcggtgccgttaaagccccaaatggccttgggcgtgtgcggatccatgtccatggtttcgctgccatagcaccagcaaggggtcactgtgagggatacgcccacgccttcgcgggcgaatttctccgcgcaatcggcggcttctttcacgccgccaatggtcgtgtccgcgatgacgcattccaccggcaggccgcacggatggcgcaggttttcttcgatcagttttttggcggcgagcgccatgcccatggtttgcgcttccaggctttcgcgcacgccgcggcggcgtccgtcgatcgccgggcggatgccaatcttgggcaagctgccacgcaaacggtttttcggctcattcatcgggaaagcatttgtgttggccatatgaaattcctccctacaaaaaagcaatgggtgctattgcatattatacacgctttcccgcttccgcgcaatcgtgaaaaatgtgaaaatcctgtgcgcaagatggcgcaaaaatggacagacgcaaaaccgcccggcagccggccaccagctcgtcaatcgggcgcgagaaggcaaatatcgtctttgatggcttggaaacgggcggggccaatgccttcgacctccagcaaatcttccagatgggcgaacgggccgtgctgcgcgcggtattccacgatgcggctggcgaggacttcgccgatgccatcgagttccatgagcaatgccgcgtccgccgcgttgatatcgattttcccgcgcccttcgcccgtggcaaccacgccggagagcgcggtttcgtgtaccggggcaaagcgcgagtcgtccaggggatttcgcgcgcaaagggccaagagaaaggcgatgagcagcgcggcgaagagaaccgcgtccgcgcgcgtggcggtgaaatggaaaaagcggcgctcgggcatggaaaacacccccttatgtagccgtccgccgcccggccaaaagaaccgggggcggacgggaaaatttggctcttaccgcatggtggtggcgttgcgcacgatgctatcgatatcgctatccagttcatccacgctctggccggatttgacggcgtcgctcatctcaaagatgcgcgccacgtcgtccgcgttggcggtaacggccacggtttgcagcatgggatcggcggccttcacctgtccggcgaccatatcgcggatgcgctcggtcatttcgccctggtattgcggggtgaatttcacgcccaccagcgccgtatcgccgctaacgaggatgcggcattcggaaatttccgaaatctggcccacgcggttttctacggtttccgcgttggcgtgccaatcatagcgctgggccgtgccggtttgcgcattttgcgcgttctgcccgctagcgttgtccgcgtcctgcgcgggcgcgccgggcgtggcgctggcggcgggcaaaccggtggaagtgcccgcgccggtgaacggatcctgcgtcgcctcaggcgaggacgccgtgttcatgcacgcgcccaggatgagcgacagggcgatgagtaagagtgcagccatttgtgatttgcgcaatttcatggttcaaacctcccttgcatgcgctattatgcgcaggcggcggaagtttaatccaaggattgataaaaacagcagccgccgatgaattcgcgcaggatggagttgaggggaatctcgttttccacatcggcggtgtgcacgtagttcaaaaatttcaccagccgccgcgcgagggtgtagttgcggctttcgggcgaaatttgcgcgagcatggggtaggcgtactttttgagaatggccaactcgtagctcagcgaggaattgaacatcacgtccgcgcgctcctgataggggaagatgtacttctcctcgcccgcgcgcacggaatcccacatatccatggtttcgtccggcggcgtgccgcggaacagcgaatcgcgcaccatgcggcgcagcagccgcgcgtccgtggtgcggatgcggttgtgatcgtccaggttgatggtggtgagcgcggagatgtagatcatgaatttcatctcccggggcacctggctggtgagccggtcgttgagcgcgtggatgccctcgatgaggatcggctggtcgctcccggcgcgcagcttgtgcgttttttcgctgcgcttgcccgtgacgaaatcgaactgcggcgcttcgatctcctcgccctgcaacagcgccaccaaatgttcgcccagcagcttcagatccagcgtgtccgggttttccaggtcgcgctcgccgttttcgtccacggggatggcgtcgcggtcgagataataatcgtccagcgaaatcttcatgggcaaatgccccatggcccgcagcaggatggagagccggtgcgtcatcgtggtcttgcccgaagaggacggccccgccaccaggatcagccgcgcgccgctggcgaggaatttctgcgcgatgttcaccagggaaatctcgtgcaattcctcgttgacgcggatgaattcgcgcagcgtgcgcttttcgatcatttcgttgagatcggccacgttggagatgcccaggatctcgttccagcgcgcgctttcggcaaaggtgcgcatcagcttgggcaactccaccagcctgctggcgcgcgagggatccgcccggtcgggcagcagcagcgccaggcccggcagcaacaggcgcagatcgaacaccggcacatagcccgtggagggaaccatttccccatagaagtattccggcatgccgtcgcactcgtagagctggaagtgctcatagggccggtagtgcaaaaggcgcactttgtccacatcgccgcgcgcgcggaaaagcgccgtggcgtcctcgcgcgagatggcgcgcttttcaaagggcaggtccgccgcgacgatcgcgcgcatttcgcgcttcagcgcgtccaccgcgtcctgggtgattggggcgtctggcacgatatagatgccgcgccggatggaatgctccacgcgcatgcgcaccccgggcagcgcgcgccgggccgcgcacaaaaacacaaaccgcaaggagcgctcgtatacccggcggccctcctcgtcggcataggtcaacagccgcgcctgttcgccttcccggggaaccgcactgagcgggagcgtgctgccatttacgcgcacggcaagcgcccggcggcccggcagcagcgtttccgccgcgtcgcgataatcttgaccttcttttagcgtcatctgggttccgttgagcgtaaattgcatggtcatccctcctcaaatgcgatgattggtttcggcggccttttagatttccacggcaatggtttggaaacactcggggcggtggaaatcgggcttgggcgcgttcacgggaaagagcgtgccaaagtgcggatggatgctttcgtcgcaggtgtagcaattggcgcgcacgcgctcgcccagcgggcggccaaactgggcctcaaggaagctgccagggattttgtaatacaccgcccaccaggcgccgcggtgctcgctggcgacggggcaaacgccttccggcaggggagagaacaccgcgcggcccgcgcggcccgcgccgatgcccaggtgcatcgtgcccaggggattggcctcgaaattcaggtaacgttcgtcgctttccagcggctgcacgaagaattccaggcacgaatccacgcaaaccgcgccgcccacccgggtttcccgggcctggatggcgggctccagggcgtacatcaaaacgtgcaaatcgccttcgtggacgcccacgcgcgcgcacgccttcggccggtagccatccggcgcgctccagggatagcaggcgatttcccattcttccagattctgccacgcctgcggcagttgttcaggggaaaattccccggcaaacggcaaaaccggcgcggcgagcttgcgaatcgtcttcatgcgaaggccctccttattgtcaacgctctattatgcgccgccctggcgcatgaattccagaatttcccaaatgcgctgcaaatcgtcctggctgtagtaattgaggatcaagcggcccttgtcctcgtcgccctcgatcttggcgcgcgtgccgaaaatctcgcgcgccatgcgctccaaatcgttgagttcgcccgcgcgcacgggtttttccgcgggcgcgtccttcttttccggctcgggctgggcgcagatgcgctcgagctggcgcacggaaaagccctgctgcacggtcaattcagcgagcttcacctgccgttccttggaaaccgtgaccagcgcgcgcgcgtgcccggcggaaagctggcccgcgcgcaccatttcgatcacgcgctcgtccagcgtgagcaggcgcaaaaggttggccacggcgggacggctcttgcccagccgctcggcagcgcgctcctgcgtgtagccgcactgctccatcaggtttttcacgcccagcgcttcttcaatggggttgagatcttcgcgctgcaggttttcaatcagcgccgcttccagccgcacggcctcgtcccaatcgcgcacgatggccggcatttcctttagacccgccaagcgggcggcccggtagcgccgctcgcccgcgatgatcgtgtaccgccccgctcgctgcgccaccacaatgggctggatcacgcccacgctgcggatggattccgccagctccatgagcgctttttcgtcaaaggtgcgccgtggctggccgggattcacgtcgattttcgtgatgggcaattgcatcaccgcgtcgatgtgccccgcgatttgctcttccggcgcgtctgtgcccaacagcgcgtccagcccgcgcccaaggccccgttttcctgtgctcatagcctgttcctttccatcaattcgtccgccagcgcgaaataggcttccgcgccggggcatttcgcgtcgtaaaggtggatgggcttgccgtggctcggcgcttcgctcaggcgcacgttgcgcggcacgatcgcgccgaacactttgcccttaaagtgccgcttcacctcgcccaccacctggatgcccaggttggtgcggccgtcgagcatggtgagcaccacgccttccacatccagcgaagggttcaggcgcttgcgcaccaggttgagcgtgttcaccagttggccgacgccttccagcgcgtagtattcgcactggatggggatgatcacgctgtccgccgcggtgagcgcgttcagggtcaagaggcccagcgacggggggcagtcgatgaagatgtattcatacgtatcgcgcaggggcgcgagtgcgtcgcgcatgcgcgtttcgcgctcgtccatggccaccagttcgatttccgcgcccgccagcgcaatatcggaaggcagcagggaaaggccgcgcaccgccgtttccatcacggcggcgttggcctcggcgtcgtcggtcaacacatcgtaaacggaggaacgccccttggcgctcttgcccaggccgctggtggagttgccctgcggatccagatccaccagcagcgtgcgcttgcccctcgcggccacgcaggccgaaaggttgatggccgtggtcgttttgcccacgccgcccttctggttggtaatcgcgatgatttttcccatgcgtatttcacttactttccagcatcagcaggtattctatggaatccgaaagggcgatgaagctcgcctcaatcacgttggaagaaacgcccacagtcgaccaggcgcgctcgccgtccgtcgattcgatgaacacgcgcaccacggaggcggtgccatggctggcgaccacgcgcaccttaaaatccaccagccgcgcgccgcccagcaggggatagaagcgcagaagcgccttgcgcagcgcgcggtccagcgcgttcaccgggccgtcgccctcgtcggcggtgatttccacctggccatccacggccactttcacatacgcctgcgcgttcgcgctgtcctccggcttttgggaaatcacgtggaaatccagcacgcggaagaattccctgcgccggttcagcgcgcccaggatgcgcaattccagcgaagcgtccgcgtcctcaaacgaatagccctccgcctccagcgacttgagcatggccatgatgcgcgccgcctcttcgctttcgcgcgaaacgtccggcgcgatttgcgccagcttcagcatcagcgcgccgcgcccggcctgctcgctgatgagatagcgccggtggttgcccacgcgctcgggcggcacgtgctcgaaggtgtgcgggtttttgagaacgccgtcgatgtgcatgccgcccttgtgcgcgaacgcggagcggcccacataggggcttttttcgttcatctggatgtttgcgatttccgaaacaaagcgcgcggtgcgcgaaagccgggtgagactatcgcccgtgagcaccgcatagtccatcttcagcgccaggttgggcagcaccgcgcacaggttcgcgttgccgcagcgctcgccatagccgttgatcgtgccctgcacctgcgtcgcgccgccgcgcacgccaaagagcgagcaggccgtggccagcccggaatcgttgtgcgcgtggatggcggcgatggggccgaagcgctccgttacggcgcgcacggcgctttcgatctggctgggcagcgtgccgccgttggtgtcgcacagcacgagccgccgcgcgcccgcccgcacggccgcggcgagcacctccagcgcgtaggcgggttccttggcgtagccatcgaaaaagtgctccgcatcgaaaaaaaccgccagcccgcgcgaggccaaaaacgcgatggactgcgaaaccatgcgcaggttttcctccagcgtggcgcgcagcacttcgcgcacctggaacgcgcaggctttgcccaccagcgagaccacgcccgcatcaaacgcggccagccttcgcaactgcgcgtcttcctccgcgggcacgcccgcgcggcaggtcatgccaaaggcggccaattgggcgttttttagacgcaaatgctcccgcgcgaaatcgaagagcttttcgtccttcggattcgcgcaaggattgcccgcctcgatataatccacgcccaactcgtccagcgcgcggatgattttcagcttatcctcgatggagaacaccacgccctcggcctgtgcgccgtcgcgcagcgtcgtatccagcgtttctattcgcatatacatccctcgccatatactcgctatataataacaaaagcccgcgccaattgcaagcgcgggaaggttatattcccttgtgagggaacctaaaggattttgcgcagccaatagaccacccaactggccgcttcgcgcgtgcgcaagcgccagatggtgaagaaggggcgcggggaggcggcgggatagccgtaaacggtttcgatgcccgcgtcttccgccagccacagcgcgcgctgcacatggtaatccgacgtgacgatgatggcgctggcaaagccgcgctcgtccataatggccttggcgttttcgatgttttgctcggtgttgtaggatgcgtcctcctcatagatgcattcggcgggcacgcccatttccaccagcacgcgcttcatcacgctggcctcgcttgccggctcgttgctgccctgcgcgccgcacacgatgacggcgccggccagaccggcgttgtacgcctccacggcgctatccagccggtattgcagcgcgtcggacggttcgccgctttcccacacgcgcgcgcccaacacgatcaggcaatcggcgctttccaggggacgcgccgcgcgcgagcgggcatacacgcacgccaccagggcgccgcccacggccgcgcccagaagcaccaaaatcagcaaaaccgacagcatgcgccgccacacctttttcttcatcaattgctccgctatgattccgcgaaaaattcgttgatggccgcgatgtttttgtcgcggtcgggcacgagcaccgccatgccgctcaccgtttggtttttgtacgcgccgtccacaggaatgcgcaactgctcgatggaagaaagatccagttcaaacagcgcgggcgccaactgcatgatcgtcgccagggacatattggtgtatacgttgtcgaaattggtcgccgcgagccgcatgagctgcatcagggaaaactcgtttttgagcttttcgagaatcgccacgatcacttcgcgctggcgctgcgtgcgctcgaaatcgctggaacccgtgcgccagcgggcaaacgcctgcacttgcttgccgttgagcgtttgcacgccggaggaggagagcaagtcggtatcgatatcgatgcccagcgctttgttgtccattttgatcacggcgttgatgcggtcgcggatatagtcgctttccacatccagttccaggccgccaatttggttcaccaaatcggccatcatggtgaaattcaccgtgacgtattgatccacttcgatgccgaagttctctttcagcgtttcgaacagcagctccgggccgccaaagcggtaggccgcgttcaggcggttgtttttgtaaccgggaatttccacatagaggtcgcgcatgaagctggtgagcttcacggtcttttggttcgcgtccaccgtcagcaaaatcatggtgtccgagcggccggattcttgcccagggcgcgcgtcaatgcccaggagcaggatgttcatttgcccgtctaccaggtccagcgcgtcctgcgcgacgctttccagttcgatttcttcctctggatcggccaaaaagaggacttcgccggtttccggatccacttcatagagcaaatcttcgcccagcgcccacatgggcgcgaggagcaacgcgagaaacagtgccaaaaaacgctttttcataaaaaatcaccccgaagaatcgcgaatcgtgtcgcatcttagacgcgcgattccccgggttggttccatcatttctcctcgtcgtataccgtttttatcaccacatcgctcaggcgcgcgctcacatcgtccaccacgtcaaacgccatgcggcggctgcggggcaagcgccccatcactacggccaccgcgcccaccttgcgcgcgtgcgcggagatggtggcggccacttcgttggaacggatcatggtcatatccgcgccatggtccttggagatttgatagagatattccagcgcctcgctttcgctggggttgccaagcaggttgtcgcccactttggccacatgaatcacgtgcaactgcgcgcccagttcctgcgccatgcgcgcgccttccacaatcaggcgctcgcaggttttctggcgcgtaacgcacaccagtacggctacttcctccgccaacacgatccctccctcctgggcgcggcatgcgcgccgccttgcctgaaagaaatggcgctagatggcttttacgctcttgatgtatttgccaaaggaaacgatatcgagcaattgccctttgggataggtgggcaggggcttatccgcgtcccacaggaagaggcgctgttccgcctcgtcgtcgccctcgtacaccataaaatcgtataccgcgacgccgtcgagcatgcgcggctcgccagaaatttcccaaaaacgcatctgggtttcgcgctccaaaccttctttcatgtccttgagcaaaaggtaatatttgcgccagggattcattttggtggcggcaaaataataggtgatccacaatccgatgagcatggagatcatgccaaaaaggcgcagccgcagcgtcagcgccacgcacaaacacgcgatggtcaccgcgagcagggcgcccacgacatacaggcgcgcgtgaaatccctttttggcccgagcaaaatcttccgccgtatacatgtatatcctcctacgccagtggctcttggcgcattcgcggacaaacgctcgaatgcaccccacttaactatactccatttgtgccggactgtaaagggatacggcgcaatattcacaaaattttcggaaagcgttcggatgctaacggcttaaaacgccatgctgcgtggatcggcgatttagcattggcaggaaagccaaagatgcgcaaacacgctgctgaaggcgcaacctccagcagcgccagagcattgacaaagtgtgggaaggacgggctttaatcagaaatgacggcgtgtacgtcatttctggcattttttgcagagcaaatgcttgcatttgcggtaaaaatgcattcccgtcccggtcgctgcccgcaaatctttgatttgcaagcggccgggtaatcctcgttgacaaaccgaaggtttgtcaacgatcagacgctgctgaaggcgcaacctccagcagcgcgggcaatgggaaaaaaggattacagcgcagaaccgccttttgcgagcaaccgccgtacggccacgccatccacggactgtatgggcaggttctgctccacggcaatgtacgcggccacgcctgcggcttcccccagctgattggtgtttaccataacgcgcaaagcgccaaacgcgccgctatccgcgtggatcatgcgccctgcgggaatgagattggggcagatttcctgcaccagaagcgaaaacggcacctggtaatagcgcgaatagttgtcgtccagcccggcgtcgcgccgccagttgccttccacaacgttcgtatccttgccatacacggtgcgcatgctgccatccaactgcttgaatgtgatgccgttatcgtggttgtggtgaatatccacgcaatacgtaccattgagtatggcgtcggcaaagcgcgcgccttccagcaaatccttttcgttggcctggtagcgcgttgcgtagtgggcggtttcccggatgcctatggaggaacacatgttgacgatgccataatccttggaagcgtatcgcttgagcagggcctcaaaagcgtaggcgcgccgccgtccttcgaattccgcctgggtgagatcctccgcgcggctcaaatcaaagccaaaaacgtggttgtccgcccggaaggatatgccgggcaggccgggcacatggccaaaccagccccagtcgtcgtccaggccgaattccgccccgtgctgggaaatcagccaggagatcagctcgccgctggtgttcccctggagcaggaaacaggtggagggcggctgcatcctcgggtgcatgtatcgttcgcaaccgacgtcgcgcatcaaatcgccgtcgcccgtcgcgtcgatatagattttggcccggatggcgcagcggccatctttgttttgcacaaacacgcaatcgatggcatcctcttggcggagcatgccggcatattgggtatgcaagagcgcgtgtatgccgttttcctgcgcgagcaaatccagctggcggatcagcgctacgggattgaaccgattggccgtggcgcgcgcacgggtggtttccacttgcccttgcgcggcgagccgctcgaggacttccagggtaaggcccgcgatgacgcgctcctggtcgtcaaaatcatataaactgtgccagatgttgatgaggccggcggttgccatgccgccaaagcagttctgcttttccacgacgcacacgcgcgcgcccagccgcgccgcgcgcaccgcggcgaacaggcctgtgcaactgccgcccagcacgcatatatcgccttcccagcatacgggaatttgccgcgcgggttccagaatggttttcatgatgacttcttttcctccaattcctgtatatttgcaaggacgggcaggcgcaaaacaatttgcgtgcccacctgcagaacgctggagatggataggccataggtttcgccaaagtatagccgtatccgtgagtgggtgttgtacaacccggtggagcgcagcccatcgccgctatcgggcggagtttccggcaaggaagcggctttttctggcggcatgccgtggccattgtccattaccacgatgatcagatcttctttgcaccgctccgctttaacttcgatgagtccgcgccgcttcaggccgagaaagccatggaacacgctgttctcgatgatgggctgcaaaatgagcttgggcacgaacagactcgaaagcgcttcgggaatgcgcaggagcagatcgaaggtgtctccatagcgcaactgcagcaggcgaacgaattcttcgcagcaccggcactcttccgcaagggggatcagcgcgccggttttgtccgtgctcgtggcgagcatatggatcagcgcgctcacagcgggcggaatcgccgccacttctccacgcagcgctagagcggaaaacgcgttgagcgtattatacaaaaaatgcggacggagctggtattgcaaggctttgatttccgcttcgtggcgtttttggcggatttcgctttcccgcagcagcaaaaggttgatgcggttgagcatggcggcaaagctgcgggagagatcgccaatttcatcccggcgcgcgagaggcgtatattccgttagccggtccgcttgcagctgcatggcgttcatctggtcggcaaggcggcggatgggccggatatagcgtcccacgatggcggcgagcaaaaagagcgccagcaggaatagaaccacgctcaccaggctcgtttgctgcgccagttcccacaaagaggcgcgcaagttgctttcgttgagcacaatgagcacgctccaatcgttgtggcggccaccgtcgcgacggtatacgcgataatgcacgccctggccatccgcataatcgctccattgcggtgcgctctgggcgatggcggccagcgtatccggcaaaacagaatcgctgctgtgccaatacgccaaagtcccgctgtccgttaccagcatcaggctgggctgggtggcgccaagcgcgctcagaatgcgcgcgcccagagtttccagctccatttccagcacaactgtgccaatggggttgcgcgcgtcatcgaaaacccttcgcgtgaaagcgacggcatccgcggtgatcatggaggagcgatacacatcggaaatggctatcgcgccgttcttgggagcggattgagccagccgcgcgggcaagtcgtagcgcagggttttttccagcacatccaattcaacttgatgggaggaatagatttcgccctgcgcgtctacaaagtaggcgcggcgcacccattcgtaatattgatgctgcaacgtttccagcgtgcccgcaacatcgccggagtcttcaacggccatttgtatcagcaaagagcattgcagcgtggcggcctccatttcctgaaacacccaatcgatgctggcggacacgcgttcggcgacggtctcaaattccgccttttgctgattgtgcagcacccgcagaaacatttcgctttggatgctcacataaaggactgtgagcactacgcccaaaagaaaaatggtcagcagaatctttgccatcagccccatgcgaaagttattcatgccacgccttccttctatatgcctgaggcatcataccatacgcgcgaaaaaatgtgctggaaaaatagcgcgcattggcaaacccgcatgcgctggcgatttcgtagatgcgcatatgcgtatggatcagcttatcggcagccgcggcaagccgttctttcacgatatagtgcttgagcccttcgcccgtttggcgcttaaaagtagcgctcaaataggaaggactgagcccaatgtgccgcgcgagcacgggcaaggaaaggtcatccgccaggtgctcggcgatgtattgtttcacgcgctgaatttccgggatttccttttgcccggcggataagcgttctcgcaaggcaaagctgcccaaaagcagctgcgcttcgtgcgccgagtgggtggcgcggatttgggcggcaatttcgcgcgcatccccggtggaaccgccccattccagcacaaaagcggcgagcaattcccggtatccttcgggcgcgatgtgtttttccagacattcggcaaccaattcccctggaaattcctcccatttgccctgcatatagcggcgaaatccctctttccaccgcgcaaaagagccaggcgcaaattccgccgcatacgacataccggataccacaacgctattgggaaaataaaactgctctcccagggcggagcgggcgtttgccagggcggaagcatcggcaaaccgcatgggccgtgaaaacaccatatgaatggcgtgcgaggcgcgcagcattgccgatagggcggcgcgcactgcttcatcgctggcgtcgccggttacaacccattcccctggcgcgatggggtaacattctgcgaacaagcgcatggactgcaaatagaggttttgccgcgcgtaggcaaagcgaacatcgggaaaatccagaaaagcggcatagcgcccgcaggttccgcgccacttttgttcccgggcggcggcttccaggacggcgtcccattcaaaatccgcgcgtccgcgctgcgcggcaatgcggtcgcgcgccttttccagcgcatcaaacaattgctgcccattgtaagcgtctttgatcagataatccagcgcgcccaggcgcagcgcctccaccgcataggaaaaatcccgatgcatcgtgagcagaatcatctgcacatccggcgcaagctcgcgcgcgcgagcgatcagctgcaagccactcatgccaggcatgacgatatcaatgagcatgatatcgggctttaacgttttgagcaacgcaagcgcttgcgcgccgctatccgcctcgccagcgagttcatatgcgggcaactgctgcaaaagggcggcaatcgcttcgcgagcggcgctttcatcgtccacaaggagaactcgcagattgtccatctcgttatttgacctgcctccacacaagatagtatgccctgcccaggagctttcgctcccggacagagcacgggaaatgccatacaggcgcttactgaatgtagcccgcttcggtcaaatcggcggtcgcgccattcaggtacgcttgcaaattgtagacggaatagagggtgtccacataagcgtcccattcatcgagcgaacgttcgccatagataaagcgcgtaacttcctcggtcgcgtagcgctcgatatccgaggcggtaacgccctcaggcaccgtcacgcgggcattgtaaatgggcagcaccgtcattgcgttgcactggtcgatctgcgcatccagatacgggaacttcgccttcagatacggcaggtcgtcgcggccgcagatcaggtagttgaaggaataggtaatgtcgttcagagcgggcagggcgacgaggttcccttcttcgtccagctcgtagtgggtgccttccagaccgaatgcagcaagccgttggccggtttcctcgtcgcacagaaagtctaccagctccagcaccttgttcagccgctcgggctgatcggcgagatccgcgttgatcgcgaagtagccggacgcattggaagaatcgtacacatcatcgtacttgccgccggggccttccacgcccatcatgagttcccactgcgccgtggggcagatttccagcgcctgatccatataagcttccttaaaaagatcccagaagctgcaggcaaggatgccagcatagccggaaagggccttgtcgcgatgctccatggattggttggtgatgatctccggatccacgacgcccgcgtcgatcagcgtttgaatgaaggcaatggcttctttggcccggggatccacggaagaatataccacctggttgtcctcgatcaggaaactgccgggcgcggtggtgccatacgcgttgaaaacgatgttgaacgcactcagtccctggccagtgatgccataggtatcgtccttgccgttgccatcggggtcgttgtacgtgaaggcgtacagcacatcatacagttcttccagcgtggtgggcacatccatgccaacggcatccagccaatcgcgccggatggaataatccgcatagggaatgtaggggcgcgcggcgatcatgtacattccgccggccacgtagcacttttccaagtactcctccgtgtacgcctctttaaaatgcggcatctggtcgagatacggctcaatatccagcagcaggccctgctgcgcgtaggtaggcgccattagatagggcacttcgaagatgtccggcgcattgccaccggcaaggcgcacattgagctgcgtgtcgtattccgcgctgatcacattccactccacattcacgcccaacgcttcctctatgccaggcagaatcacgtcgtcttccggagcaggcatgccttggcccgaacggaagagcacgatggtcatctcctcttccgcttccgcaaccgcggcgagcggcaggcacaacgccaacgcgagcaggcaacaaatccactttttcatcacaagtcctcctctttccttctttatcccttaatcgcacccacaagcatgccggaagtgaaatgcttctggatgaaaggatatacgatgatgatgggcagagccgtgagcaccacggcggccatttttagcgtttccgtgggagcggaatattccgcggcttccaccatttgctccgtacccgcaatgatgccgcgcagcaccacctggagcggctgcagatcggtatctgtgatgtataaaatggcgctcataaacgtattccagtgcgtaacgccatagaacatcacgttggtcataatcgcgggcatggccaggggcatggcgatgcgccatagagtgcgcgtttcgcccgcgccatcgataaaagcggcctcaaacagatctgtgggcagcgagcggaaaaatgtgcgcatgaggatcacgttatagggcgcgatggcgatgggaatgatcagcgaccatatgctatcgatcaacccaaaagcctttacgatcaaatagcgcgggatcatgccgccgttaaaaagcattgtgaacagcacgaaaaacatcacgccgttgccgccgggcagatcctttttggaaaggggatacgcgagcaggatcgtcagcggaatgttgatggccgtgcccaccaccgtgataaaaatggtcacgccataagaattgaggatgcggctatcatccagaaacaaccggtaggcgtccagcgtgatgttgcggggaatgaccacaaagccgccattgcgcagcacctcggaatagggcgtgagggaaacggaaaccacgtacatcaggggaaaaatgcacaggatggcaaatccgcctaggataacatacatgctggcgttgaaacacctgtcgccaacggatagcacgcgccggtttaccatagcgattcctcccatctcctggccaattggttcatcgccacgagcattgcggtgccaatgaccgatttaaacaaccccacagcagacgccagggaaaaattccactgggtgagtccggtgcggtacacccaggtgtctatgatatcgcccacggccatcacctgcgtattgtacatggcgtacacctgatcaaagcccgcgtccagcagcgcgccgattttcagcagcagcatgatgacgatcacgctgcgaatgcccggaagggtgatgtgaaaaatcatgcggaagcggcccgcgccgtccacgcgcgcggcttcgtagagcgaggaatcgatgccgatgatggcggcgagatacacgatggcattccagccggtttccttccacaggtcgctgagcaccagcagcgggcggaaccaggcgggtgaggccataaagttgaccgtgcgccccgtggcttgccggatcaacatgttgaccaggccgcgggactccgaaagcatggcgtacacaattccatacacgatgatccacgagagaaagtggggcagatacgtaatcgtttgcaccacgcgccggtagcggacagaagggatttcgctcaatgcgattgcaaaaaagatggccaccggcacgctggcaacgagcttggataggctgatcaccagcgtattggtcaacaactgggcgcaatatggcgagcgaaaaaattgcaaaaaatgcttataaaagggatccgcccaagggctgcccagaatgccttttttcacagagaaatctttaaaggcaatgattgcgccatacatcggcgcgtaatgaaagcagagaaaataggcgatgcccggcagcatcatcagatacaacgcccgcttgcgccatagagtgcggcgtaggccggcggatggtacgagcgaaagattcatgcgctgttccctcccttataggggaagtatagcattccatggtgttaattacaacgcacaaaatttaacggtaagatgggtttttcgcgggaatttttccgcgcattggcataagaaaaatggcaaaagaaatccgttcgcaggcgttttgccgcttgccaacggatttggggctgattgggaatgcgctaatccaccacaatgcgcatggggaacgcgaaggactgtcccgccgccagcacctggcaatggggcttttgggaaaaatctcccgcgaaatccacaaaatcgtccagcccataccacggttctaggcacacatagcgcagcggcggttttggctggctccacacgcccaggcagggggcggcgccatattccacgcgcacgcggctgccatcctggcgcaggagcgtgatcgagcgggagcggatgccgtcgaacatcatggcgtcttcctggaacagcgcgtgcgaaagtgaaatgcgcccatcgggcacggggtagggtaggggttcgggtttcagcagcattttttccgcgtccaagcggtagagagcgagggtttccggcgcgtcgagcgccagcgcatcgccctccgcgcagaaaaagcctgggtgcgcgccgagacaaaagggcatatttcccgcgccggtgttcaccacgctgtggcgcacggatagcgcgttcccttccagcgcgaacgtcaggcgcagttcgaaagaaaaggggtaaatggcgcgcgtattttcatcgtcgcgcaacagcaaggtcaactggctggcggactggctttccagcgcaaattccttcttgcgcgcgaagccgtgcttgggcatggcgtattcctggccggcccagcggtatttgccgccgtttaagcggccaatgacgggaaagagcagcggcgcttgcccgctccacaccgccgggtcgccctgccacaggtgctcccggcccgtggatacttcgcgcaggctgcaaagctgcgcgcccagcgattgcacgctggcgcacagatggtcgttttggatggtgtaaaccatggttgactgcctcctctattggcttgtaagtgagtttcttatagtatgcggacaactattgctttttgccgccgaaaaggcggcggcgcttatggtaatacacgcgcaaaatgaatgcccaaatcagtgcggtgatgaaagagccccaaaatccctgcgtatacaaggtataccatagcgcgttcatatcgctcgcgagggcgcaggcatagaaaaaaagttccaggaaaacggcgatctggtacaaaacattgagcgcggcaaagccgagaatggccctatacgcatattgccggtacgaaaggaagccaacaaaagccacgctggccagcaaggttctgccgagaagatatgcgacgtccgtgccagcgacccatagaaacgtatgcgcctcttgcagatagcgcgccaattccagcgccgaaagcagcacattgaccggcagtaccacgaagcggatgaattgatgaaaaaccaggggcgtggcctcgatatcgtagtatttgcgcccggcagccgcctcttctctttccgcttcctccgcgggggaagcggggtgctgagccatatattcttcgaatggcacgccggcggcgcgcgcctgcgccagatcccttgccaggcgagggcagatggcggcataggcggataagaggtcgccttcttccgccagcgcggcgcgaaaggccatctgctggcaagcccattccagggaaaaatccggctcgtacgccatcagcgtttccagttgccgccgtccctggcgggtggaaaggatgccttcggtatacaatttttccgcaaaatccgtggccgccgcggtttcggcgctgtgcggggattcattcatggcttcgtttcctcccttcgtttcgaaagcggcgcttgcaccgcgcgcgatgttcccaaaaccattatagcgcgaggaatttgcgctgtcaatgcaattctttacagtcgcaacccaaatgcgccccaaatggtaccggctgtagccgcgcggttttttaccaaagaccctgtgcggcgtttacatcttcgtgctaaaatggtgcagaacacttgtctggaggatttttttatgaaggacacccgggccatggcctatgtgaatatgtacggcgtcttgggcgcgttggagaacctctgcgcgctggacgctgtggcgcgcgagatcctcgccgcgctcaagcgccccgtttccttgtgcttcgacgtgaaggacgggccgtgctgcacctttcatttcagccgcgaaggttgccgcatggaggaaagccgggcaaattgcacctgccgcatgcgcttttcctcgccggaagcgttcaacgcgctgatcgaccgttcgaagccgggcctgcccgtaaagggaatcgggcagctactcgcgtttttgactgggccgtttacgcagctcaccaaccgacttacggcgctcctgcgcccctcggaagaggccctgcgcgagcgggcgttttttgaggagagcacgctcctcaccctgtatgtggtggctggggccatttccgccctggccaacgaggatcccatcgcgcgcctgtcggcctcgtatacggtggatggcgaaatttcgctgggcgtgcgggacgttgcttccgtgaccatcgcggtcaaggagcaccatttcaccacgatcaaagcgccctccgcgcatccgcgcgtgattatggaattcgcggatctggatctggcgcacgggctgttcacgggcacggcctccaccatcgacgagatgtgccgcggcaccatccgccttgccggcatgatttccatggccgataacgtgaaccgcatactggacagggtttccctgtacctgggctgaggaggaaaatacatgtccaaatatcctgaatacaaccacgaaaagagccacgcctggttcgaccgggcgcgctccgtcatcccggcgggcgtgtacgggcatttggggccgtccgaagggctgtttttgccgctttccaagtggccgctgatcgcctcgcgcgcccagggaacctatttctgggatatggacggcaaccgctatctggattgcatgtgcgcctacggcccgaacgtgctgggctattgcgacccggatgtggacaaagccgccatagagcagctgggcatcgccaattgcaccaccgcgccttcctataagatggtggaatgcgcggaaacgctggtggataccgtagccatggcggactgggccttcttcatgaaaaacggcacggacgccaccaccttttgcgtgatgctcgcgcgcgcatacaccggcaagcgcaaaatcttcttcctgcgcaattattatcatggcaatgacccctgggccatgcgcgcggactatcccggcatcctgcccgaggacgtggcgcacaatgtggtggtgccctggttcgatttgcaggccatggaagcggcctacgaccagtgcaagggcgacgtggcggcgctgatcgcccagccctacgaccacgggaacttcttcgacaaccgcgtggcttcccccgaatattggcagcaggtgcgcgccttttgcgacaagcgccatatgctgctgatcctggacgacgtacgcgcgggcttccgactggatttggccggttccgatcactattatggtttcaaagccgatctgatttgtttctgcaaggcgctggccaatggctataacctgtccgccgtgtgcgggcgcgagccgctcaaagccacggccgcctcgctttcgttcaccggttcgtactggatgagcgcggaaccattcgccgcctgcatcgcctgtatcgataagatgaagcggctcgatacgcccagcctcttccggcgcatgggcgaaaagctcacgcagggatttcaggccgcggcccgggcgcacggcttcgatttggtggtttccggcgaaccggcgctgttctacctgcgcatcgccaacgacgatagcctgatgctgcaccaggaatgggtcgccgaatgcgtttcgcgcggtctgttcctcgccagccaccacaaccacttcatgaacgccgccatgaccgaggcggacatcgccttggccgtggatatcgcggacgacgcctttggcgtggtcgccgcgcggcatccggaaattcggggataaaaaatgggcgggccgaaaaagcaaatcggcccgcccgttggttgctcagtccatctcgctcacatcgagatcgtgcccggcgtgcggcgatatgcccgcgcgcagcttgcgggaaaagcgcgccatcacgatgatggccagaatcccggccagcacggcggtgagcgcaaaattcagccagatgcccgtcagccccagcggatagagcgcggccagcagcaagagcgggaacaccagcgccgtgctgacggaaatgatggaagcgctcccgggcttttccacggccagcatatagctctgcacggcgaacgaataccagcgtgtgatgtaggtgaggctgaagagcttcaatgcgaaaaccgcctctgtgaggaaggtacggttcgtctctcccatgaacaacacggtaatcggctcgggcaaaagggcgattaccgccactgacagcagcgaaagaatcgcgctggagacgaagcagcagcgttcgatggccttcactcgatcgagccggcccgcgccccagttgtagcccaccgcgggctgcagggaatcgcacatgccatagagcaagggctggatgaacccttccacatacatcaaaatgccatagatcgaaaccgccgattcgccgcccaggcgcaccagcagcatgttcatcacgatggaagtcacgcggcctgcgatgttgttcagaaagttcggcgtgccgcaggccacgatttcccgcaccatggaaagtcggaagcgtgggcggcaaaagcgcaattgcatcttgccgcgcgtgaaggcgaagaaggcgatcagcgcgcagaggatcataccggagcaggtgcccagcgccgcgccgatgatgcccaggtccagcacaaacaaaaacaaaaattccaaagcggcgctgaggacggacattaggatgttgagcagcatgctgccgcgcaccttgccgcagatgcgcaggtaattgtccatggcgaacacaatggtcgtcaccggggaacatagcgcgtatacgcgcagataggccacagccagttcagcaaattcgccgctggcgcccatcagcgcgatgagcagcggcgcggcggcatacaaaagcgcgcccacggctacgcctgcgcctacaatcatggcacaagcgcaggaaaagatgttgttggcagcggcatctcgtttttggcccaggctgatggatatgggcacggacgagcccacgccgatcagatccgccagcgcgaaattgatgatcacgaatggcatgctcaaattcagcgccgcaaacgcagtctcgcccaggatccgccccacaaatacgccgtcaatcaactgatatagcgcggaagccaacatgctaatggctccgggaatggcggcggtgaaaaataggcgcacgggcggcgtcttggcaaacaggctgtgcgtgttcatgtggagaacctctcttttgcatcgacaaatttggaagggtatttatccgaattcgtattgtctgcagtataatccgaattcgtcccttttgcaaggggaattgtgtaaaacccttgtagaaaggcgaagcgttggcgcaatgcggcgtacctgcgatggatgattggcccggggttgtcaggcaggtctatctgtggtataatcaaagtgggaagttggcggg

SEQ ID NO: 722 - DNA, 2227 bp, Unknown
  16S sequences of unknown bacteria
gatgtggagaccttctgggcgggcggcgcgctggacggggagagcaacgtgcagtttggcgagggcggcgcgggcgcgttttcggatggcaagctcaccacgggcatcaagagcccgcacatcgcgcgcgtgctgcaaacgctccatgcctgcggcgcgccggaggacattttgtacatggcccatccgcacgtgggcaccgaccggctccggcaggtggtgcgcgcgctgcgggagaaaatcctcgccctgggcggggaaatccattttcaaacgcggctcaccggccttttgcaggaaaatggcgcgctctgcggcctgcgcgtggccaacgcgcgcggcgaggaggcggaatggcctgcccgcgccgcgatcctggccgtggggcacagcgcgcgggacacgttcgaaatgctgctgcgcgcgggcgtgcgcctggagcccaagcccttctccatcggcgcgcgcatcgagcacagccagcggcagatcgaccgcgcgcagtatggcgcgttcgcggggcatccggcgctgggcgcggcggaataccgcctgagcgcgcggctgggcgatggccggggcgtgtacaccttttgcatgtgcccgggcggcagcgtcatcgccgcggcttcggaggcgggcggcacggtgatcaacggcatgagcgagcacgcgcgcgcgggggagaacgccaacagcgccgtgctggtggatgtgcgcgtggaggatttccccggcgcggatccgctagcgggcgtgcgcttcgcgcggctgtgggaacagcgggcctatgccctgggcggctaccgcgcgcccgcgcagctggtgggcgatttcctgcgcggccaggcctcaagcggcccgggcggcgtgcagcccacgtaccggcccggcgtcgcctgggggcggctggacgagtgcctgccggatttcgctctgcgcggcctgcgcgagggcattcggctcttcgaccggcgcttgcgcggctttgccgcggacgacgcggtgctcacgggcgtggaaacccgctcttcgtcgcccgtgcgcatcccgcgcgacgagcgctgccaggccagcctggcgggcctgttcccctgtggagagggcgcgggctacgcgggcggcatcacctcggcggcggtggacggcatccgctgcgcgctcgccctgatggaaaaggagcaaaaccatgtggaacgttctcaatgaaaacccggcgctggccatcctggcaggcgcgggggtgctgctggccgcgctggcgctgctgctgtggcggtttgcgtgcggcgtgcgccgctccctgcgcgcgctcgccgcgcaaacccggcgcgataacgcccaggccaaccaaacgctttcgctgctcacccagtcgctgggcgacgcggccgcgcaactcacgcgcgccagcgaggccgcgggggaagaccaggaaaaattgcgcctggcgctcgaaagccagatggagcagatgcgcaagagcgtggattcgcgcttgcaaaccacgctggaagcgcggctgggcgaatccttccgcgccatttcggagcagctcgagcgcgtgcaccgcgggctgggcgagatgaacaccctggccgcgggcgtggaagacctgcgccgcgtgttttccaacgtgacgctgcgcggcgcctggggcgaggtgcgcctgagcgcgcttttgagcgaggcgctttctcccggccaatacgccgcgaacgtgcacatcgagggcgcgaaccgcgtggaattcgccatccgcatgcccgggcgcgaagagggagacgtgtatttgcccatcgattccaagttcccgcaggaggattaccgccgcctggtggaagcctcgcaggcgggcgacgcggccaagaccagccagtgcgcggccgcgctggagcgcgccgtgctggaagaggcccggcgcatccgcgacaaatacatcaagccgcccaagaccacggatttcgcgattatgttcctgcccgtggagagcctctatgccgaggtgctcaagcgcccgggcctgtgcgagaggatgcagcgggagtttcgcgtcacgccctgcggccccaccacgctggcggcgctgctcaatagcttgcaaatgggcttccgcacggtggccattgagcggcgcaccgccgaggtgtggcaactgctgggcgcggtgcgcacggaattcgcccgctatggcgaggccgtggacaaggcgcgcgcccgcctgcag

SEQ ID NO: 723 - DNA, 10073 bp, Unknown
  16S sequences of unknown bacteria
tctgtcttgcggcggcgccgcccgaacgaaagaaacggacgtttatccgccgtcccgcccgcgattgctctctattatgctatcataaaagcgtgcgtttgtcaagtatttcgcccgtgacgcgcggcgggagttccctttggcgcctatttcctccaaggcgttcggcgcagacctgccccgctcgtttacaaatcaaaaaaagaaagcgtcccgaagacccgaggcgcccgattttcaagagatccgatcttatgcggcatttttcttttttctgcgcatttcccacaagcgactgaatccgtaggaacgcgtacagcgatttttacgcatgatgaagtagtagcagctcacgaggaaaatatccgccgccagccaagccgtcggattggagaggcagatgcccgtaaagccgaaatagcggacgaagagaaaggaggaaagcgacctgccgacgagttccgtcacgcccgccaccatggtcagcgcggattttccgatgccctgtaaggcgttgcgatagatatgaatgattcccagtgcgccgtagcaactgctttggaagagaagatactttttggaatattgtatcatttcctcgtagtagagcgccgcgtcgcccgtactcctatcgagaaaaatactcgtgagaggtccgccgaaaagcgcgcagacggcgatcccgacgccccaaaaaagcagggtgtacgcgccggcggcaaatacgccgtccttgatcctgccgtaatttcccgcgccgtaattttgtcctgcataggtcgccatagtcacgccgagcgcttcgaacatactccccaaaagattgttgattttcgtcgaagccgcgtatgccgtcaccacgccgggcattcccgcgtcgagggaattgagcgcggattgctgtataatacaccccaccgccgtgatcgaaaattgcagcgccatcggcaagcctatcgccacgtgaccgccccaaagtttccaatcgatcttccaatctcctttcgcagggcaaagcatcggatattttttcaacatatagacgatgccgcctactcccgaaacgaactgactgatcaccgtcgccgtcgcgacgcccgtataattcatgccaaacactaaaatgaaaagcagattcaatccgacgttgagcgaagccgaaacgaaaagaatgacgagcggcgtcttggtgtccccgatcgcgcgcagcgtcgccgcggcgatgttgtaaaggaccgtggcgccgatgccgccgaaacagacgaagagataccaatacgcatagccgaaatacttatcgggcgtctgcatcagccttaacagaggcttcgtaagaggcatggaaagggacgtcaaaagcaccgtcaaaacaaggcacagttccaaagaaaccgccacgctttttctcacgccttcctcgtcgtgcgcgccaaagcgctgactagtgcgcacggcaaagcccgccgtcagccccgacgcgaaaccgagcacgagaaaagtgaccgatcccgtgctgctcacccccgccatcgcgtccgaagaaatcgcgcggccgacgatgatggaatccgccatattgtaaagctgttgaaagatattgcccaaaagcacgggcaacataaaaaacaggataagtttgaaggggcttcccttcgttaaatccttcgtcataaaaaacctctgcgggataacctccgctcccttctctcaatcgctttccctttttatccgcgctttccctctcggcaaagcgccgcccatccacccgcgtgaacgtatgtgtattatataattgtcgcgacaaaaattcaatcgttttatcacaagttttttttatgattcctttttgcgattttgcgccagaaaattatcgaatttttcatgaaacaagcccccttttcggcgcgtacccccgtaaaaaaggaagcttaggaagcgtcgggggagggaaggcgtctatccgcgttatcctgcttagtttttaagcggcatgagaaggagataaaaaagattttcgggcaggaagtgaaacggcatagcctataaaatttaaaaggcgggcaaaaattttgcgcccgccttgttcttcatgaaaaagacttctccccaaagagaagtctttaaaatcaatataagagctgcgccttatcgggcagattcaatacgcccgaattatctccccgcacggaatactgcgcctcctgaaaggtcttatgcggaatcatatacacccgcttttcccgccagatcgtttccacctcgccgcgaagcaatccttcgttcaaaattctgcgcataatgttttcgttcagttcgataatcgccgcatgatagccgcccgcaaaacagtccaaaatatccgcgcggatccgcgtgatcacaaaaatatcttccggaacgtatcccacgcttttacagtgcccgcagggtttgaccaaaaacgaaagcacgtcgcttcccacgcgcttgcgcgtaaattgcgtgaggcaaagctcgctcatgggcaggacgtggcttttcgccttatccttttcgaggcacgcggtcaattccgccgtcaccgcctccttatgcccctcgtccgtcatatcgatgaaatccaccaccacgatgccgccgatattcctcagccgcacctgccgcgcgatctcccgcgccgcttcgagattgaccttaaaaaccgtatcttccagactcgtatccccgacaaagctgcctgaattgacgtccaccaccgtcatcgcctccgtatggtcgatgacgagataaccgccgttatcgagaggcacggtgggctgcgccgccgcgaatacgagcggcgatattccgtactcccgcatcatcgcgcgtttgcccgtatagtggacgatcttgcgttcgggcaagtccccgcgaagccgcaccagcttcaacagtctatcgtacagcacgtcgtccccgacgtacatcgccgtcacgtcgtcccccatgctgtcccgcatgatccgaatgggcaaatcgaaatccttatacagcacgctgcccacgggggcgtccttggcgcattccttcatggcgccgtacaaatttttcagatactccgcctcccgcttcaactgccggcgcgtgacgaacggcgcctgcgtgcggatgataaagccctcgtccgtccgttcgcgcattttatccgcggtgaacaggagattttggcgaagttcggcctccgtgattttgcgggagatgccgacgaaatcggtattggggagataaatgagattctttcccacgaaagaaaggtgcgtcgtcaccttagcgcccttattcccccgcggcggtttggtgacctgaacgatcacctcgtccccctctttgagattcagctgctgggcattcgtccctcccatggtaccgtcatattttgaataatcggtatacgtttcctccatggaaagataacaattgcgttccagaccgcaggcgataaacgccgcctgcatcccgctcaaaacgttcatgacgcgccctttatagatattgcccacgacgtcgccgctcttttctttctccgcggcgaactccgcaagcctgccgtcctccaaaagcgcgacaaactgttgaccgcaataacggtcgaaaaaccattccttcttcattccgtatcgtaaacccgctttaaattaatgaccttttcaaaaacagacgcaggacgtccgcgacgatcatcctcccccgcgctctcacttctttccattcttcgactcatagtatagcatattacacggggttttgcaagggggttttataaattcgtcaagggtttttcacatattttttacataaattcacccaaagtccggtagattcccgacgaaaaaaagatttccgcgagttcgttctggcgaagttcgcccatgtactcctcgtttttgtcgtatacgtcgaggatgaggtacttatcctgcgtgacgaagccgaccgcgcgctttaacgtacagtcctccgtcaccgccacgcggcggatctccacgccgcggcggaacgcgtccttggacgaaaaattgattttggtatatttcgcggcttcgggcttggtgttcccgaacgcgcccgcgccgagaaagagcgagaaggcaaggagcgtaaaattgggctttgccttaacgcagagcgccgcgaacgccgcgagcagcgtcagcgcgaacgccactgtgatgccgcggcagattttatccgcctttttttcctgcatatgcagacacagcgcacagcgcagcacccgcccgccgtcgaggggataggcgggaacgatattgacgagcgcgacggcgagggaaacgaaacaggcggtgtccgtgaaagcgtaggcgtcgggatagatccaccacagcgccgcaaaagccgccgccgtacaaagattgcacagcggtccccacacggcgacgaaaatttcgtccttgaaactaatccccgataaatccccgtcgatcaccgcgccgtagggcattaggaccacgcggtcgagcgagtagccgagccgcgcggcggcgaaagcgtgcgcgcattcgtgctgcaaagccaccagagcgctcaaaagaaacatcggcaactcgccgatgaagcaatagtacacgccgagcagcaggaaaagcgggtgcacggaaaatctcgaccgcgcacggcggctcttccgccgccgatcctttcttttagacagcgcgtcgaaaatcgcagggtcggatgccccctgcgcgcctgaaacgggtgtctgctcggcgttttccgccgagatatgcggcgtcgaagcgtttgcgcttgcggcgaagtcctgtacggtgttttccatctaaatttgaagcggcgaaaccgcgctttgtgaatcgggcgcagacctttgcttaaagccgcccgacgatccacgaacagaggatacgttcggcaagtttcgggcggcgatccccgcgaaggctcctgcgaagtgtttgaaaggagatgcgtccgccgcggtcgactacgagggcagggcggctctccccgcaattgccgcccgtttcctttgacggcgggacggaaagagggcgaaaaacgaagagttttggcggcaaaaacgtcacaaaaacggcatcacggtaaggttttcgcgccgcgaaaaacgcggcgcgcggatcgtctgctctctccctataattttcgtactcgattaggctcccgtcgccgcgtcaagtttccgattttgcccaggtgaggcagttttcgctgtccaccgtgtagcaattgagaagctcgtcgcccgaatacatcatgacgcggacggccgtttcgcccttgctgtaccccacgggcacattggcgtacaccttatcccccgtctgataatagacgtaatccagcccgccgatgacgccgtaaaagctgtcggtgtgggaaattttcacatcgtaagtgccgtccgaattcttcaagacggacgccaccttgccgtccaccgcgggatatacgcagcattcgtccgtgaaggtgagcacgcccgtgggagaaacggtgatttccgcatccgaaagctcgctcacgatactagtcagcgtgaagtcggaatagacgcgggtatccgccttttccgccgcggcgggcatcaggctcctgaaaaaggtgttgatggcgctttggggcacaaacacgttcgtgaggaaaatcgtaccgcaaagcgcgcaggcgagtgcgaattccaccgtcaaaaacacgcccgaacgccgttccgaaggcgttttcatcgcatacctgcccgactcgttttcggagagttccccttcgaacgccgcatcttcttccgagaaacgcagctttttcttttttctccatcccttctccgccggctcgtcggaaaggagcacggtgtccattcgttcgcccccgtccgaataggcgtatgcgtttacttcggactcgggcagcggggaattttgcgccgcgtcttcgagggcggcgttttccgccgcggcatagaggggatcctgcgcgagcgcatccgcgggtgccgcgcgggaataatcggggtcgcctacgcgattgttgacgcgcgagataagacgctctttgagattcggcgcattcttcccgcggacccgacggttctttttcttcacaacgttgaccgtagaaacgggaatttccagcatttcggcgtattcgatttcttcgttcataaaaaatctcctttttcctttcggtattgttctgatttaatctatgaggcgtaaacgcattttataacaaaggaaaaagaaattttttgcgcggagtttgtcgaaaggggaaaatttcctaaaaatcgggaacgcgaatccggcctttccaaaaaaaaacagaagcgattatccgctctaagcggtaaaaagggaaaaaattagtttttcgggaaaacgacaaagagaagttatgttatccccatgccaagcgaaggcacacggcgccgacctcggaatctctcctcgacagagaagaaaaaagcgaaaggaatccctcgctttctcctcgccccgctcgggcaaaaggcaggtggatgtcgtcaaagcgcccgaacgaaacgaccgtgcggaaaagatgccgccgttccgcgctcgaaggaaaaacagaatcgcgccgccaaaagccgcgggaagaatgattatagtacggcggaaatgcctaacgggtacgcatagaagagtcaacgcagggatagtcgcgctttatttccgtggttttttcacaacaattttttcaaagcatattgacaaaatatggtttccgttttataatgtatgcaataaaactttaagggagaactgtatgaaaaaaagatttatcgctttgacggcggctctttgcgcctgcgtctgtgcgctctttgcctgtgtcgcgtgcacgggaaacgcctcgcataagggctcctcgactaacgctccgctgacttacggcaaaaggtatcttttctctgaggatataggaaaggacgctcagcattatttgatctttgaagccgacggcacgggaatctatacggtttcgggcgagtacctcattcgatttacttatctttatacggacagcggactgcttcactgtttctataattccctttcgggcgacgtcaacagttacagcgctcccgagctcgccaagtggacaaaaacttacttcccgtcgccggaggtattatatgaagataccgcacacggcggagaacaatatatctgtgaaacatatctgccaaatattcctaatttcggaaagtacaaagccgactgactcgataggaaaaacgacgacgagaatccctcgccgtcgttttattttttaattttaatcggtcccggtccgttaaaagcacgtccgtaaagaaaaaacaaggtattggaaagctgttttattttttcggtttttaaacggcttttttccgtttggaaagcgcccgtaaacaggcaaaggttttaaaaacagcatttttagcctgccaaaagtcaaaatttccaaaaaacttttaactactgcgcgcttgaacggtagtaccgacacttataagggctgataagggcgattctccctcattttaatcagcgtgcgttcacacaaactataaacgtcaaattttggctatgtttccgcaatacaccgtggttcgtcggctaactgcgtcgctgtattcgcccgcttcccgcatcatggaaaaaagtatctcaaaaattcctgtatttgtgtcaacacgctctaaaactcttctctgcaaagccgcaaaagcatatccgcttcatttccgatgcttccgatgcggaaaggcatactgtcctcccatttgcttgttatatttttctgtcgtcctttcacaatttcccgcagcgccttacgaagccgcagacaaggcgaaaaatcgacaaaaagaacatcggagcctgtctttattcaaagcgtttgccctctctgcgcagcgcttataaaagcgcgtctttctgaattttaaagttctttcgtttcgcctacggaaaggcggtgaatgcgctctccgagttcttcctgcaaagcgttgaacacggcgtcccccacgcccgacgcaaaataaaattccgcggaggtgaatttttccagctcgaaagcgaaattgcgcacccattcctcgccgaagatcggcttgccctttttatcggtgagcgccaaagcgcccacaacggcggaaacgggtctttgatacgtcttttcggcgcgctccatcatctgtttcagacccgcgtgcgcggcgcccacaaagagcaccgattttccttcctccgtgacgaggagcgcctgctcgtgcgcaaaggtgtccgtttcgaaatatttttttccgtccacaaagtagcgcggcgattccaagagctttttatcgggtttgaaattagagagcagactgagttcttcgtcgatcttcaaaaagctcttcgtaaacaccgttccctccgccgtcagctttttcggcagagagatcgtcttatagctaaatcgggattttttgaaataatgcggctcgaacgccgtttcgcgcgcgtacagcttcgcgtttttcaggcgcggcttcaaggcgggaagtcccccgccgacgaaaacatgaccgtgagaaagcacggcgacgtccgcaaattcggggaatatttcgagagcgctcaaattcttttccgccgttttgtttccgaaatcgaacagacaattatgcagccgggaatcgatgaaaagccccagcccgtattccttttgaagggcggcgtcgccgccgtattcgcccgcataaaccgtaattttcataaaacttccccgtaaaaattctattttccgctcccttgcgcaaaaacgacgaaagcctttgtccggccccgaaaagccgcaaaaagtttactgttccaccaaaaatccgcgctctttcagggcgcgctcgattctatccagcgtttcctcgtcgggcgccgtgacggtgtgatagtgatacccttccgtcaccaccatcaaaggtctgcttttgccgccctcgatgctgcgcacgaactccgcggcgtgaacgcggttttctatattcagttccgcctcgatatgaccgtacaccctgtggctgacgctgacgttttttatcgcgccgccgttgtcgaggatgagttccagttcttcggcaagctcgctctccgtatgatataccttgaaaaccctcgccgccaagcgcctggaagcgagaatatatccgcggtttgtggaaacgatgggcgcgcctgccgcgcgaagcaccgcgatatcctgtacgatgacctggcgggaaacgccgaatctgtcccccagcgcgcccgcgctctgcggttcgtccgtcgagccgatcgccgcgaggatccgatccctgcgtttttcccgcgccatatttccgatgttgtccgtcattgcgttttcctcccttgatttgttctcatctcagacctgcccttatcgttcaggcaagaccgaaaagaatatttcccctttcgccgtccgttcgcgggttttcaaaacgccccttacgtcgacggcggcagacgcgcggcaagagccgttccgactcgcattccgattcaaagcgcgcgccgatagaggttcctgcttcctccgcctctgcgggatagttatagacgccgaggcgcattttcgtcctccgtaaaagatttccgaaagctcccgtgcctatactttcccctttatcaaatacgccttactcatatactatttacccgacgtcggctgtttccaaacgccgtcagtccacggggtgcagatttttgagggatacgtcgagaatgggcgccgagtgggtcagcgcgccgctggaaatgtaatcgacgcctaaattcgtcagtcgggcgatattttctttcgtgacgttgcccgagcattccgtttccgctctgccctttgtcatcgccaccgctttcgccatattttcgggggacatattatccagcatgacgatatccgcgcccgcgtccaatgcctctttcagctgttccagcgtttccacctctatttcgatcttccttacgaagggcgcgtatgcctttgccgctttgacggcggcg

SEQ ID NO: 724 - DNA, 8622 bp, Unknown
  16S sequences of unknown bacteria
tacccgccgcgatgtcgggattggcaagcatcgtggacacgagcatgatgcccgtgatcgcgcagatgactaccgtgtcccaaaacgtccccgtcatggagacgagcgcctgacgcgccgggttcttcgttgtcgcagacgccgcgacgagcggagcggagccgaggccggactcgttcgagaacaggccgcgcttgaagccgtactgcaacgcgagcgcgatgccgctgccgacggcgccgccgaacgccgcctgcccgctgaacgcgcaggtgacgatcagcccgagcgcatcgcccacgaactgccagttcatgccgatgatgacgatgcagcccgctgcatagagcagcgccatgacgggcacaagcttttcggtgacgcgggtaatcgacttgatgccgccgaagatgacgaccccgaccagtatgacgaggaagacgccgatcatcgcgttggccccgacgagctgctcggggctgtcgaaggggatgtaggcggtgatgacgccggagagggagttcgactggaccgacgccccgatgccaaacgacgcgatgaacgcgaacagcgcgaagagcaccgccaggaccttgccgagcttcttgtgcttgaagccacgctcgagcgcgtacatggcaccgccgagcatctcgccgcgatggtccttgacgcggtacttgacggagatgaaggtctcggcgtacttggtcgcgatgccaaagataccggtgatccacatccagaagatggcgcccgggccgccaaagaacagaccggtcgccacgccgacgatgttgcccgtgccgatagtcgccgcaagggcggtcgtcagtgcgccgaactgcgagacatcgccttcggactcggtatcctgcgccgtgaacgacagcttgatggcagttccgagctttcgctggatgaacttggtccgaatggtcatgaacagatgcgtgccaaggagcaagacgatcatcgcccagccccacacgaatccgtcgattgcatcgacgccggcgctgaacgcctctacgaatccctccatgcatgcccccaaagctcaaggattattcatggagatgattgtagagacgtaatgtttcggaaacaggcaccaaagcgcccctctccgttaacgactgttaaatgtttgtttcgagcggcacctcggacgcggcgctgcggctacagcgagagctcgagcgagaccgggcagtggtcgcttccgaagacctcgttgtggatgcccgcggcgctgacggcgtctttgagcccctcgctcaccaggaagtagtcgatacgccacccgacgttgcgctcgcgcgccttcatgcggtagctccaccacgagtagatgtcgcccatatcgggatgcaacaggcggaacgtgtcgataaagcccgaatcgagcaactcgtccatcttgccgcgctcctcgtcggaaaagcccgcgttgccgacgttctccttggggcgcgcgaggtcgatgggctcgtgcgcgacgttcatgtcgccgcacacgacgacgcccttcttctgggcgaggtcgcccagaaacccgcggaacacgtcttcgaactcgcagcggtagtcgatgcgcgcaaggccgtgctgggcattgggcgtgtagacgtcgacgaagtagaagtccgggaactccaacgcggtgacccggccctcgtcgtcgaacttgtcgacgccgaccccgtggatgacgtcgagcggctcctgtttggagaagaccgccgtgccggaatagcccttcttctgggcatagctccagtactcgtggtaatcggagaagtcgaggggactctgcccctcttggagcttggtctcctgaatggcgaacacatcggcgtcgaaggcggcaaacgtctcttcgaagcccttcttcacagcggcgcgcaggccgttcacgttccagctcacaaacttcatgtcggtttcgtccgtttctcgtatttgcaggtcactcggcgcatgcgatgccgcccctcgtcgaatgcaccgattatcgcacagcgcgcgtgccggatgcgatcggttgccgcaccgtcacgcaaagccggaaacgtagatgagcacaaaccccagtgccatcgacaggcaggcgatgccgccgagtttgcggtaccgatggacccgcagccacgaagagcgccgcacaaagccgaacgcccccgtcaggcacagggcgggtacgccaaagacgaacgtgtcgagggctaggtaggcaaacgggccggcggtctgcgtgccggtcgcaaacgcgtcggcagttcccaacaccatgagggtgacaaacgcccacgccacgatgcaccaggcaatccacacgcctcgcgccagcgggtacccgtcgacgagcccttgcacgagcggcaccgcagaaacggcggcagaccccgcccgtgccagcaaggagagctggcggtcggcggctcggcgcagcttagagatactcggatagcgcttgtccggctcgatcgcgcatgcccggtcaagcacgcgactcaagcccggggccacctgcatggcctcccgccctgggtgctcgcctgtcacgaggaagtgcaggagctttcccgccgcgtagacgtcggcgcgctcgtcgctctggccgaacccgaactgctcgggcggggcgtaccccatcgtcccccacagctccgtatcggcatgggcgccactgtgcgggcgtcgggcaatcccgaagtctatgagatgggcatgcgtgccgtcgaacacgacgttcgaggggttgatatcgcggtggatgatcgggccgccctcagccgcatggagcacctcgacggcgctgcacacgtcgtcgaaaatggcctgggcgcgatgcaggtcgggaggctggatctcgtagagctcctcgaccgtggtaccctccacccactcgagcacgacgataagcctgtctcccacgcgggtatgcgagacgacatggggcagaagcgggctgcaaatagcgtccatgagctcgtaaggatgcttcttttccggctcgacttggaggaacttccggacgtagcgcttgcctgccgcgtcctcgacgagctcggtccgctcgagacggttgtccttcagcagctgaacggtcgtatagcgggaggcgtcgtcgtaggaggagacgaaggcgtcgatgtcgtcagtttgcgccgtcatcgctgaccgtcttctcgccgaaacggaaaagctcgtcgtcggtgcgcgagaggtcgtagccgtgggtgatgcagaagatgacgatcgcgtcccgccgattcttgctgtagaggtcgccgcaatcggcatggttgagcagcagccgcatctcgcgcagcgagacccccatcgcaagcccgatcgcgagcaccttgtcgcggctcgcaccacgggcgccgctgaagatctggtacccgaaggtctcgttgaggtgcgcgttcttgatgactgccgccttgcgcaggccctttgcctcgagaagctcgttgagatacccggacaggtcgcggtccgcgccgtcttcgtattccaagaacccttccggggtatgggaacgcgcaatctgctcgaggagctcgtcggtgagtatctgtctgtcttgcacgcctcgcctttcgaagcgaatggtcttttttcttggacgcatagtagcagagccctgcgacagacgtttcgcctcgcgtgcgcgcggcgtcacagcaacgctccccgtgctcccctctcgtatcccgttgtccgcagttttgcgcactaagatactaggagctaccgtcgcgcgattcattagctgccagcatagaggagggtcaagcggcaccagatacgtcgaggcgggcctgcttgaggagggagatttcctccgcgtaccccgacagggagtcatggggcgtctcgaggaaaaacggcaagtccttgagttgcggatgcttgacgacggccgtgagcgactcgaggccgatacgccccttgcctatctgctcgtggcggtctttgtgcgaagcgagcgggtttttggagtcgttgaggtggatcgcccgcaagcggccgatgcccagcacgcggtcgaactgctcgagcacgtcgtctaggtgcgcgaggtcgtatcctgcatcccacacatggcaggtatcgaggcagatgcccacatggtcttgcagctcgatgcgctcgatgatgtcgcgtagctcctcgaagctgcgcccgatctcggttcccttgcccgccatggtctcgagaagcagcgtcgtcgtctgcgcagggtcgagtgcggagttgatggcctctgcgatcatcgcgatgcccgcttccggcccctgccccacatggctgcccggatgcatgttgtagagctgcccgggaatctgctccatgcgaagcaagtcgtcggcaagcacttcacgtgcgaagacgagcgtccgctccgtggcagatgccgggttgagcgtgtagggggcatgcgccaagacgcgcatgatgccctgttcggaggcaatcgaccgaaacgccgccatatccgcggggtcaatcgcctttgccttgccgccgcgcggattgcgcgtgaagaactgaaaagtgttcgcgccgatggagacggcatcgcgtgccgcagccgcgaaacccttggctatggagagatggcacccgatcgtgaacacgcccgtcacgcccccaggcgaaagccgccatcgagggcgatggtctgaccggtgacgttgcgtgcggcagaccccaaaagatacgcgcacgtctcgccgacttcgtcttccacctcggagaagcgccccgtgggaacggatgcgagcgccgcctcgtaatccgccgggaactcctgctccaggcgctcgagctgggcggtccgcgcgaggacgcgcaccatgttcaccgtgatgccccctgcggcccattcctttgccgcgacggtgctcagcgctgccacggcagcccccgcagccgaaagaacgcctgtcgacgcatgtccctcggatgcgggcaggaagttgacgacgctgcccttcgcatcgcgcagatgcgggtacgccgccttcatccacgcctgcacggcaacgggcccgtattcgagcgccgtggagagctcggatgctttcacgcgcgcgaggggcgtgccgtttttcgcgacgagcgcgcagtttaccagcgcgtcgacgcgcccgagcctttccacgacctgcgcgagcgcctccaccgtggacttctcgtcgggatgctcgactttgagcggcagcacctgtatgccaaactcgccctcgagctctttcgcggccgtgagcttgcccttgctcgggccggtcacggccaggctcgcgccatggcgcgccagagcccgggcaacgccgtagccgacgcttctggccttgccgccgcccgtgacgatcacgaccttgccttcgagccccctcatcgtgcgcctcgctcgcagagctggtagaacgcgacggcgctcgccgcggcgacgttgagcgagtcgaccccgtgcgccatggggatcttcaccgtgtagtcgcacgaggcgatcgtgtgcggggaaagcccgtcgccttcggtgcccaatacgatggcgagcttgggctcagcgttgagcacggcgtcgtcgatggcgaccgagtcgtccgaaagcgccatggcagccgaggcgcttgagctgggcgatgcccttctcgggccaatcgcgcacgtcggagccgattcgcgtccacggcacctggaagacggtgcccatcgagacacggacagcgcggcggtacagtgggtcgcagcacgtcggggtcacgagcaccgcgtcggcgtcgagcgccgcagccgaacggaagatcgcccccacgttggtgtggtcgacgatgccctcgagcaccgcgatgcgcgacgcgccctcgagcagctcttccacgctgggaagctgcggacggcgcatggcgcacagcacgccgcgcgtgagcttgaagcccgtgagctgctcgagcagctccgacgggccggtatagacgggaacgtcctcgcagcgctcgatgagcgcgcgctctggctcgatgtggttgcgctccatgagcaaagacaaaggtgacatcccggcatcgagcgcacgggatatcacctttggagactcggctatgaagatgcccttctcgggctcgagacggttgcgcagctgcgcttccgtcaggcgcatgtacacgtcgagcgcagggtcgtcgatcgattcgagttcgattacctgcacgtcagactgttgctcctactcttcgaccagctcgaacatctcgggtccgacaccgcagaccgggcaggccgcaggcggctcctcgccctcgtagatgtaaccgcagaccttgcaacgccacttcttcatgatggcacctttctcgtaggctctaccagcccacatgcatcgagcacgcgggcgaaacacctgctagtagttgacgctcctgagctcgaaatacgccttgggatgcgcacagaccgggcagatctcgggcggctccttgccgatgacgatatggccgcagttgcggcaaatccagatggcgtcgccgtcgcggctgaagaccttgccggtctcgatgttgtcgatgagggcacggtagcgctcctcgtggtgcttctcgacggcgccgaccaggcggaacttggcggcaatctcggtgaagccctcctcttcggcgaccttcgcgaagccgtcgtacatgtcggtccactcgtagttctcgccgtctgccgcgtcgttcaggttgtcgagtgtgcccgggacgtccccgccattgaggtacttgaaccagatcttggcgtgctccttctcgttgtgtgaagtctcgaggaacagtgccgcgatctgctcgtagccgtccttcttcgccttgctggcatagtactggtacttggtatgagcctgagactcgccggcaaacgccgcctgcaagttcttctcagtctggctacccttaagatccatgattccttaccccttcctctggatgcaaattcctgtgaaacggactcgataatctgtccgcgatcagtatagaacgggcatgagacaaataacccccgcgagaggcattttcacaagttcagcggcgtaccctacctgcgcaaactgcattgcccaaatcgggggggcgctaggcaatcgtgttgatgtcgtatggagtcgtctggtacacgtagtagttgagccagttggagtacaggaggttcgcgtgcgcacgccacttcttgatcgggcgggcgctcggatcgtcgccgggaaagtagttctcggggacggcggggttcttgccagcagacaggtcgcgcaggtactcctccgcaagcgacaaggcgtcgtactcggggtggcccgcgatgaacacctgcttgccgttatcggtcatgagcgcgtaggggcccgcttcctccgaagtggcgatgaccctgagccggggctctgccaagatgtcctcgagcctgttgcccgtattgcgcgagtgcggcgcccagaacacgtcgtcgttgccgcgcagcagcatagacgacttgcggtcgaccttgtggatgaacacgccgtgaagacgcttgggcaggcggtacttgggaatcccgtaatggtagtagagcgcggcctgcatgccccagcagatatggaacgtgctcgtgacgtgcgtcttggaccattccatgatctcgcagagctcgtcccagtaatcgacctgctcgaagggcaggtcctcgaccggagcccccgtgatgatgaggccgtcgaacttccggtctttcacgtcgtcgaaggtctggtagaacgcgatcatgtggtcgctcgccacgtgtgttgcgacgtggcttttgacctgcatgagctcgagctccacctggagcggcgagttgctcagcaggcgcgcgatctgcgtttccgtcttgaccttggtgggcatgaggttaagcaggagcacgtgcagcgggcggatgtcctgcgtcatggcgcgcgtctcggtgatgacgaagatgttctccgaggcgagctcggccgtggcgggaaggtcgccgggaatttttatgggcattggttcctctacttcacgtcgacgcgtgcacgcacccgtctagcgggaaagacgcgcacgctctttggagacgtcgtcgccgagctcttcgccaagctgttccacgagctttttggcattgcgggacagcttgcgcggaacgacgacggtcacgtggacgagcaggtcgccgcgcttgtcgttcttgcggaagcgcgggaggccgtagcccttgacgcggatcgtctggccgggctggcaccccgccgggatcttgacgggaacctcctcgtcttccatgatgccgacgaccttgatgtcggcaccgagggctgcctgggcgatggtgatgttggcgcgcgtgtggaggtggtccccgtcgcgctcgaagtactcgtgtggctcgatgcggaccgtcgcgatgaggtcgcccgcaggagcgccgttcaggcccgcctcgccatggccctgcacgcgaacctgctgcccgtcgcggatgcccttgggtatttcgatggtgaggtgtgcgcggtccgggacgcggccctggccctcgcactcggggcacggcttgtcgatgacgtggccg

SEQ ID NO: 725 - DNA, 3866 bp, Unknown
  16S sequences of unknown bacteria
cggcgtcgccgccaacccggcgcttcgcgagcagctcagccgcgagctgggcaagaggggcatccgcgtgataatgccggagctttccgactgcaccgacaacgcctcgatgatcgcctccgcagccctcgacctctaccacgagggcatcttcggctcgctttccgacgatccgcaggcgcatctgcccctgcgcacgcgcgggtgacacgatactcgcggcccttcgcctcgcctgcgccgcctgatgcgggtacgcgtgacagatcggcaaggtattggcgatatacgcgacaaaccggaaaggctctgactaaaaatggtcagcggctgtccggtctgtcgcgtatatggtcagatgccgaccggtttctcatcgatgtgcagcggttcgcgtagctcgttcatcgtgtgccgccttcgtgcgagcgtcgcagacgaaggcgttcgatagcgcagcccaagatgctgcttgacctgcatgatgattttctcgaacgcggttgcgcttgaaaggtcctctttccagacgtcgatgaccgcgatgcccatcgcctcgatgacgtttctccgcctggagtcgtgccgctcgcgctgctctcctttgtgctcctggtcggacatgtactcgatgtcgaggagctcttgcgcccggaacaggtcgggtttgacgcatgactggttgaggtagcgcctgagttcgggcggaatccccagcgagacgttcatctcgaatctgggaatctgggctccaccgcagactgtcggcaggttgagcaggagctgcagctccgtctctttgggcgaggcggacttttcagcgcaatgggagagcgcccgttgtagggtgcgagtatggaagatgcccttgtgctctgccgcgcagcgcgaaatctcccccagcgtcgtggcgctggggacctcgtcgatgaagcccccgccatatccacgttgcggcaggtacgtgccacacagctcgtcgacggtgcgggcgagctggggaagggtgagacattcgcttacctgcaccagcgtgagctcgggcgatgcgatgcaaatgtccttgcttacctgcacgaatgaatatgggacgaatccgccagtggagacgcggtagacgtgcttgtgcttctgcacgcgcagtttctcgtctggtacgagcaggtgcaatgccgagcggctgacggggaggacgtcgagaggcgtctgcgcgagctcgcgcgcagttgtcggcagatcggacagacgcgaggcacgaggcagtcgctcgaagcgcatgctcgcccgcttggccgagagccagaattcgagtgctgatatgttctccacataaatcatcggtaagaagcatagcctgggaaccttttcggttcccaggtacgtctgcgagccgaatcggagacacggcccgacaagactcagagctcaaccagacgtgttctcgaggtgattcggagcgaaagcagaggtgcggttccccgccgccaccgtgacgatcacgagggattctagccacaggagaatgacacgatacccacggcccttcggttcgcgtcgtcgcgtgacagaccggcaagccattggcgatatacgtgacagaccggcaaggcattggccaaaaatggccagcggctgtccggtctgtcacgtatatggtcagatactgaccggtttgtcatcgatgtgcagcggttcgcgcagctcgctcatcgtgtgccgaccatcaccggcggcttgccatcgatgcgctcggtacctccgtgcgcaccatcaaaatctaagtgtggacgtataagataactttcttacggaaagttaacaaagcttcctctgggaagacaaggtcttgttttgcacctagtatttacagcgtcgaacttaggtaccaatgcgcaggtgcgcaacagggcgtgccgcgcttgcaacgtagccagcaaaggaggctgtacgatgaatcttaagccattgggcgatcgagtcatcatcaagcaagctgaagcagaggagaccaccgcttccggtctcatcctcaccacgaaagatcaggaaaagccgcagcgcggcgaggtccttgcagttggcgagggcaagtacgtcgacggcaagctcgtccccgttccggtcaaggtcggcgacaccgtcatctacggcaagtacggcggacagacggtcacggtcgacggcgaggattacctcatcctgcgcggcgacgacctgtacgcagtcgtcacgaaataaccccgttcacctgaaatcacacacattaggaaaggtcgatatacatggctgcaaagaacattagcttcgacgccgacgcccgcagcgcgcttgctgccggcgcttccaagctcgccgacgcggtaaaggtcactcttggccccaagggccgctacgttgcctgcgagcgcagctacggcgcgccgctcatcaccaacgacggcgtcaccgtcgcaaaggagatcgagctcgaggacaaggtcgagaacatgggcgcccagctcatccgcgaggccgctgtcaagaccaacgacgtcgctggcgacggcaccacgactgcgaccctgctcgctgacgtcatgatcaaagacggtctgaagaacgtcaccgccggcaccaacccgctggctatccgttccggcatgaacaaggcagtcgacgcgctcgtaaagaagatcaaggccgattccaaagaggtcaacaccttcgacgagatcaagaacgtcggcaccatctccgctggccaggcagaggtcggcgagaagatcgcggacgccatggagaaggtcggcaaagacggcgtcatcaccgttgaggattccaacaccttcggcatcgacatcgacgtcgtcgagggcatggagttcgacaagggctatctgagcccctacatggtcaccgacaccgaccgtatgaccgccgagctgcaaaacccctacatcctgatcaccgaccagaagatcggcgctatccaggacatcctcgagctgctcaacggcgtgatgcagtccaacaggccgctgctcatcatcgctgaggacgtcgagtccgaggcgctcgcaacgctcgtcctcaacaagatccgcggcacgatcaacgtcgtcgccgtcaaggcgcccggctttggcgaccgccgcaagcgcatgctcgaagacatcgcgattgtcaccggtggccagcctgccatgcaggagctcggcgtgcagctctccgacgtcaccgtcgacatgctcggtaccgccaagtccgtcaaggtcaccaaggactccacgacgatcgtcgacggcgcgggcgacaaggaccagattgccgatcgcatcaaggccatcgaggcccagattgaagacaccacctccgacttcgaccgtgagaagctccaggagcgcaaggcgaagctctccggcggcgttgcggtcatcaaggtcggcgcagcgaccgaggccgagctcaaggagactaagtcccgcatcgacgatgcgctgcaggccacgcatgcggctgtcgaggaaggcatcgtcgccggcggcggctctgccctgatcgacgccatgtccgcactcgacgacatcgaggtcgccgacgaggaggaaagggacggcatcaacatcgtccgcaaggcgtgcgaggctccgattcgcgccatcgccgagaactccggcttcgagggctccgtcgtcgtcgacaagatcaagaactccgagacgggctacggcctgaacgcggccacgggcgagtacggcgatatgatcagcatgggcgtcatcgacccggtcaaggtcgttcgctccgcgctgcaaaacgccacgtccgttgcgacgatgctcatcatcaccgcggcgactgtctccgacgtcccgtccgacgggccc

SEQ ID NO: 726 - DNA, 2796 bp, Unknown
  16S sequences of unknown bacteria
ccggctgctcattgagcacttccgcgatacggcgcacgctggccgtgctcatggtgatcatgacgaagatcatggagagcatcatcagcgacatcatcaccgacatgatatagctgaacagcgaagtgatatcgcccgtggtcatcgagcccgcgacgatgaaatgtgcgccaaaccacgatactgccgtgatgcaggcataaacgacgagcatcatgaccggattattcagcgccagcaggctctctgccttgacaaaaagatcatacagatgatgcgccgccttctgaaacttagcattctcctgctcttcccgaacatatgccttgacgacccggatggccgtgacattttcctgcacgctggcgttcagatcatcgtagcgctcaaatacttctgtgaacactgcagaagctttgcgcatgatgaacaccaggatcaccgcgagaaagcaaagcgccgctaagaacacgaggctgagctgccggctgatgatgaaacacatgatcatgctgaagatgagcatgagcggagcccgcaccgcgatgcggatgatcatctgaaaggcattctgcacattggtcacatcggtcgtcatccgagtgaccagaccagccgtgctgaatttgtcaatattggaaaatgaataatcctgtacttttacatacatgctttcccgcaagttgcaggcaaagccggaagatgcgctggccgcgaacttgccggccagcgcgccggagatcaggctgactgccgccatcacgagcatgatcacgcccagccgcgccaccgcggacaggtcggagcgttccagcccctcatcgatgatcattgctgtgacaaaaggcagcagcacttccatgatcacttccagcatcgtaaatcccatcgtgagcagggaatctttcttatactgtttcagttgtgccaaaacggtcttcatcttaaaccctcctgtcttttctctgtctttcttccatatcctcaagatgtctgtggaccttgctttccaaagcgatgagctgaacctgctcaatggtatcgataccgctgcagaccgcgtcctccatctctttcgcccgtgccatgaacatgtcggcgcaggcattcagccgcgcggtcggcaagatccgcttcttgcgctcatccccgggcgtcatctgaaaacaaagatagcctttttctctgagctttttgatcaatatggacagcgtcgtcttagaaacaccgatctcatgacataattccgtgatataagtgccatgaggatgatgccgcaagatatacaccagcagatacatctgcacaccgctgagatcgctcttgcgcagacgccgttccatctgcatttccagttgaatgctgatcttcttgattagaaacaacaaacgttcctcttggtcttcttcagtcatgtcttagcgcacctccatttctgactttcgctttcgaacagttcgtttgctgacgacttgttccgtaaggaattgtaatgcttgcaagcttgaatgtgaaattcaaagatgttataatctataaaaaatatttattgattgctattcacatctttaagaaggaatgatgaagatgaataccattcagctcgaatgctttctttcggtcgctgagcatctgaacttttccagagcctcagaggaactgaagatcacacagcctgccgtcagccaccagatccgttccttggaagaagagcttgatgtcagactgttccggcgaaccagcaaaagcgtttctctcacccaggaaggcatgctcttcctgccagacgcgcagctgatcctgaagaccgcgctttccgcgagagaacggctgggccggcatgagcagctgacaccctttgagatcggctgtcacaaccatatggaactgcgcctgctgccaaaactgttccggaagctgagcgccgaatttccccagattcgccccagcgtacgaatgatccctttcccttccatcctggagatgatcgcaaacaagcagatccacgcgtcattcggcatcctggaagatgtcagaaatacggccatcgcctttcgggagctttgcaaggtccccattgccattgtctgtgcgccggatcatccgctgacccagcatggatcgctgcggcttgcccagctgcaaggcaatatcatcctgtgttccccgcggcagacacctgcgcagatcttcgccatccaaaatcagctgctgaacagccacggcaaagatgagcgctattttacggaaagcgtggaatgcgccttcacgctggccaaagcaggcataggctatacgctgtatcccgatgtcgcgcagatgcgtgatccggacttatgctatatccctgtcactgatctgaaacagcggctgtcttttggcctatattaccggaaagacgatgatcatccgatcatgaagcagttccagcagctgctcaaagatgaatttgatcaggcaagataaaaccgatgccggtatccggcatcggtctgaacatccaataatactgtctttgtaaatcaatatgattgacccatttaaactatttgtttgatctgctcaagatctttttttcaaatatgaaacagcatagattaacgcagacacaaacgataatggccttactgccaagatcatgcaaattgctattaaaatcatttatcatccaacaatacaaacagatcataactacaaaaaggtcaataacatacataaattttttgaatattttatatattttcattttttcctccatttccccgcgcctaaagtcgcgcggacacaaatatttca

SEQ ID NO: 727 - DNA, 7755 bp, Unknown
  16S sequences of unknown bacteria
atcggtttgctcctcttgcgaaggtttgcgtagttacacactttattatagtagggaggcattgggcagcactgctccctgtggcgtaccactatccaaaaggctcccctgcgtagggggagctgtcggcgttagccgactgagggggcgtcacactacgctatcagcgaagctgactgaggctgactgaggctggctgactgactcagcggcgagtgcgaagctcttggggttgtccgtcagacctttgcctttccattgtacaactttggcaatgagttgtccctcgccgcgactggctgcctcggtcttggggctcttatatagtaacaggggttgttgcgcggccaccatccgtgaccgcttccgcccctcttgcgcgccatctttcacgaatgtaaggttcaacccgcaattgtaaggcaaatccatagcggtgcggcgctccatggggtacaatggttcctgtaaaaaggaggccgaagaatatggcgattttggaagtgaacaatctcaaaaaagtgtacgtcacgcggtttggcgcgcagcaggtgcacgcgctgaccaacgtgagtttttccgtggaaaagggcgaattcgtggccgtgatgggcgaatccggctccggcaagaccacgctactcaacatcctggccacgctggataaacccaccagcggcgaggtgaagctcaacggccggccgctttccctgctgagcagccgggaaaagaccgccttccgccgggacaacctgggctttgtgttccaggatttcaatttgctggatacgctctcgctgaaggacaacattcttttgccgctggtgctttcgggcatgcgctttgcgcagatgcgcgcgcggctcacaccgctcgcgcgcaagctgggcattgaaacgctgctggaaaaattcccctatgaagtatccggcggccagaaacagcgcgtggccatcgcccgcgcgctgatcaccgatccgcaattgctgctggccgacgagcccaccggcgcgctggattcccgcgcggcggacgagctgatgcgcctgttcgaatccgtgaacgccgaggggcagaccatcgtgatggtcacgcattccctgcgcgcggccagccgcgcccggcgcgtgctcttcatcaaagacggcgaggtgttccaccagctctatcgcgcctcgctctccacggaggaattctaccagcgcatttccgacgcgctcacgctgatcaccacgggaggcgcgcaaaatgcatagcggattgtaccggcggctggccgcctccaccctgaaaaagaacgcgcgcacttacctgccctatctgctctccgcctgtggaacggtggccgtgttttacatcctggcctatctggcgctggacagcggcagcggcaccacgggcctggtgatgcagctgggcgcgatcgtggtgggcatcttcgcgctgatctttctgttttacaccaacagtttcctcatcaagcgccgcaaaaaggagctgggcctgtacggcatcctgggcatggaaaagcggcacatcttccgcatgatggcctatgaaacgctctattgttttttgatcagcgtggtttccgggctggcagtggggctgttgttctccaaaggcgtgcagctgttgttcctgcacatcctgcaaatgccggtgcaatggggcttcgccttttcgcccagcgccgcgctggtgacggtgctgctgtttgcgggcattttcttcctcacgctgctttcgaacctgcggcaggtgcacatttcccagcccatcgagctgttgcgcggctcgcaggtgggcgaacgcgaaccgcgcgccaactggcccctggccatcctgggcgtcgtgctgctggccgcgggctatgccctggcgcagttcgtgaacaacccgctgtgggcgtttatcctgttcttcctggcggtgattctggtgatcctgggcacttacgcgctgttcaccagcaccagcatcgcggcgctcaagctgctgcggcgcaacaaggcctattattatcaaacgaagcactttatctcggtttcgggcatgatctaccgcatgaagcagaacgccgcgggtctggctagcatctgcatcctctccaccatggtgctggtgatggtgagcaccaccacatctctctacgcgggcatgaacgaaatgttctcctggtacacgcgcgatttccgcgtgcgcgcctatacggacagcgaaagcggcggttacacccccagcgcgccttcgcggctgatcctttcccagcagggctatgcgccactggacgagcaggtgtattccagcctgtccttcgcgaccgtgcgagacggggagggcggattcacgttcgtgccccaggacgacgccaacgccatggaggcttcggttgacgacatcatgcagttcacgatgctcacgctggcggattacaacctgctatccaataacgcttacgagttggcgcaaggcgaggtgctgctggcggcggcgcgggggacggacgctttcgcccagccgcagttgcgggtctttggcctggaattcgatgtggccgccaacgtgaccgcgccggatatctacgccgcggactacatgggcacggagctgtattatctcatcgtgccggacgcgcacaccttctggcaaatcgccaacctggagatccagttctacgggaacaacgccacctacgtggaaaacgtgtatgccttcaatgtggacgcgggcgcgagcgtagacgagcaggccgccctgcgcacggacctgctggcacagggcagcgtaagcgttacctgcacggcgctcgataagcagggcatacaggaattctacggcagctttttcttcctgggcatcttcctgggcctgctgtttttgatggccacggccatgatcatctattacaagcagatttccgagggctacgacgaccgcgcgcgctttgaactgatgcaaaaagtgggcatgacggcggaagaaatccgctccgcggtgcgcagccaggtgctcacggtgttcttcttcccgctggtgatggcgggcgtgcacatcgtgttcgccttcaagatgatcgccatgctgatgtcgcttttgcaactcaccaacaccacgctctttgcgctcaccacggtggtctgtttcttcgcctttgccgccgtgtacgcgctgatctacgcgatcaccgcccggtcgtattaccggattgtaagctgatcgcttgcaaatgtcagggccgcttcgcccctatgggcaagcgcgccctttttcttggccaaatggttgacagatccccggccaggcgctatactgaatgtaaaaattggccgccagcgccatagaggaggcaaaaagatgacctcacgggaaaaagtgatgcgcgttttccggcacgagccggacgcgccgggcgtgatgtggacggggcatcccaacgacaagaccatccccctctttgccaaggaatggggcatcgagcccacgcgcgaggcaatctttgagcatttgaacgacgactgccgctggattctggctgatgcgggctataagcatcccgaagggttgccggcctttgacccggcctatggcgtcacgcgcgacacgctttccgcgcccggctgttttgcggaggcggaaacggtttcggatttggacgattatccctggccggatcccaagtatctggatttcacggacgtatacaaagagatcgacaagtatccggataaaatggtgttcaccggcatgtggagcccgttcttccatcaggtggcggacttcttcggtatggagaactatttcatcaaaatgtacgaatgtcccgaggtggtggaggcgctcacagagcggatcgtggatttctatgtggcggcgaacgacaaatttttcgccgggctcggcgaccgcgcggacgtgatgttcttcggcaacgattttggcacgcagcgggatctgttcatttccccggagagcttccgccgctttgtgctgcccgccttccggcggctgatcgccgtgggcaaaaaatacggcaagctggtgatgctgcactcgtgcggctcgatttaccgcatcatccccgatctgatcgaaagcggggtggatatcctgcaccccatccaggcccaggccgcgggcatgcgcgcggaagacctggcgcaatacaaaaacgacctggctttcgtgggcggcatcgacgcgcaatccttttttgtgaacgccacgcccgctgaaatccgcgcagaggtgcggcgcgtaaagcgcattttggggccgggcctggtggtttcgcccagccatgaagaaatcctacccaatgtgcccgccgccaacatcctggccatggcggaagcggcgcacgaaacggcatgaggaggcacagcatgaaagcataccaaaacgcgcccgattggcgcaacctcgcgcgcgcggcgcgcaacgaatgggtaccgcacgttcccctatatgagcacatcgtaggcgcgaaagtcatctacgaaatcacgggaaaccgcccctacgatggcatgttttcgcccaatctcgcggagagccgggaagcctttcaacaatactgggatttctggcggcgcatgggctacgacacggcctcgatggagtttgccttcacgggcattttgcccggcgcgggtgcgctgggcgggcacaaagaaggcgcgatcaagacccgcgaggatttcgagcgctatccctgggaagagttgccggagcggtttttcgcgcgctacgcgccctacatccgcgccttttcgcaggccgcgccgcagggcatgatggcggtgggcggcgtgggcaatggcgtgttcgaatccgtgcaggacatcgtgggctatatggacctgtgctttatccgggaagacgacccggaattgtacgcgggcctattccagcgcatgggcgaagcgcagtgcgcggtgtggaagcgctttatggaggaattcgccgaagcgttttgcgtgctccgctttggcgacgacctgggtttccatacggccaccctgctgccgcacgacgacatccgcgcgcacatcctgcccgtgtaccgccggatcacggatatggtgcatgccaagggcaaacccttcctgctgcactcctgcgggaacctcttcgccatgttcgacgacatcatcgcgctcgccaacatagacgccaagcattccaacgaggattccatcgcgccgttccccgtgtgggtggagaaatacggcgacaggatcggcaattttggcggcatcgatacggacgtgctgtgccgctatgacgagagctacatccgcaagtacgttttcgattgcctggacgcagtgaaggggcgcggcggcatcgccttttcctccggcaattccatcccggattacgtgcccacggcgggttatctggccatgatcgaggccgtgcgcgattggcgcggggatccgctggaaggctaagcgcaaccgtccctagcacaaaaccgcctttcctctgcgctatggttgatgcacaacatgcggcgagatccgctgcccgacgccgcaagaaacgaggtgatggctgtgatacagattgcgatatgcgacgatgaagaaaagtctgttgctctacacgagcgcatcgtcaaggaatgtttgcaagcggaggggatcggctatgcgataacgacctatacccagagccgcaacttgctttatgatataaccgatgacggttttttctatgacttgattttgctggatattgaaatgccggggatttgtggcatggagattccgcagaagatccaaggctttctcccgcatgcccggattatttttgtgacctctcacgcggagtatgccattgacgcttttgaattgtccatcttccgctatgtgccaaagaacaatctggaaacaaagctgcccgccgccgtgatcgacgccgcaaaattgattgaactggaagctgggcaggaatacacgatccagacggcaaaccgcatggagaaaatcccctacaaagatattttctacatccagcgggatggcaaaaatgccagcatcgtgtccagcgccggaacttccaaggtgcgaaagagcttgcagcaggtatttgaagaactggatgcgccggaatttatctttgtcgaccgcgggtacatcgtcaatatccttcaaattatgaaaatcagcggcagtacggccattctcaaaaacggcgaaccgctgcccatcagccgttcccacttgcaggaggtcaagcaaacaatcaatcagttctggggagcgcacatatgatggaatatgttccgatgatttcctactttctcaccaatgaaatgcgcctgctttgcgggcttttccttgtcgcaagggtgatgcactttctgccgaaaagaaagttgctgcttttgtctgcagctggcggcgtttgggtcacagctttgcaaatggcaggatggccggcgatgggtgttttggccgtcgaatggctggtgatcactgcggtcgcatggcattgcctgcggggcaaattgaacctttgcctgttcctggttttcttttatgaagtcggtgtagggctatgggatttcctgctgcaagcgggtttgggcatcgcgttccgttcggaaaattttgtccatccaaacgccatggaatcccttgccggcatttggctcgtacgtcttttgctgtgcattggcgcaatcccgctgataaagcaagatcagccaaacgcggggacgcttcgggctttgtcggttctcgtcattttgggaatggttggcgctgtaactctgtccgagcagaccatcctgccgctggacgaagatctggtaggcacatgggtgattttgtcggtcatcttgctgttcgcaatcctgttctaccgcgtcaaccagcagcgtgaaatggaggcggagattgccaaactgaaacaggagcaggcggaaattgtagagcgcgattatcaggcattgcgccgcacttatgcggacaacgccaagttgtatcacgatctgcacaatcatattgaggccatttaccagtgccttatacaaggcgatacccaggcggcgatacggtattgcgaggacttgcgaacccctatgcggcaaatttcgcaaaccatttggacgggcgacaaagcccttgattgcctcatcagcagcaaaatggcattggccgagcaagagcagatcaaaacaaaggtcaatatcgaatatccccataacaccaatatccgcagcgttgacttaacgaccattttgggaaatctgctggacaacgctttggaggcggccaaagcagccccggagggcttgcgctttctcaatctgacaatccggcggatcaacgccatgctcatcatcaaagtagaaaacggctatggcaacgcgcccatacaggaaaatgggaagttgctgactgccaaaaaggacaaagcctttcatggatggggactaaaaagtgtccaaaccgcagcggatcgctacgatggagccatcagcacccattacaaagaccacgtgttccagtccgttgtcaccttgtctttccagccggtcaaaacagcataatccttgcttcagcaaagtggcgggcagtcccaaggctgcccgccactttttcgcggtcaaaaacctgccattcgtggacattcccgcacgcagggcgcttttggtgtatacttgcattgtaaaccagcttgtcaaaaaaactttttgacaagctggtggacgggggagtaaactatccacaattcgcaatg

SEQ ID NO: 728 - DNA, 16168 bp, Unknown
  16S sequences of unknown bacteria
cccaccaaaaatcggacacagacccaccgaaatcaactcattcaagttgccaatcgtcacgcaaacccccgctgaaaataccgatgacagtgaaccatttacacggttcggtattcagactcagagtctatgagaaagccaccccttgaggtttctgtttcctccccgaacccctctttccacttcctgatcctccggctttctcgaattctcatcaatttccattttcacgatgattttttgagtcgtggttgggagctggggatcgctataatcaatctcgagatgatctctctcttgccgtctgtcatcgacggtgatttccttggtcttcccattttggttctcctgtgtttttttactctattatacgacagattccaggggttttcagaaaaagtttaataggctcgacgaattgatcaaccagttaacgttcgacgacgtcgacccgtttacgggtggcaggtaaactgcctttcgcgtgtggtagtcgtatatatgccttttaggcgcaactggtagaatagggctttgcccgtctatgaaaagcaccggctttgccgggggatatttactattcaacaatcaccgcgagtaccggtgattcctccccgaaatatttttccatcctgtccgccgcggctccgtcaaacatccagtcggcgtcggtcactctcgcgaatttcgcgccattcggctgtacgtatgtgtttgacctgaacacatatataccggccatattctcgccgtatgtgctcacgagatatccgaggcatctgtcaaagatgttgttctctgtcacatagttttccgttttgtctggcttcgacgcgatgcagtacatcggggcaccgctctcgcgtcctttgcagccccagccctcgccgccgaaacggcagaagttgtcgtggacatatacatcccgcgtctcgcggtaggttcccgcgccgccggtggaattgtagtattcgatcgaccagaagcagtattcgatcaggttgtcattatactcgatatcagccatgatattgcgctcgattgactcgtcatagctgaactgatgggttattccggtgtcgtagatctgatatatccagttgttgtaaacgtggtatccttcgacgccgccgtagacctcgaccgcgttgccgtagccggtcacgttggcaccgtcaaacccggtcagtattgagccgccgagccagtcgaacacgcagttcctcacggtcaggttcttagtcgttcccgctccgaccccgtgcgagccggtaagggtaatgtgcagattgtcgaccgtgactccgggcgcgttaaccgatatcgcgtttccgcgctcacctatctctatcgatttgaaccgttcgccggggttgcccttgtcgctgtagaaatagagccggttggcttcaaggtcactccagacatcgaggtcattcttcatgtctccggcgccgtcgaagccgtccttcccggcgatcatgcgtgtgccgacaagctcatcatactttccgtattcccctgaatgatcgagcgtcacgatgccgacgttcacgagtgtcttcgtacacacccagacgttctcgtaagaggtctcctgccagagctccggcaacgcgtagttcatcttagacgcgctgatcgtcggtttgtcgcccttgccccacgcggaataggtcacgcccttcgcggcggttatgctgcccctgaatgtatcgccgcggcggaagagcacgatgtcaccgctgttcagcggcagctctgacagctttgacagtgtcttaaacgggtttttctcggtgagcccgtcgttcgaatcgtcgccgtttgcggcgaagtaatatatctttccgccgtccccgacagtgtaatctgacgctgttccgagcacactttgtttcatcttttccgctttttcatcaagcgacgcgaggtaatcggcgtcggcgataacatatctcttgtccattgtgtcctccttcagatcgagcgtatctgttatttcaagctttttgtcgttcatgttcccggttatatattttatgagcagctccgctatgacattatcgcccgtgagagctccgggctcgagatacaggtttccgtcgtcggcatatatccggctgatagtctggtccggcgtttctccggaggtgaagatgatctgtctgcactcttgcgtatttccgggtctggttgtgactttgagactgtagccgtatatttcggcgatccggtcagagagggcgagcgccgcggattctttttccttatcggcgcggatcacgaaatccttaaggtcggccccgtctatggttatcgaatcggctatgtatccgtcgtccttgtggatatatgtctcgccgtccgggacgtatatgttgccgtcactcgcgtaatgctcgagaaaatacgcggtcgcgtcgccgagtttgtcctgaccgtagatgacgatcttcccgccgcgccgcgcgatgagccagtcattcagtctcggcgcgagcggggcgagctcagcggttatttcccttgaagtctttccgacgattatctcgtattcgccctcggcggagtccgggattctgtcgctcacgaagtcggtcttgattccgatgtccactccagttatcccgattatcgcgtttttcagtgatacggcgaattccggcggacagactgacgcatcgtccgagcgtattaccgtgaaagcggatgtgccgtccggtttcacaatcgcgtcctcgcttttccgatcacaggaaaatatcagaaaaagcatggaaacaaggatgatctgtatgacagcgtgtttttgcattggatttgtcctccgttgttttatgacattattatatcatatcgcgagggtgaggtcaatgcgaaaacttccgtgttgattgcaaaaagtcagcagagaaatcagattctgttattttttttcggatgtgccgataagtctccggataccgcggcacccggcggcgattccggaatagatcagattcagcaccgccgacagcgcgagcgcgctcaggaatatgcagggcacgatgacagggaaccattcgagcttgtatatagtctccttcacgtgtgagttcagcaccgagtaatacatcctgtcgaatatgtaggatacgaggtacgcgccgaggcagaggtcggagacatacatgagtacacgcttgacggcgttcgggtatttcccggtgtttatcgacgagaggaagctgaacgcgaagacggtcatgatgaggttaggcagtcccttccagtcgttgtactgcgcccagacgaatattccgccgtggctgcggtagaagttgaacagtccgaagacgagtatcgacccgccccagagcgcgagcttctgccaccccttcagcttcagcgggaactcacgaaggaatgctccgacaaaataatatgtcagcggatagatgcctgtccaccatttcgggaatatatcgcggtattcggcggagatgaccggcgtcttccaccatccggcgacgctgaagttgtaggcgttgagcatactcggcagcgaggtcaggacaatgagggtcgcgacaagcgcgagcttctgcttctttgacgtcagcccgttccacatgaggttcaggaacggaatcagcaggaacagtccgatgtacatctcgatataccatccgtaagccgcggtcttgaagttcagtatcccccagaagaggtcacccgggaacgccgcctttgcccagaaaacgcggaacacgatgcaggcggcggacgccagcaggtatattccgagagtcttcacgatcccgccgtaatattttttggacagagtcttgcggctcatcagatatccggtcagtgtcagaaagagcggtacgcagatcatgcaggcggtgcgcattattgtcatgacgagcatccgctttccggtgaccgtatatttatagaacccggtattgagaaaaaagtggaccgaaacgacgctgaaaagcgcgactatccgggtgatatcgagtgctgagtttctttttgaaatatccatactttctttttccttttcatataagaaaaaggggaacgcccggtcttgactgaacgtttccccaaaatacgagtatcagttaccgatctgtctgcttagacgcaagcggcatggaaaagttccgcatcagccctgatcgtccgcttcttcgtcgacaacggcgattccgagctccgcgagagccttttcgtccggcttcgacgggcacttcgtcatgagctccgaggcgttctgaatcttcgggaacgcgatgacgtcgcggatgtcgtcgataccaagcatgagcatgacgagtctgtcgagaccgaaagccattccggcgtgcggcggaacaccgtacttgaacgcctcgaggaggaatccgaatttctcgtttgcctcttcatggctcattccgagcaggtcgaacatcttcgactggatctctccgtcgtggattctgaccgatccgccgccggcctcatagccgttgatgacgatatcatacgccttcgcgcggatctttccgggatcggtgtcgacataccggaggtcctcctccatcggcatcgtgaaaggatggtgcatggcgtagaagcgtccgtcctcctcggagtactcgaggagcgggaactcggtgatccagagcagcttgtagtccgacggatcgacgagtccgagtctcttcgcgatctcgcagcggagcgctccgagcgagtcgaagacgactttgttcttgtcggcgacaatgaagacgaggtcgttcgtctcgatgttcagcgcctttatgacggcgttcatctcatcctcggtgaggaacttcgcgaaggaggacgagacctctccgttcaggttcttgtaccaagcgagaccctttgccttgtaggacttgacgaaggtcgtgagagcgtcaatctccttgcgggagaacttcggcgcctgacccttgatgtttatcgctctgaccgagccgccgttcgctactgcgtcagcgaagaccttgaagccgcagcccttcacggtgtcggagatattctggagctcgaagccgaaacggaggtcgggcttgtccgagccgaagcgctccattgcctcatgccatgtcatgcgctgaagcgggagctgtatgtcgatgcccttgaactccttgaagagacgggcgaggaacttttcgttcatatccatgacgtcgtcctcggtcacgtaggacatctcgaggtcgatctgggtgaactccggctgtctgtcggcgcggagatcctcgtcacggaagcagcgcgctatctggaagtatctgtcaaatccggagagcatcagaagctgcttgtagagctgaggagactgcggcagagcgtagaacttgccgtgatgtacgcggctcggcacgaggtagtcacgcgcgccctccggcgtcggcttgatgaggcacggggtctcgatgtcgataaagccgttctcggcgtagtagtcgcgggcgatcttcgttattttgcttctcgcgatgatattagacgcgaggtcggggcggcggaggtcaagatagcggtgcttcagtctgagctctgccttgacgtcgctcttctcgacgatctcgaacggaggagtcagcgaagtggagaagaccttcagctcgtcaaccgcgacttctatctcgccggtcgcgagattcttgttgacggcgccctcgccgcgtgccctgacggtgcccttggcgcagatcgagtattcgcttctgagagcgaaagcggcgtcgaatatcgccttgtcggtgttctcgtcgaacgcgagctggattattccggaacggtctctgaggtcgacgaatatcaggcttccgaggtcgcgctgacgctgtacccagcccatcaggcatacatgacggccgatgtcctttgccgagagctcggcgacatagcaggttcttttatcgttttttgtgagttgtgcgcccattatatataacctttctgtccgtaaaagggacggaacgctcccgccgtaagatccggcggaaaacgctgaataacaatatatttgcgggaagcgggagaatcacccctcaatcgaccggcacagatatgccgcgctccccgcgaagtcgatgagggcggcgtccatatctgtgagacgtgagaacggcatggcccttaccccttttttaagcataaagatattataccaaatccgaaaggatttttcaagtaggcgactgaaaattttcgataattaccgcgaaattttgcgctcaggcgattatcccgccgccgacaacgacgtctccctcatagatgacgaccgactgcccgcgtgttatcgccctctgcggctcatcgaaaacgagagtcagctcgtccggtccggtctgagtgagggttgccggcgccgccttgtgccggtatcttgtcttcgcctcgacccgcatcggcgcggttatctccggatacgctataagatttatatcatgcgcgacgagccgggaagtgtagagatccggctcatctccgagcgtcactgtgttactctccggatcaatagccgtcacgcaggcgcggtgcccgagcgatattccgagccgcttgcgctgaccgagtgtataatgaataattcctttgtgctgaccgagcacattgccggaggtgtcgatgaatttgccggggagcgatttctttccggtgtacccttcaatgaacttcgcgtagtcaccgtccgggacaaagcatatatcctgactgtccggcttgtccgcgttcagaaatccctgctccgcggcgatggcgcggacctcggacttattcagcccgccaagcgggaacaatgtgtgcgataactgctcctgagtcagcgcccagagcacataagtctgatccttatccggatccgccgatctgagcagccgccagcgccccgacgcctcgtcatacccgcatcgcgcgtaatgtcctgtcgcgatatgcgaacaacccatcagctccgccctgtcaagcagctgtctgaatttaatgaacctgttgcagtcgatgcacggattcggagtccctccgcgctcataagtgtcgatgaacctgccgataacctgctccctgaaattctccccgaagttaaatacataatacggtatcccgagccgcagagccacgctccgcgcgtcctcaacgtcagacagagaacaacaggtcttcgtccggtcgagctgtatatcatcattcgaaaacaatttcagcgtagcgccgacagcgtcctctccgctcttttttacaagatatgccgcgacagaactgtcgactccgccgctcatggcgatcagtaccatttgtttgcttgcagggggaggaaaacccctttgaaaaggggttttcctccccctgcaccccctcttttcctgaaactttcatacaattattatatcacaaaaaaagtgtattgtcaagaaaaaagcagacccataaaaagtctgcccgtataaagctattaggaaggaggggggcgggggagggaacccttttctcgaaaagggttccctcccccgcaaaacaaacgattactgcgcggcgttgactatagtggtgaagtcagcggtcttgagggacgcgccgccgatgagtccgccgtcgacgttgaccttcgagagaagctcagctgcgttcttcgcgttcatcgagccgccgtactgaacggtgaatgcctcagccgcctcagcgctgtagagtttcgcgatgacgccgcggatgattccgcagacctcgtcagcctgctcgggggtagcggtcttgccggttccgattgcccagacgggctcgtaagcgatgatgacgttcttcagctcgtcagccgaaacgccctggagagcgatcttggtctggagcgagacgatctcctcggtgatgccctgctcacgttcagcgagaagctcgccgacgcagaggatgaccttgagtccgccctcgagagccgcctttacgcggaggttgacagtctcgttggtctcgccgaaatactgacggcgctcgctgtggccgatgacgacgtactcagcgccgacttcattaagcatgtcagcggagatttcgccggtgtaagcgccgctcttcgcgaagtgaacgttttcagcgccgatcttgatgtttgtgccctttgcggcttctacagccggagcgatgtctacaaacggaacgcagaggacgatatcgcagccgtccttgcctgctaccatcggagcgagttcggtgatgaaggctttggtggaggacggggtcatgttcattttccagttgccggcgattacggtcttgcgggttgctttgttcatttttatatacctcttttgtttgaaacgtgtttaagtttcgggcatggcggcgtgttggaaattccgtttgcccatttttttgaaaaggtttgaggagggtggggaggtgtcggaggggcgggaacccctttccttaaaaggggttcccgcccctctgacttaattatttagtctttatcgttaaggcaggcgatgcccggaagctcaagtccctcgaggaactcgagcgacgcgccgccgccggtggagacatgggtcatcttgtcagcgtagccgagcttttcgactgccgcagcggagtcgccgccgccgatgatcgagatggctccggactcagcgatagccttggcgaccgagcgggtaccggacgcgaagttctcccattcggagacgcccatcgggccgttccagatgacggtgccggcgccgacgagagtcttggagaagagttcctgagtcttttcgccgatgtcgagacccatccagccgtccgggatggagtcggagtagatgcgcatgaaggtggtgtcttctttgtactcgcggccgattatgttgtcgacggggaggaggaagttgacgcccttttcgtgtgcttttgccataatgtcgcgtgcgaggtcgagtttgtcggactcgcagatggaggtgccgatctggttgcccattgccttgaagaaggtgtatgccatgccgccgccgatgatgatggtgtcgcacttctcgaggagggagttgatgacgccgatcttgtcggagaccttcgcgccgccgaggatggcgacgaacgggcggaccggatcctcaagggccttgcccatgatggtgatttctttctggatgaggtagccgcagacagcggtcttcaggtagtcggcgacgcccgcggtggaagcgtgagctctgtgagcggttccgaacgcgtcgttgacgtacatatccgcgagggaagcgagcttcttcgcgaattcgggatcgttcttttcttcggctgcgtggaagcggacgttctcgaggaggaggacttcgccgtccttgagagcggctgccttagcctgagcgtcttcgccgacgacgtcctttgcgaggacggtcgggatgcccttcttgttcaggtcgtcagcgacgatcttgagggagagcttcgtgatgtcgccctttgccttttcgagagcggctgcggtggctgcctcgcgctcggattcggggagagcgtcgatcttcttcttttccttcttgtcgaggacgagcttgtcgtcgaggacattgtgcggtctgcccatgtgggagcagaggattaccttcgcgccgtgcgcgatgaggtacttgatggtcgggagagcgccaacgatacgcttgtcgtcagtgatgacgccgtcctttaccgggacgttgaagtcgcagcggacgagaacgcgcttgccgcggaagccttcgccgatgtcttcgatagatttcttgttgtacatttattttcacctcattagaaattatttccatgtggagaccgggacaaattaaatatccacaatcaaatttattgtatcacacgctccggattttatcaacataattttgttaaattatccgcaattgccgaactttttctgttttgcacaaattacgacgcgaagataacctgacaaactgtaatatatcatgcagaaacctttgaaaagatgaacgcgccgagcactatcgcgccgagaattatgcggtaccagccgaagaccgcgaagctgtgtttctttatgaagccggtcaggaattttatcgccgcgacagagacgacgaacgcgatcagtacgccgacgatgagtacgatcagttcggatgacgtgaacgagaatccgaacttgagcattttgaggaggctcgcgccgagcatgaccgggatcgccatgaagaacgagaattccgccgccgcctcgcgcgacattccgagaatcatcgctccgaggatggtcgagccggagcgcgaggttccggggatgagcgagagcgtctggaagcatccgacgccgagggcggtcttgtagtcgagtctgcccacagaatcaacgcgcggggtcttgccttttctgattttttcgattacgatgaacgcgacgccgtaaacgatgagcgcgaccgcgaccgtgacataattgtacagatggtcgttcagccagtcgtcgaacagtacgccgacgattcccgccgggattatgccgacgatgaccttgaaccagagccgccaggtctgccgtttctgcacgtcgctcttcgacggcgcgaaggggttgagcttgtgaaaataaagcacgacgacggcgagtattgagccgaactgtatcacgacccggaacatctccatgaacgcgtcgctgacgttgagccgcagaagctcatccgcgaggatcatgtgtccggtgctcgagatcggcagccattcggtgatgccctgtataatgccgattattattactttaatgagttcgatgagtgtcaggtgttccattattacctccataaataccgtaaggttatcataccgcgcggattatatcgccgggacgcgcctcaaacggtattttcgtgaagaacgtcatgtacgggtgcggcgcggattctatggcgcacatattctcgtcgaaaagtccgccgatgtgcagggaccgtccgaccgagccgggcgagatgagctccgcgtccgaaccggcgaataccttgttccgctgaacgagcttcgcgagtcccgtcgcgctatcatatgattccacgcggcagaggtatgccttttccttcatatatccgggctgtttcgccgtgttcgcgttttccaccgggtcatcgaaccagtatccggtgcagtactcgcggtggctgacgctctcaagttcgcggagccacgccgggtcgtacacgtatttttccgggtcagcgaggtatctgtcgatcgccatccggtaaacgttcgtcacgacggcggcgtagtattcgctcttcatcctgccttcgatcttgaagctgtcgatccccgcgtcaataagctccggaatgtgctctatcatgcacatatcctttgacgaaagaaagaaggtcccgcgcttgtcctctataaccggaatgcggtcgtccggccgcttttcctcagttatctcatattccgcgcagccttcccacgcggggtcttctatgagcgtcgactccgagagcgacatattccagcggcagggctgcgcgcagcgtccgcggttggcgtcgcgtccggtgaagtgctgcgagagcagacaccgtccgctgtaggagatgcacatcgagccgtgtatgaacgcttctatcgcgagatcatccgggacgttttcccgtatgaatctcacttcgttcaggttcagctctctcgcgaggacaacgcgctttgcgccgagcttccgccattcgcggcaggcggcggcgctgacggtcgaggtctgggtcgagacatggagctccgagtccggcatcttttccctgacgagcgccatgacgccgagatcggcggctatgaccgcgtcgatgccgaacgaggctatcgagtcgatgaatttttcaagcttcggatattcgtccgagtgcggcatggtgttgagggtgagattgaccctgaccctgcgcgcgtgggcgtattccacggcgtctttcagctcgtccgtcgagaagttgctcgcggcggcacgaagtcgtctccggcgagatataccgcgtcggcgccgtatagtatcgccgccttcattttgtccggactgcccgcgggtgagagcagctcaggtcgtttcagttcatttgacattatagatttccgtacctttccgcacaggatatgatcggcgtcacggcacaaggcataccgcgccggaaagagcggtatgcctgcgacgatttatttttcgagatatctgaccgcgccgtcggcgatatccttcaatgccccgtcctcgaacggaaccttgataccggctgtgcggcagagttcggtgaacgtctgctttccgccctgttcgacgaacttgtagtagtgcttccaggcgtcgttccagtccttctgggacatactccagaactcgagcgatactgtctgcgcgaggcagtagtcgatatagtagaagggatagtgatagatgtggagctgtctctgccagccgcgaccgagggcgtagaaatcgacgtcgtcggggttaaggtacggacggtagattgcctcgagctttttccactcggcgtggcgctccgcgggggtgaggtcggggttgtcgtagactatgtgctggaagtggtcgaccatacagccgtagggcaggaagatgagcgcggatccgaggtggacgtatttcgcgcggtcggtgtcgtctccgtagaagaggttcagccacttccacgcgaggaattccatcgacatcgagtggcactcgcaggattccatcgtgggcgagatgttttcggagaactcgaagtttctcgcggtgtagtaagcgaacgcgtgacccgcctcgtgggtcaggacgtcgacgtcgccggacgtgccgttgaagttcgagaagatgaagggcgccttgtattccggaaattcggtgcagtagccgcctacagccttgccgtccttcgcgacgaggtcgagcagctcgttcgagtacatgaagtttatgaactctgcggtttccggcgacatctcctcatacatcttcttgccggcggccatgatgtcgtccggggtgccgagcggcttcgggttgccctccgcgaaattgaagttgtcgtcgtatatgcgcatttcctccggcttcattccgatgcgttcagcctgcttcttcttgagctccacaacgatcgggacgatatccttcacgacctggcggcggaagttcgcgaccatttcggggtcatagcagttgcgcgtgcggcggaggtaagcgagctcggtgaagtttctgaacccgagcttgtgcgcgatttctgtgcggaccttgacgaggttatcgaatatctcatcgagcttttccgcgtttgacatatagaatccgctctccgcgagataagcgccgtgccgcacatcgcggtcaggatcctgcttgtaggctgcgagctgtgatatattgagctgcttaccgtcaaaatctatccgcgcggaggcgaccagcttctgatagtcgctgacgagcttgttctcgcgccccaggaggtcgatgatggcgggcgagaaggtcttcagatccatctcgagattcctgaacatcagctcacccgcgagatccgagaccgcctttctgaacggagactcatagaaggcgagcatcaggttctgagaatgctcctggaacgccggaaactcagagtcgtaaaactcctgctccgcctcgtagaacttgtcgcgggtgtcgatggagttgcgcacatatgcgattgacgacatcgtctggatgtgtgttgagagcttttcctgctcgcggaacgcctcgacgacagtttctccgtccttcgcgtttctgaccttttcggtcagcttgtcgaattcttcgcccattttcacgaggtcgacgcgctcgtagggcatatccttgaatttcattttgctttccccctgaaaaaaataacgttaataatggcgggacgagtttttccgattattgcgcggacaggtcatgacgcttccgccgcttttcggtcggcgagctccatgagctccttttcgccttcgatgtccgcgggattcgggtatgtcttcgcgatcttttcgagtcttccgcggagcttctcaggttccgggcgtttgtccttcggcccgaaatcaccgaagagcgcttcgaaatatctcgtccggatgaccgacgggaagtcgggcatcgactgcatgatcttcaccgtctccgacgctgacaggagcctttcggcctcgtcctttttcccggaaagataatctgcgcacgcgaggtcgcaggcgagaagctgacggtgcagtccgattacagcctgattgccgaccagcgagcgtatgagcggttccgctccggagatatctccgctgtccattatccggttcgcgcggaagacggcgattgtcgcgacgagtgtattgtccatatccttctcgtccggcatggtgaaccattcctccggcatatcgcggagtctttgccctttggcgcctgccgcggcgatgctgagctgagtgtgcatcgcggcgagggcggcgctgttctttccgagcgagagcgcgttcctgccgtcattgtctaccgctccgagacgcagaggtatcccgtttgtgagcgccgtggcgaggtttatgagtccgatatccgcgaggatgacccggagcgcctgtggtccgctgaccgcgaacgcgaccgcgatgaaaacagcgctgaagaccagattgaatatcacgccgccgagctgatagagcacgaatgggtactttccgtccttcatctccggcgggctcatgaggcactgcccgccggttccggcgagcttcatgcgccttattttcagcttgccgtccgagcggacgatggtcaggctcccgacacgataggacacaaacccgtatccggtcatgagcccgaacacaagatgtcccgcctcatgcgccgcgatgctcaggaagaatccgagaagcagcccgacggcaatttcaagcagcgcggtatagacgcttgtcgcgccaaagccgccgaacagatccaccacttccgcgcagcctattccgacggcgagaccgatgattgtcgtgaccacctgcccgaagttctttttcgcagctggtacagctggtgtaaacatggtgcgcctccgaatgattatgttgtggcagcgaagcagtggtccccggagaaccgctccggaaatcccgcacccgctgtttgtttatcagtttccgtccctgtagtagtttataaggcatccgcagaggatgatctttctctcgtcgtcggtgagagcgcccatcttcagcgtgatctcacgcgcggagccgtcggcgcttatcacatacgccgggaactcgtactttccggctccgatgatctttctgacgcctgggatatagatgtgctcgccgaccgagaagtccatattttcaaagatgaacgggagcataccccagttgatgaggttgctgcggtagcgcttcgtcgcgtattcgaccgcgatgttcgcccagccgccgagaaccttctggcaggacgccgcctgctcgcgcgcggagccgtcgccgggcttgttcgcgcagacgacgcttccgatgccgatatcagcggctttcgcggtcgcgtttatcttctttatcgcctcatagaccgcggagaggtcgccggcgacatatgcctcgtcgcctgtctcgcgcgccttttcgtatttttgtacttccttcgcgcggccgacgtaagccgggtcctttctcgagagagcgaactcggagagcttcatcgggttggagcggtaggaagaggtctcgccggacgggatgagctcgtcggtcgtcgtgaccgggtcggtgatgaccgacgcaacacggagcaggagatcgctcgtcagctcaggcattacaggccagtccgcgatgttcggaccgatcttgagcgaggcttccggcttagcgctgccccagccgcggtagacgcggtggtcgtatatcgccttgtcgaaatgatactcggggcaggtgtactcgacctcgagcccggtcgcaggggtgaggatgccgccgtttgccgccgtcgccgcgatgctgcgcgcgtccatgagggcgaccgccgcgatctgtccgccggacggcttcgagccctcgcggttcgggaagtttctcgtcgagtgacggatgctga

SEQ ID NO: 729 - DNA, 1504 bp, Unknown
  16S sequences of unknown bacteria
taagctccttgccgtcgaacatgccctcgacggtgaccatgtccttcaggcgctcgacgaaccagatgtcgatgccggtaagagaggcaacctcgtcgggctccatgccgcggcgcagcgcctcggccatgtagtagatgcggtgctcggtgggcgtggagacgaggctcttgaagtgcgtctcgtcaaactcgtccttgccatcgcgccccaggccgaagcggccgttttccatggagcgcatggccttgccgagcgattcctcgaacgtgcggccgatggccatgatctcgccgacggccttcatgcgcgtggacagcgtgttgtcggcgcctttgaacttctcgaaggcgaagcgcgggatcttggtcacgacgtagtcgatggacggctcgaagcaggcgggcgttgccttggtgatgtcgttcgtgatctcgggcagcgtgtagcccaccgcgagtttggctgccatcttggcgatgggaaagcccgtcgccttggacgcgagcgccgacgagcggctcacgcgcgggttcatctcgatgacgatgaggcggccgttgtcgggattgacggcaaactgcacgttggagccaccggtctcgacgccgatctcttcgaggatggcaagggatgcgtcgcgcatgtgctggtactcgacgtcggtgagcgtctgcgcgggcgcgacggtgatggagtcgcccgtgtgcacgcccatggcgtcgaagttctcgatggagcacacgatgatgccgttgccggccttatcgcgcatgacctccatctcgtattccttccagccgatgatcgactcctcgaccagcacctcgcccgccggcgagagctcgaggccctggcgcacgatctcgcgcagctcgtcgatgttgtaggcgatgccgccgcccgcgccgcccagcgtgaagctcggacggagcacgagcgggaagcccagctcgcccgcgagcttctcggcatcctcgacgctgtaggcgtagccgctcttggccacctcgaggccgatgcgcttcatggcctcggcgaacagcttgcggtcctcgcctttctggatggccttgaggtcgcagccgatcatctcgacgccgtacttgtcgagcgtgccgttctcggcgagctccaccgcgcagttgagcgccgtctggccgcccatgttgggcaggatggcgtccgggcgctccttggcgatgatctgtgcgacgacctcggccgtgatgggctcgacgtaggtgcggtcggccgtcttggggtcggtcatgatggtcgcggggttggagttgacgaggacgacctcgtagccctcggccttcaagacctcgcaggcctgggtgccggagtagtcgaactcgcaggcctggccgatgacgatggggccggagccgataatcatgatcttgtgcaggtcatctcttcttggcatgcttagtcacgctccttcgcgtcgttgaaggtgcgtgtgtcgcgtacctcgatgtccagatagtcgtcg

SEQ ID NO: 730 - DNA, 1752 bp, Unknown
  16S sequences of unknown bacteria
ccctctgaaaaagcgtattccccgcgaaaaatacgattgaaaatccgcagtccgcgggatttcctgatttgaaacaaattatcgttaaatcaaagaatagcattctatcgttgccatgtcaacgttcgctccgtctaaagatgtctttttatcccctttcggacagttcgctctcattttaatcagagactgaccgcgcctcttcccgataattcatcgattaaatctttcaccgtggtcatctcgctgatctcaccgatgcgggcaccgcagaaaaacagaccattttctctgtcgccgttcaccgcgtcgatcagcgcctgagtgatacagtaatccgctgttgccggattacaggccttcagacagttgaaacagcccgtaatcttttctcttccatcccgaactctctcgataaaggaattgcgcagcgcccgtcccggcattcctaccggactctttatgatctctatatcttctgttcccgcctcgatatacgccctcttatactccggactggcgtcacactcttccgtagctacgaagcgggacgccacctgtactccgtcgcagcccagagcgatctgacgcctcacatcttctgcagtaaaaatccctcccgcggaaaagaccggaattttcttatcatatttttcttcaaaggtctccttcacacggagaatttcctgaatctccgactcatagctcttagaatcgaacgcttcgatctcctgtctggaaaagcccagatgtcctccggcaagcgggccttcgatcactaaaaaatcagcggtccgatgacatttcctgtcccaggatttcagaatgacacgggccgatttcgcgctggagacgatcggtgccaacaggatatcactgccctctgcgtcctttggaagagaaacgggaagacctgcgccggaaataatcgcgtcagccccggcctcaatacaggctctgacatagtcttcataaagctgcgtcaccgccatcagattgaccccgatcagcccccggccttccgacagctccctcgcacgatgaatctgctgtttcagggctctcaggtttgcgccctccggatccctccgaaaatccggttgatcatatcccacctgcgccgcggatataactcccataccgccttcccgcgctactgcccctgccagcctgctacggctgactccgattcccatgccgccctgaatcaccggcacttccagaatcctttctcctatcgttacagactgtagcattctatccatacccattttcctccgcttcttctcgttctatttcaccggctttacaatatcatgttcttttgccggcccgtttaatcatattgcttttcaaatattttgatacacaaaacttatttttattttacgccatttaatcagacacgtcaatatcttttacagacgctcatcataatttattctactatattttatggttaacaaagacatatctatcctgctttatcccgcgatttccatcataaattcatgatcttctatatttgaaagttcccacaaatccgaagaagttcccgaatatacgggggaacctcggagaaggtttccgatcctccagcgtaaagaaaaaagccggagcggcagacatccgtccgcagctccggcttttttcaaccttttttcaacagaagaattagctctatcgcgcttctcataaaaaatcaccggaacaggcattccgcccgctccggtgatctctgtctcttacgcg

SEQ ID NO: 731 - DNA, 4091 bp, Unknown
  16S sequences of unknown bacteria
ctcttttcgctcaaggcgccaacgggacaggccacaacgcactggccgcagccgacgcaaggcgaatcggccaggctcttttcaaaggcacagcccacgtggacctggtagccccgctggatggccccgatgacagagaccgcctgcagctttttgcacgccgccacgcagcgcatacattggatgcacttggaattgtcccgcacgatataggcggatttgtcgtcgacgggataggcccggtcgtcgcccttgaagcgttcttcgtccacctcgtagtcaaaggccagcttctgcagctcgcagtggttgccgcggacgcaggacaggcagcgcttgcggtggctcgagaggatcagctcgatggtcgttttgcgggaggtgcggaccttgggggtattggtaaagacctccatgccctcctcgacagggtagacgcagctggcgactaggcctttatggcccttgacctccacgacgcacacccggcaggcaccgatgcagttgatatccttgagatagcacagcgatgggatctcgatctggacggacttggccgcctccagaattgtcgaaccggcagggacttcggcgtcgatgccgttgattttcagatgtaccatattcatatctcccccctcacttggtgtagaccgcgccgaaggcgcagttctgcatgcacaggccgcacttgatgcagacctttgtgtcgatcttatgaggctggcggacctggccagagatcgccccggccgggcaggcgcgggcgcacttcgtgcagcccttgcacttgtccggatcaatggcgtagcggatcagcgccttgcagacgccggccggacaggtcttatcccggatgtgggcgatgtactcatcgcggaagtacttcatcgtcgagagcaccgggttcggcgcggtctggcccagagcgcagaggctggcggtgtgcatatggttggccaactcgtcgatcttgtccaggtcctcttcctcgccattgccggaggtgatcttctccaaaaattgcagcagccgccgggtgccgatgcggcagggcgtgcatttgccgcaggattcatcgacggtgaattccagatagaatttggcgatatcgaccatgcacgtgtcctcatccaatacgataaggccgccggagcccatcatgctgcccagggcgatcaggttatcatagtcgatcggcgtgtcgatatggcaggcggggatgcagccgccggaggggccgccggtctgcgcggctttgaatttcttgccattggggatgccgccgccgatctcctcgacgatctcccgcagcgtcgtgcccatggggatctcgacgaggccgacattcgtgatcttgccgcccagggcaaagaccttggtgcccttgctggtggccgtgcccatggaggcgaaccaatccgcgccccgcaggatgatctgggggatattggcgtaagtctcgacgttgttgagcaccgtcggcttgccgaacaggcccttgaccgccgggaacggcggacgcggccggggctcgccccggtggccctcgatgcttgtcatcagcgccgtctcctcgccgcagacgaaggcgccggcgcccaggcggatctcgatatcaaaatcaaagccggagccaaggatattttcccccagcagacccagcgcccgggcctgctcgatggcaatctccagccgctgcacggcgatggggtactcagcgcggatgtagacatagccctgctttgccccgatggtataccccgcgatggccatggcctcgatgatacagtgggggtcgccctccagaatggaccggtccataaacgcgccggggtctccctcgtcggcattgcagcagacatatttgatctcgccggggctcgccttggcaaagctccatttacgccctgtcgggaagccgccgccgccgcggcctcgcaggccggagtcaagtaaagtctggatgacgtcgtctggcgtcatggacgacaggacctttgccagggcctggtagccgtccgctgcgatgtactcttcaattttttccggcgcgatgacgccgcagttgcgcagcgcgacgcgcttttgctttttatagaaccgcgtctccttcaaagagatgatcgtgccatcgggctggaccgtctcctcgtaaagcagttctttcacgacctgcccgccggggatgagatgctccttgacaatgcgcttcgtgtgctccggcgtcatctgactgtagaacgcgccctcaggatagacaatcagaatggggcccagggcgcacaggccgaagcatcccgtcttgacgaccaggacgtccttctccagctgctcctcccggagggcttcttctaaggccgcgatgacctttttgctgcccgatgaagtgcagccagtgccgccacaaaccaagacctgcttgcggtacgccgtctgctgctccagccgctcgctctgctccgccacggcattgcgcaccgcgacgagctgccgcccagcctcccggatatggttgagttctttcgtagtaatcatacgggcgcacctccctttctggcatagtcctccagaatcacagggacctgctccggcgtcatgcggccgaaaacttcatcgttgatcatcatgaccggggccagaccgcaggcgccgacgcagcggcagctctccagggagaacagcccatccggcgtgcattcgccgacctggatgcccagctttcgctccacagcctccaggaccttcgccgcccccttgacgtagcacgctgtcccaagacagatgctgatgcgatagattcccttcgggttgagccggaattgggagtagaatgtcgccacgccgtagacctcagacagggagatacccagtccttccgcgacgatcgcctgtacttcaataggtaagtagccatagatctcctgggcctgctgcagcaccggcatcaggcagccgggctgctccttgcgcgcagcgatgacctccttcagctgaagctcctgcgccagggtaccgctgaagggcacctgagtcttctcttccatggtggtcgggcctccttaatttctgcagttttgggaagctgcaatttagtttgtattttatattataaagcaaccgatttgcaaaatcaacaaaataattatttcttttaattgtgcaagtgtgcaaaacgcattaaaaaatcaaatattatcaataagattctaccgaattctgggtaaaaccaggcaaaacgccagcgaaattctcgttttttatcatacttttttatcacacgtttttttgcaaaacttcgcttgcacatccaacaaaaaaccggtacaatagcagaaagacaggggggtggatgagatgcaaatcgaaaaaacctgctgcgtgacggggcaccgcggtctggcgccataccggctgcggcaggcggaagacgcgctgcgggcagagctcgtccgggccatcggcgacggctttacgcattttatcagcggctttgccgagggggcagatctgctctttgcccagctggtcgtggaataccgccaccagtatccgctgaccctggaagccgccatcccctacccggcccggctccaaaaccgggacccgcgcttccaagccctgctcgcccagtgtgacgccgtgcaggtccacagcccccagtatttccgcggctgctttatgatccgcaaccactatatggtcgatcactcccagcgggtcatcgccgtctacgacggacgctccggcggcgggacggccgcgacaatccgctacgcccgccagatgggcatccccgtctgctgggtcccggtgtgagtatgcagaaaaagcaaaaagcaagcgtaagtacgcttgctttttgcttttcgctattgtgcggcgtcatcctcgccgaagagttcaggcttgccctctcgcagatcgcgccaggcgcaggggaggccctggtggatggtgggatagcgctgatcagcgtcgctggtgggctggatctcgtaggtgccgtatttattgaccatctgaaatgcgctttccggatctccggggatgtcctgcaccgcagggtccgggcagtcggggtacggcgt

SEQ ID NO: 732 - DNA, 18090 bp, Unknown
  16S sequences of unknown bacteria
cctccgaaatcgaccgactcaaggccgagggtctttgggtctacggagccgacatggacggccgcgactatcgggaaacggatttttcgggcggctgcgtgcttgtgatcggaaacgagggcaaggggctcggacgtcttgtaagggaaaaatgcgacgtcattgtaagtctgcccatgaaaggtaagataaattccctgaacgcgtcggttgcggcgggaattctcatgtataaagcggccgaaaaaagataaaacgaaaggaaacaggcggtatggataaagaaaggcttaatcttgagctggaaatagacaatattttaagtgaattttccaaaaaaaaggccgcttctcagcagcccgcccgaaaggtttcggacaacaccataaacatgctgcttgaggatattctgaaggaaagcggaaagtccgacgggagtgttttgcaaaaaaagacggccgtttcctttgacggcacgcaaaaggcgcaaaaacccgttgccgttcaagagcaaaagacccggcaggaaaagacggaaaaaggagcaaacgccgcggacggaaaaacgattgccgtaaagctttccgacatcgaaagcggcagaaaagcaaaacccgccgccgaagaaaaaatgccgactccaaaggcaccggaagaaaaaaagtccgagagagccgaaaaggccgagaaaatcgaaagaataaaaaaagaagaaaaaaccgcggaagatccgctaaaaataaacgaaggccttatagacagcatacccacgtgggaggagcgccacagcaaggaatatctcgagaaaaatcccggcgaccccataaacaaaataaaatccatgagcggggtaaaggccagcagcgagttccttgaaaacctcaaggaaaggggcggtgtggccaaggaaaagcgggaggtcatctataaacggagagacaaatttttctcccgaaaaatatcctttgacaccgaaaaggggcacacggttttcgacggtcttgaaaaaatcggagaaaacgagtggaaggcgcccgaaagcgaggagccttaccgcgccgaagggtcatatgagcgggacggcgaatatcaccgcttttccgagtcggccgatgttcgcagggatcttgaatatcagaaaaagctgtccaaggtcgagaccgtgctgacatttcttgcggcgatactgctgctgtttttgtccttttcacacagcctcggctccccgtttaacattttcgatgaaaatcccaaaacctttgtgacgctgtgcgcagtcataacggcggtggccgttgcggtcaacatacgaacgcttttcgggggaattgcctcccttttccgcgggcgcataatcccgggcagcattgccgcagcggtggtcattcccgcatttatccagaacattctgctgattttccgccacgagagcttttccggctcggtttatgaaaccttttacagcggagcggcggtcacggcgctgcttttcgtggtgcttgggcgaaacgcctctctcgatcttcgaattcagaattttcagcttgtgggaaacagagaggaaaaatatccccttgtttcggttatgggcagcaaggaatcgcgggagctcggaagaggtctttcggtgggcgaccgtcgtgtctgtcttgcgaaaagatgcgacgaggtgtcggacttcatgtatcattcctatgccgaggacgtctgcataaagtcgggcaagatgctctttgtcggttcggtgattttttcgctggtttgcggagcgctttgctttttcttccccgccgcgggcgaaaaaggggacggaatggccgccttttcggctttctgcgccgccctttgcatgacccagccggcgctgctttctctttcggggaacgctgttttgagaaagactgccgaaaagctcaaaagagaccgcgtaatgctttcgggatatgacgccgtcgaggaattttccgacgccgacataatcgccgtgggcgccgacgagcttttccccgaggggagcgtcgttttaaagggacttaaggcttcggaaaaccgtatgctcgactattccataatcgacgcggcaaaaattctcgaaatgtcgggcgggccgctttctcctcttttctccaccataatgcagaatgacaccggatttgacccgcaggtcgacaccattgtttatgaagaggatatgggaatttccggctgggtgtcaggacagagggttcttgtgggcaaccgcaagctgctcgagctgcacggtgtgaaaactcccgattacggatatgagcaaaaatacgaggacaccaacatccgccccgtttatcttgcaaacgaaggccgtctcaacgcgattttccttgttcagtataaggcaagccgaaaaatcgccgaaaggcttcgcgaggccgtaaagcgcggcatggccgtcgccgtctattcaagcgaccccaacatcacggccgaatttatctgccgaattttccgtctccctgcgggctctgtgagggtcatgggaacggcggcaagaaacatatataagaaaatgaccgacaagtcgcaaaatcccgtcgacggaaagctgctgtgcgacggagaggcaaaatctcttttctcgtcggtgcttgtctgcaaacggcttaaaaagacacttaatgtcgcaaggggacttcttgcggccatgtgctttatcggcgctgtgctttcgatgggaattatttcatcggcgggcttttcggggctgagcgtcggtcttgtgcttgcctttgaagtgctttgctatgttttgattcgcggcattcccgcaatcggtgcctgatatggcgcagctcggaatatacgttcatgtgcccttttgcagaaaaaagtgcgggtattgcgatttcttttctgtgtgcacactaaagtccgcagaggactatgcctccgccgttttgcgtgacatggagcgttttcgcgaaagaggtcagtcggccgacacactctatttcggagggggaacgcctaccgaacttcccgccgaccttcttcgtcggcttgtaagctccgcaagggaaatcttttcgattgacgactcggccgaaataacggtcgaaacgaacccgggcgaaaccgtacccggccttttcgaagggctgcgccgctgcggggtaaaccgcctgtcggtgggtatgcagtcggcctgcgaaaacgagcttgaatttttggggcgcggccattctcccgaacaggcgagcgagaccgtcggccttgcaaaggcggagggctttcaaaacatatctctcgaccttatgctcggaattccctttcaaacaagggaaagccttgagcggtcggtggattttgccgcctccctcggggtgagtcatgtttcggcttatattttgaaggtcgaggagggaacgcgttttgctcttttgcaaaagaaaggcgagctgcccctttgcgacgaggatttttgcgccgaaagctatctttatgcctgcgagcttcttgagcaatacggctttatgcagtatgaaatttcgaatttctcgaagcccggctttgaaagccgccacaatcttaaatattggcgtgacgaggaatatctcggattcggcccgtcggctcattctttttttgaaggaaaaagatttttttacaaaaggaatcttgccgaatatataaagggcgccgctcccgtttttgacggagatggcggcggagcggaggaatatatcatgctcgggctgcggctttgcgagggacttgaccttgaaaagttcgagcagaaattcggttttccctttaaaaagacctctcttgccgttgcaaaggagcttgcacttcacggccttgtcgccttcgacggcaaaaaaatcgccctgacaaggcatggttttctgctttcaaacgaaataatttcacggcttatataaatcaaaaggagcggtacattccgctccttttcttattttgttacaagctctccgaggcagccctctttgctcgacgaaataatttttacttttactatttcgccctttaatcggtcgttggcttttacccttacgggtgtgtaattttcggtatagccttcgaaaagcccgtcctttttttgctcgagaagcaccttctcgacacggccgacctgcttttcaaaaaagctctcggcagcaagctccgccgcggcggaaagccgtttgctgcgctccgattttatgtgctcgggaacctggttctccattttcgccgccggggtgccctctcttttagaatagcagaaaatgtgcaccttggcaaatccgatttccttgacaaaatccagggtttcttgaaattcctcctcggtttcgccgggaaatccggtcataatatcggttgttatggagcagttttcaaaccgctctctgagattttttattatctctctgtaaagagaggtatcgtatttgcggttcatgcgggaaaggacgccgtcgcttcccgactggagggaaaggtgaaattgcccgcagagtttatcgattttgcaaagcccgtccaaaacggtttcgtccagctgatcgggctcgagggaaccgagccgcagccgttctatgccgtccacgtcggcggcttttatcccgtcgggcagcaaaaggccgatgtcgctgccgtatgccgagagatttatgccggcaatgaccgcctctttatatcccgcggcggcaaggcctttcagctcctcggttatgcgctcgggagatttggaacgcaccctgccccttgcgtagggaataatgcaatagctgcaaaatctgttgcagccgtcctcgatttttacaaaggctctcgtccgtccctcaaagctgtgggaggaaaggggagaaatcttctcgtgcagctcgtggggctttgcggccacaagacggtcccttttcccgataaattcctcaacaagagagggaagctcggtgttaagggcattgccgatgacgatgtcggcgctgtcgagatccttggccttttcgggccgcgcctggggcatacagcctgtgacggcaatgacggccgcggggaactcacgccgcattttgtgaagagtctggcgggtctttcggtcgctttcggcggtgacggtgcaggagttgatcactattatgtcgggaatgtctccctctttcgcgctttcaacgccgctttttttgaaaagctcccgcagcgtctcggtgtcataccgattcaccttgcacccgagggttttaaaaagaaccgtcattttcttttaagctcctttgccgaaagcagcttcggttccttctcgtcgggacggaaaaggataaatctcgagccgatgacctgaaccacgtcggagcgggtggcctcggcaaggcggtcggccgcctctctcgccgtgacgggggaggactcaagcaccctcatttttatcatttctctcgcctttaaggcctcgtcggcctgcttgattgtttggtcggtaatgccgccgtggccgatttggaaaatggtttcatatttgtttgcaatgccgcggagggcggctctttgtttacttgtcagcatatttttcttccttaatatattttttaagttctgtaaggcatttttcaagggctctgccgcggtggctgacggcgtccttttgctctcccgtcatttcgccgaagcttttgccttcatataaaaatatcgggtcatagccgaatccgccgctgcctttgggcgaaaaatcgatttgcccttcggtttcgcctctgacggtaaagcttgtgccgtcgggaaaaacgcaggcgatggccgacacgaattttgcccctcttttttccttttcgaccccttcaagctcgcaaagcagcttttctatgcgaagggcgtcggtttttgcatatcttgccgaatatattcccggtctgccgtcaagagcgtctacgcacagccccgaatcgtcggcaaaggcggcaagccccgatttttcacaggcatatttcgcctttataagcgcgttttgctcaaaggtgtcgccgttttccacggctttgtccatgtcaattccgagttcctttgccgaaacggccgaaaaatcaaggaatttaagcattcttgaaaattcctcgaccttgtgggcgttgcccgttgcgataacaaatttcatttctaacgttcctccgggtcataggatgtgaggaataaaaccgcccgctccagcgaatctcttgaatttccccaatcggcattttcgccgttgttgcgatagtcgaacatatcgcaaaaatgcttgacgtcgccgtgcagagactcaatcgagcgcagggtcagctcctttgcggcgcttttgaattctcctctgaaccgacgtcccatttttttgtcggccgccgagcaaagctcgtaaaaatgcggcagacacagggtttcctgcttttcgaaaaggtggcggaattccatgtcgctttcatatttctttaaggtgttggaaatgagggcggtcatgtttctctccacctcgtcgcacacaaagcagcgggaggtctcggcttttgcgacgggagattttatcttcttttccatttcctttaaatggctttccagcataagcgccaccgaaaggcggtttttgcgggaaagaatcattttatagtggcgaaggcaaaagcccttttcgtttgtgacctttctgacctccggctccatcattgcggcgccggttatgtattcggccatgcggttttcaagcatatttctcatgcggcatacgggacagccctctttgggctcgaaaacctcctccaccggaatggagcaaatatccgatctcataatatcacctcaatatataattttaacacaaaaacctcttaaaggcaacgggtaaaatatttcggaaaattcgagtcggaggaaatcgaatttctgattgcggcggccgataaactggcgaaaaccaacggtatactgtcggtccgcgtcgcaagagccgaaaatccctatgcccagcccactgacaaaaaatggaaacgtacccccgagggcgttgcggaaatcaccctttcgggcggcacgaaaaaatatgacgggatcgtcggatacaccgcgaaggtgacggggacttcccaaggcattgccgaggtcaccgcgaccagaaacgaaacgttgggttctgcgtcggcaagctgcaccgtggtggtctataagccgtttgacgtgagcgcgaacggcgaaatcggcgtggacgacgcccttcttgcccttcagaattcggtgaagaaaatcgagcttgacgacagaggctttgctgccgccgatgcagataaggacggcagtataaccgtgaccgacgcacttatgattttacagcgcgcggtgggtctttgattttcggcggttgctctgccatgaaattctcggtacaaatttcttgactttttcgtttaaaaggttataataaaaacagaaatatatctaacggaggtattgttatggtagagaaaagactgttttggggtattgcccttgccaccgctattatcgccattgccggaactgttgcatattttgtgaccaagttctgccgcgaccgtcgcgaggacgattttgacgatttctttgactgcgattgctgcgacgacgattgctgctattgcgacgacggcgtcgaagaggccgaggaaattgccgaagaggctgccgaggaagccgaagacgaggaatgatcccttaaagaacaattgccggcacccgattttttgctcgggtgtcggtttttttgcgcttttttgcacctttttacgggcaattttaaatttttgctcttttgcactatgtgccgcaaaaatcattgactttatagctttttgtgtgtataataacaatgtgtttctgcgtttgttcgaaatcggacggcagagagagaactgctttcccttttttcgtcaaatcgcaaattttgaacaggaggaacaaaaatgaaatccaaaggaatttcaaagcttatcgggctgctccttgcggcgagcgtgacggtttcggccgttccgctgaccttcgctgcctgcgcagatgcctctgccgcgtccgccgacgatccgagccccaaaagctatagggtcatggatctttcctacacctctcccaccaatgccgacgactttaaggtcaatgccggtttcggtgcgagaatagactatatgtcgctgggagatcaggccttccattcgaaaaacggcttttcggtcaagccgaattccggctcggcgggagagaaaaccgatttcaccgtcgatctttcgcagcttgacagcacggtgacctattttaacgccgttgtcggtgttgacgacctcggccccatgtggagacttgacggtctgggcggttcggctcagttcttcgtcattgccgacgggcgcacgatcggtcagtccgacgttatgtatcccggcgatatgcagtcgctttcctgcgacatccccgagggcaccaagacccttgtgcttcgttcgtccaatgccgacggagacaactatatggactattgcgactgggccgagcccaccctctacacctcccgctttgcggccggtcaggttgaaaaatcggtctattccgaggacaacgacttcggcaacaaaaccgtttcggcaatcggagaagtgggcgtgcggttttcggccaaggagaaattctcctcgctgaagttcaacaccatcgtgtcttccgaaaaggtcgactgcaacatatacaaattcacctattcctatgagcgttcaattcagaacggcacgctgacaagcgtcaccgccaaaaaacaggccgacggaacggtggaatttccccttaacaccgcgcttgacgccggcgaatacctcgtggtgcttgacggagtcaccaagataaaggccaacggctcgcagtacggctactatttccttgacggcgtgccctcaagaggtcttgtcaacatgagcgtgacctttgtcgagcctgccgacagctatttcaatgtggccaccgaggagcctgccgtcacctatgtcggcgccgcaaccgcctccgaaaaggcccgcgcaaagaagatgtacaattcctatctcgccgaccttgaaaccttcccctcaagcgtcaagataggcgacgatatgtataacggcttccccgcccccgattttaccgaggtcaaaagggaaagctcgaccgacgagcagaagcacgccgagaccgtcaacatcacggtcaatcacaagagcggacttcagtttgtcatcaacaccgtcttttatcccgactattccgcctttgactggacggtttatatgaccaacaccggcgacgcgaattcccccatcgtttcggaattctacggctgccgcaatttcgagtttgagggagacaaccccaccgttgtgggcaactacggcgaggattacgacgtctgcgctccctacaccacccgtgtgaccgagctttccgagggacagagctttacctcctccccaaatcacggccgttccaccgacggcggcttcccttattacaactttgaatacggtaacaagggcgctctcattgccgtgggttggtcgtcgacatgggaaaccgatttcacctataataacggcgtgaccgatttctatgccagacagaaaaccttcaattcctatctcaagcccggcgaggtcgcgagaactcctctgaccgccatggtgctttatgacggaagagaccgtcagcgcgcccaaaatctttggagagactggtttatcgactgcaacatgaaccgcgacgacggcgagacactcaccgaccccttcgtggcaggcgtttcctcccgtcagaacaccgagatgctcggtgccaccgaacaaaatcagatcgactatatcaacaaatataaaaacatgggtatcgacataagcgtctggtggatggacgccggctggtatccctgcaacggcgactgggtcagcaccggaaactggactcccgacaccacccgtttccccaccggctttgccgatgtttcggaaaccgcgaaagcccaagacgtcaaaaccctgctgtggttcgagcccgagcgcgtcggcctgtcaaagcaggctcttgacgagcttaacaagtcgggcgacaccgccgtcaagcccgagtggctcataggctacggcgagggcaacgaggcggttttccttaatcagcccagcaaatacgcccagttcgacatgggcaatcccgaggctcttgcctggcttaaggaaagggtcaagaccgttctcgaaaacggcggaatttccatctaccgtgaggactgcaacatcgaacagatggcaagaaactatgacacccttgccctgatgtatcccgaccgcgccggtataaccgaaaacaagtgcgtacagggtcattatgactattgggattacctcataaatctcgacagcatcgagctgctcgactcctgcgcctcgggcggacaccgcctcgacctcgagtcggtgcgttacgccgtcgcacttcatccctgtgactattgctatgacgacatgagagcaaagcaggttgcaaactataacctttgctcctggattccctttgccggcgccaacaccgcaaatgacaatgtggtcgacgaatacaccatccgctcggcctaccgtcaggctcttattctccagtatcccgccctcaccatgagcaacgcctcctttgaccgtctcaagggctttgtggacgattggaaaacggtaagtcagtattactacgatgatatttatcagcttacccaagagagctattcccccaattcatggtatgcctacagctatgtcaattccgaaagcaacaagggctttgccatgatttacagccgcaacggcgaaaataccgtcctgaccgacaagataaagcttaagggaatcaatgccgattacacctataagattacctttgccgattccgacgcgacctacactttgagcggtaaagagctgctttacaagggcgtcgacgttaagatgcagggcaccaacgacagcgaaatcatgtatttcgagcccaccgaaaccgttgcccgcgacgaggccgcccttgacgcacagataacaaaggccgagtcgactaagcttaatgtctattcccaggccaccacctttgccctctatcaggccctctatcaggccaaggccgttaaggccatgggcagcgacgcctccgacgaccaggtgaatgccgccgctgcaaacctcaaaaaagccgtcacctccctcaagcccgcatcggcttccacatccaaggagcagcttgtcgcggggcttgaaaccgttatcgactctatcggagccgtgaccgaggaaaactttgagcttaaaaatattctcataacctatgccgaaaagcttaaggaaatccttgtcggaaagttccccgacgccgttgcctcaaatgacgcgattcttgccgaggcgagggcaaaatacgacgagtttgccaagggcgacgttctctacggcgacgtaaacgcagacggagtcgtgaacgtgaccgacgccctcctgacacttcaggcaagtgtgggcaagatagccttcaccgacgagcagaccaaggccggcgacgtcaacggagatactgccgtgaacgtgaccgacgccctcctcatactgcaaagagcggtcaataaaatcaacaaattccccgttgaagggtaagtaaatccaagtaaaaactcctccgaaggctttatgctttcgggggagttcttttgcttttatattttgacggaggaaaaattattgctgttttgttccgcaaaggtcggcggggaagttttgggcataccgcgcggcaagttcttccatggtcatgtcgctttcgaaatcggcgattatgccgtcgataacgggcagttccttttgaaccttttgaaaattcgggcggctgccgtcggcgcatttttcggcaattcttttgcaggccttgaacatctcggcggcctgggaacggttgtttcttccgaatgccgagaccttgccgagagcgtaaagggttatgtaaaggccgggttcgtatttttcgctgtcgtattccgacatacgaagcagacccgtcgctgcgtttttaagcccttcggcggcgccgtcgaaatcctctttgcgcagggcgtcaagtgccgttttgttaaaatcggatattgttttgcggcagctttcctcgttttcggccgcaaaaagcgccgtccaaagctcgggggagttttgctttgtttttacgggggctgcggagacatcgggcttttgtggagcgggcggttcttcggcgggagtttcgatttgctcgggaggagtttgctcggcagcttgctcttcctttgcttcctcaaattctctttgaacgggctcctctgccgtttcgggttcgtccttttcggcggcattgccgtcggccggggaattttcttcgggcaagggggcaagggactcgtaaagctgttccgccgcggcgcggaattcaaaaatgtttttgttgtttcggaaatagaaaagctttataataagagagaaaagggtctcaaagcccaaaatcacgaaataaaaacaggcggttatcagcacaagcaccgtgtaaagcagcggctttgaaattttgacctttgctccgaaaaccgcaagggcgaaaatcatgccgcccaccgcggcgacggccgcgcacagcgaggctatttttggggccttgccgcggtcgttgagccgtgcattttgctcgaaattttcgtcggcggcggtaaaaagtgttttgacggcctcgtcgcctttctctgcacaggaaattgtcaccttcgggtgataaaccgcggcggtaacaagctttgcaagcagcgcaaaggccgcaggcaccgcaaaggcggccgcaatcgtcaaaagaaccgaaaaataccatttaatgtcgtttctcaaaagcagatgatcgcacagaaaatcggcaaatttccccacggcggggaatttccccaaaagctcggcaaagcgttcctcgaaaaagaggtaaacatagccgaacatggcgcataagagcgatgccgtgaacaggggaaccgaaataccgattgcggcgtatttttcggctctgcgcttttttaaaattgccctatccttcgaaagggaggtcaaaagctcggggatgtcgtcgggttgaatgggatttgtgtatgaaattgacataaaaacgctccttaaaaggttacaaagattttaccatatgggccgaaaaaaagcaaccttctatcaaaataaacattttttgagccttaaatacgacaaaaccgagcaaaaagctatgtttttgtcggaacggttagcgacagctaatttattttgggaaaaagccccgattttgcttgtaatttatatcggtgcgtgatataataaatggtggaaaagttgggacaattttaaagcgccttgcccgacggctgcgggagactgcaaggcggaaaaaggagtcgagaccgacgcccgaatttgttcccgaacttttaagcggacggaagtcaaacacccgtcggcttgaccgtcactgtttttaccgccgccaaaagcggattaaaattgagatttattttagggaggaaacaaaatgagcagatttgtttatgccgacaatgccgccaccaccgagctttcaaagccggtgcttgacgccatgatgccctatcttaccgagtattacggcaatccttcgagtctttatcacatcagcgacgctaccaaaaccgctgtggagaccgcaagggaaaaggttgccgccgttttcggagctgcgcccggagaaattttcttcacgtcgggcggaagcgaggccgacaactgggccataaagggcaccgcctatgctcttatgaaaaagggcaaaaaacacattatttccaccgctttcgagcaccatgccgtgcttcacacgctgaaattccttgaaaagaatttcggatttgacataacccttcttcccgttcacgaggacggtcttgtccgtgtggacgagcttgaagcggctataagagaggacaccgctcttgtttcggtcatgtttgccaacaacgagatcggtaccgttcagcccattgccgaaatcggcgccgtctgcaagaaacacggtgtgcttttccacaccgacgcggttcaggccgtgggcaacgtcaaaatcgacgtaaacgaaatgaatatcgatatgctgtccctttcggcccataaattccacggccccaagggcgtcggagcgctctatatcagaaagggcgtccgtcccgaaaacctcatcgacggaggagctcaggagaagaaccgccgcgccggaaccgaaaacgtccccggaatcgtgggactcggcgaggccatcaccatcgccgccgcaggcatggaggagaaaaacaaaaagcttcgcgaaattcagaagcattttataaccgaggcgcttaaaatcgagcgttcccgagtcaacggaagccttgagcaccgtctccccggcaacataaatatgtgttttgagggaatagagggcgagtcgctgctgcttatgctcgatcttaaaggaatttgtgcgtcgtctggctcggcctgcacctccggctctctcgaccccagccatgtgctgcttgccatcggccttccccacgagattgcccacggctctctccgcctttccttctcggacggaaacaccatggaggacgccgattacattcttgagtgccttccccccattattgacagacttcgcgccatgtcgcccctttgggaaagaataaaaaaacaggaaaaagaaagcaaataaagaacaggagttgaaatatatgtataccgaacaggttatggaacacttcacaaacccccgcaatgtcggtgagatccccgatgccgacggaatcggcgaggtgggtaacgccaagtgcggcgacatcatgaaaatgtatatcaaggtcaaggacaacgtcatcaccgacgttaaattcaagacctacggctgcggctctgccattgccaccagctcgatagccaccgaaatgatcaagggacacactcttgaagaggctttaaagctttccaacaaggcggtcgtcgaggctctcggcggacttcccgcccataaaattcactgctcggtgcttgccgaacagtcgataaaggccgccattgccgactattacaagcgtcagggaatcgaccccgagccgctgctcggcgcaaagtcggaaaaatgtgccgcctgcagcgacggaggctgctgcaacggctgagtttcagcaagctttcgacaaatgaacattaaacaaggccgaaaacctcttctcggagtcttttcggcctttgttttaaatcgggcagcgtttttttgccttgccctttaaacttaagcgtttgtcgcttaagctaatttcaatcgagtggagacagccatgaaaattcttattcttgacgcaaacagtattctgaaccgtgcattttacggtatacgctccctttccaccaaggacggcatttttacaaacgggatttacggctttttgaatattctcatgaagcttaaggagcaggtagagcccgacaaaatttttgccgcctttgaccttaaggcgcccacctttcgaaaggaaatttaccccgaatataaggcgggccgcaagcctcagccgcaggagctgaccatgcaattcccgattttaaaggaaattctcgagctttacggggtgaacgttctccaaaaggagggctatgaggccgacgactttttgggcacggttgcaagactttgcggtcagcgggatttcgaatgttatatcgccacaggcgaccgtgatagccttcagcttgtgaataaaaccaccaccgtgctgcttgccgccacaaaggcgggtcagccggagcttagagtatacactcccgaaagaatttttgagatttacggggtcatgcccatacagcttatcgacgttaaggcgcttatgggcgacgcctccgacaacattcccggagttgcgggagtgggggaaaagaccgctcttgcccttatagcgagatttcaaagtctcgacggagtatacggtaatatcgagtctcccgacataaaatccggagtaaggcaaaagcttttaaaggacaaggaaaacgcatatatgagcttaaagctcggtaccatttgcaaagaggtgccctgcgacataagctttgagcagaacccagccgacattgacgggcttaagaaaaagcttgcctcccttgagcttttcagaattataaagcgcatggggcttgaaaacgcgggggaaaaggctcggggagcttcggccgaaagacagatagaggtcgagccttcaaaggacgcgcccgatataacggaaaaaattttccccgttataataaagcgtgagggcggcgctgcggctgcggtaaagcttgacggaaaagtgaaaatttttgagggcgccgcggcggaaaagctgattgcgtcgtcggccccgacggtggttcacgatctcaaatccctttacgaaaagggaatatatcttaaaaatccgatttttgacacctatctttgcgcctacctattaaatccgtcggcgtcggattactcggcgggtcggctttgcgaggaatattcggtggagggctatgagcttaaaaattgtccccccgggtttgaggaggcggcaaaaacggcggctcttcttcccgagctctacgaggttttaaagctgcgcctttcggatgaaagcgagcgcgaactgctgaaaaacatagaaatgccgctgtcccttgtactcagcaatatggaaaaagagggctttttggtggatgccgagggaatacgcaaattcggcgaatcgctgacagtcagaattgccgatttggaaaaatcggtctatgaggcggtgggatatgagtttaatctcaattctccgaaacagcttgccgacgctcttttcgtaaagctcgggcttcccgccaagaaaaaaacaaaaagcggattttccacaagtgccgaggttcttgaagagcttaaggaatttcacccggtgggcgatctgctggaataccgccagcttgcaaagcttaaatccacctatgtggaggggcttttggcggtcatttccgacgacgggcgaattcattccacctttaatcagaccgaaacccgcaccgggcgtatcagctcttccgaacccaatttgcagaatattcccgtcaggaaggaactcggcagagagcttcgcaagttttttgtggcgagagagggctgtgtgcttgtcgacgccgactattcccaaattgagctgcgcgtgctttcccacatggcaaatgaccgccgcatgatcgacacctttttgtcggacggagacattcacacctccaccgcggcaaaggttttcggggtggaagaaagtcaggtcacacctctcatgcgttcccgcgccaaggcggtcaatttcgggattgtgtacggaataggtgcattttcgctggccaaggaccttaaaatttcctttgccgaggccaaaagctatataaaaagctatatggaaacctacagcggagtggcggaatatatggaaaaaacggtggaaagggcgaaaatcgacggatatgccaagacccttttcggccgccgccgtccgctgcccgagctttcggcctcgtcggccgtgacccgttccttcggcgagcgggtggcgcggaatatgccggttcagggaaccgccgccgacattataaaaatcgccatgataaatgtggaaaaggcgcttaaggatgcgggactttgctcaaagctcattttgcagattcacgacgaacttatcgtggaggctcccgaaagcgaggcccaaagagcggccgaaatactgaaacacgaaatggagcacgccgtggagctgtcggttccgctgactgccgactgccacacgggaaaaacatggtttgaagccaaggagtagaaaaatgtatcttgacgaaataaaaaaagaggccgaaagcatcggacggcggttgaaaaaatcctccctgcccgaggctgcggaaatttttgaaaaatgctttccggtaacggccgaaaccaccgtaaaaaccg

SEQ ID NO: 733 - DNA, 3639 bp, Unknown
  16S sequences of unknown bacteria
gcggctcctccgctcagcgctcgtttatattaccacttctcttcccttttcgtcaacacttttatcactttttttgtcattttatgtgaaaagagggcatttcaccctctttcacgtcagttcatcagccattgatcgcttttctgcgcatgacgatcagcgcacatgccgccatcatgcccatcagcgcgctctttccttcatcgcgttcagttcttcgctgacgatatcatattgtttcttataattttccagcttctctttctctgcctctaccttggctgccggcgccttgttgataaagcccggattggacagcatgccttcaccgcggcggatctctccctgcagccgctttgcttccttctccagcttggcgatctcttcctcaacattgatcatcgccgctaacggagtagacagcgttccgccgaggacaggacgcgtgaccatctcttcctggctttcttccttcatgcaggaagcgtggcacatcttcatcaggatggcgttgatgcgctcatcgatctgcttcgcggcgcccttttcatctctgatgaacacctggatatccatggaaggcttgaggtcatagtcctttctgatctctcggaccgcagtgatcatcgagatcagccctttcacctcattcatctcttcctcgctcatggcgacctcagccggctgcggccagcattccacattcaggctcggcttgccatgcggaaggctcagatagatttcctcggtcacgaacggcatgaacggatgcagcatcttcacgatgccctgcagcacgaacagcagcgtagattccgcggctcgcttcgtcttcacatcatcgctctgcagccccgccttgctcagctcgatataccagctgcagaattcatcccagatgaatccatacagctcattgccgaccaatgcgaattcatatcgctccatgttggccgtgacagacgcgagcacttcgttgaatctgcgcaggatccatttgtcgatgatcgaagcgtcctgcagatcgatctgcatgtccatatcttcgatctgcatctggacgaagcgcgtcgcgttccagatcttgttgatgaagttccagctggactcgatcttcttcgcgctgaagcgcagatcctgtcccggtgtggaattggtcgtcaggaagaagcgcagcgcatcgacgccatattcatcgatgacatccatcggatcgatgccgttgcccagcgacttagacatcttcctgccctgctcgtcacggacaagtccgtggatcagcacatccttgaacggacggctcttcatgcagtaacggctctggaacgccatgcgggcgacccagaagaagatgatgtcgtatccggtgaccagcacatcggtcgggaaataacgcttgagatcctcggtgtcttccggccatcccagcgtggagaacggccacagcgcgctggagaaccaggtatccagcacatcctcatcctgttcccagttttcgatgtcttccggcgcctgctctccgacatagatctctttggtttccttatgataccatgccgggatgcggtgcccccaccagagctgacgggagatgcaccagtcctcgatgttctccagccactggcggaatgtcttttcgaagcgcaccgggaagaaatggatcttctcctcgtcgatctcctgattcttcagcacttcatctgccagcggcttcatcttgacgaaccactgcttggacagatacggttcgacgatgacgcccgtacgctcggaatgaccgacctgatgcatatgcttttcgatgtgatcgaccacgccggcagattcgaaatcagccaccagcgccttgcggcaggcgaagcggtccatgcccgcatactttccgcacagctcattcatcgtaccatccggattcatgcagatcggcatcggcagatcatatttcttggccagcatgaagtcgttgggatcatgcgccggcgtacatttcatgaccgcggtgccaaacgacatatctatgtagtcatccgccatgatcggaagctcttccccgtttgccgggttgatggcatgcatgccgatgatcccctgataccgctcatcatccggatggacgaagatcgcctggtcggcaaacatcgtctccggacgggtcgtcgcgatgaccagctgctcgccgttctccacgatctgatagcggaaataatacatggcgccttcgatctccttgtggatgacctcgatgttggacagcgcggtcttggcttccggatcccagttgatgatccgctcgccctgatagatcagcccttcgtgatacaggtcggagaacaccttgcgcaccgcgtgcgacaagccttcatccagcgtgaaccgttctctgctgtaatccagcgaaagtcccatcttggcccactgcttgcggatcgtagacgcatactcctccttccatgcccacgcatgctccagaaacttctcacggccgatgtcataacgggagacgccctgttccttcaggcgggcgtcgaccttggcctgtgtggcgatgccggcatgatccatgccggcaagccagagcatgtcatacccctgcaggcgcttatagcgcgcgatgatgtcttgcagcgtcgtatcccatgcatggcccagatgcagctttcctgtgacattgggcggcgggatcacgatgcagaagggatccttgctcttatcgccggccgtaaaatacccttccttcagccagtccgcataataatgcgattcaacggccttgtgatcatatttggccgccagttcttttttcatctcgactcctccattcctcttcgttcagcgagtacagcttgacatcatgcttcatgccgtccgcaagccatacatgtcgtctcagcagtccctccagccgaaagcctacacgctccagcacccgtgcgctggctgcgttttccttcacgcagtatgcgctgatccgattcagccccagcgtgacaaatccttcctcaagcaggcaggccagcgcctctgccatcaggccgcggtgacgatggtcgggatgcagcgcaaacccgatctgcatgtgatgaggagacaccggatgatgaaagccgatcgcaccgacgatcatgtcccgcgctttctccacgatcacaaagagcatgcgctgttcttggacagcgggcatcgggctcagccagcgcgccgtctcctcaaggtgaaacagcgcctcaagcacaggctcatcctcgcgaagcgccattctgagcatcagcctgtccgtttccagccggtgcatggccgatccctcctctccactaaaaaaagcgccccaaaaggacgcttaacgtggtaccaccttttttcacatgctgcgcatgcctcaggcacagtaacgccgtgcgcgcggatcttcctactgggcgttcagaagacctgctcccagactacatgcaggacatccgccttcccctctcacccgccagggactctctgcgcacggaaccgtcgctgcaccttctgttctctgcatttgctcttaccctaatatgataaacaaaggcggaaggaaagtcaaccgaaaaaaaagcatgtcgccgttaagcgattttgtcacctctcgttaagggaaaatgtcaccatctt

SEQ ID NO: 734 - DNA, 15609 bp, Unknown
  16S sequences of unknown bacteria
taggcgcgggcgcgtccgtgggcgcgggcgggtccgtgggcgcggagcctccctgctccccgccggaaacatccacccagccatccgtgccgccgccggtttgctctccttccgccagggccccaaaggccaacaaagccacgagcatccaagccagcatcgcgcgcaatcctttacgcatcataaaatacctccatcaatgtaaggccgcatgcgggcgcggtaacgcccaaatccaaccggctgccgcttgccagcgcgcgccgcacggctccgccttccagcttgcccgtgcccacgccgatcagcgtgcccgccagtatgcgaaccatattatacagaaacccatttccgcgcacctgcatggaaacgcacttgccctgccgcgcgatttcaatggaatggatggtgcgcaccgtatccttcaccaccgaaccgctggcggcaaacgcgcggaaatcgtgccgccccacggcgcattgcgcctcgcggcgcatggcgtccacatccaggggatacatcacatgcgcatgcgtattgcgcaaaatcgcgctggcatgcgcgtcgttgaaaatcgagtagcaataccacttgcccttcgcgctgaagcgggcgtgaaaatcctccgccacagcccgggaatcgcgaatgcgcacatcggcgggcaacaccgtattgagcgcataggcgtatttttccgctggaatgcggctctgcgcgtcgaaatgcgccacttgtccgaaggcgtgcacgcccgcgtccgtgcggctcgcgcccgtgatcgcgtgcggcttccccgtaaggcgaaacagcgcctcttccaccacctgttgcacggcgagcgcgttttcctgccgctgccagccggcatagttcgtgccatcgtattcgatggtcaacttcacgcgcatcagatcagcccccgcaccagcaccacgcacgcaatgagcgccgccagcgtcaaaaacgccataaggtcgatgcgcgcgtatttcagcaccttcatgcgcgtgcggcccgtgccgccccggtaacagcgcgcctccatggcgagcgccagttcgtccgcccggcggaacgcgctcacgaacaagggcaccatcagcggcaccatggccctggcccggcgcagcagattgccgctttcgaaatccgcgccgcgcgccatctgcgcgcgcatggtcttatccgcttcttccaatagcgtgggcacaaagcgcagcgcgatggacatcagcatggccagctcgtgcgccggaaaatggatctttgccagcggccgcatcatgcgctccaagccgtccgtcagggcgatgggcgaggtcgtgagcgtgagaatctgcgtgcccagcaccaacagcatcaggcggatggccataaacgccgcgtttttgagacccacatccgtcacgcggatgaaattccactgccacaaagtgttccccgtagaggtaaaaaacgtgtttagggcgaaggtgatgatcacgatggccagaattggcttcaccccgcgcaccaaaaagcgcatgccgatgcccgtgatgctggcggccagcacgatatacgccagcacaatggcgtagcccgtgaaggagctcacgcagaacacggccagaatcaagccgatggtcatccagatcttggtgcgcggatccaggcggtgtacgacgctatcgcccgggaaatactgccccagggtaatgttcttaagcatggcagtcctccccttccgcacccaggcaagcggcgatcgcaccggccagttcttccatctcgaacatgccgctggggatttcaaaccccttctcgcgcaggcggttcgccaactgcgcgcaggcgggaatgcccagccccatggcggccagttcgtccccatgcgcgaacacctgcgcgggcggcgcgtcaaaggccaccttgccatggttcatcacgatgatgcgcgaacacatccgggccacatcgtccatggaatggctcaccatgatcacggtcacgcccccgcgcgcatggtaatcgcgcaccagggcgagcatttcccggcggccgcgcgggtccagcccggcggcgggctcgtccagcaccagcacgttgggccgcatggccaaaacgcccgcgatggccacccggcgcttttgcccgccggaaaggtcgaagggcgagcggtcgagcaaatcctccgaaaggcccacgatctgcgcggcttcgcgcacgcgcgcctccacgtccgcggcatccagccccaaattgttcggcccgaaggcgatgtctttgcgcacggtttcttcaaacagctgatactctggatactggaacaccaaccccaccgcccggcgcacatcgcgcaggttggtatccttgtcgttgaggttcaggccgttcacatacacgctgcccagcgtgggcttcaaaagcgcgttcaagtgctgcaccagcgtgctcttgccgctgcccgtgtgcccgatgacgcccacaaactccccatccgcaatggagagggaaacgccgtccagcgcgcgggtttcaaacggcgtgcccggcatatagatatatgtggcgtttacgacttcaatcggcacagttccaccaccatttcatccacggtcatcacatcttttgccggaatgccccgcttgcgcagttcctccgccagcaagatcatctccggcgcgtccagccccagggcgcggatttcctccacgcgcgtgaacacttccagcggcgcgccttgcatggcgatcttcccctcgtccatcaccaggaggcgctccgcctgcgcggcctcttccataaagtgggttatccatatgacggttacgccgcccgttttgttcaattcccgcaccacgcgcatcacttccgcccggccggaggggtcgagcatggcagtcgcctcgtcgaacacgatgatttccggccgcatggccaaaacgcccgcgatggccacgcgctgcttctgcccgccggagagcatgtgcggcgcgctgagcgcgtactcctccatgcccacggttttgagcgccgcgtccacccggcggcggatctccgcgctcggcacgcccagattttccagtccaaaggcgacgtcctcctccacgatggtcgccacaatctggttatcggggttctgaaagaccatgccgcatttttcgcgcacgcgaaaagcatcgtcctcatttttcgcgacgatgccccccacgcaaatttcgccacccgtgggcaaaaacagcgcgttcatcagcttggccagcgtgcttttgccgctgccattgtgccccaagatggcgagaaactcgccttcgtatacttcaaagtccacgccgcgcaccgcgtcgaacccatcttcatacgcgtatgtcagccccgtggctttgatcactgcttttctcgtattcataacgcttcaaatcataccattccaacgttaaatcgcgcgcaaaccccggggggaatttccgagattttacaagaaatccgcaaaggtgacgtgcaattgtgttatcatagggaagggaaaattggaaggagcgtgacacccgtatgtataacaaaaagaccatcgaggatatcaacgtttccggcaagaaggttctcgtgcgctgcgacttcaacgtgccgctcgacgccgataagaacatcacggacgaaacgcgcatcaacgccgccctgcccaccatccgctatctgctggataagggcgcggctgtgatcctctgctcccacctgggccgcccgaagggcgaattcaacatgaaatattctctcgcgccggtggccaagcgcctgagcgagaagctgggctttgaagtgaagctcgccagcgacgtgatcggcgaaagcgccaagaagctcgcggcggaagtgaagccgggcgaagccatcctgctggagaacctgcgcttccacgccgaagaagaaaagaacgatcccgccttcgcgaaggagctcgcctccatggcggatgtgtttgtgaacgacgcgttcggcaccgcgcaccgcgcgcacgcctccaccgagggcgtgacccactacctcccctccgtggccggttacctcatcggcaaggaactggacgtgatgggcaaggcgctcaccaacccggtgcgcccgttcgtggccatcctgggcggcgcgaaggtcaaggacaagatcggcgtcatcaccaacctgatcgataaggttgacgcgctgctcatcggcggtggcatggcctacaccttcatcaaggcgcagggcggcgaagtgggcaattccctgctggatgaagagcgcatcggcctggccaaggaactgatggacaaggcggccgccaagggcgtgaagctgatcctgcccgtggacaacgtgattggcgacgcgtttgacaacgattgccaccagcaggttgtcgaaagcggcaagatccccgagggttgggaaggcctggacatcggccccaagacctgcgagcagtttgccgaggtgatccgcaccgcgaagaccgtcgtgtggaacggccccatgggcgtgttcgaaatgccgaactttgccaagggcaccatcgcggtggccaaggccctggcggagagcgatgcgatctccatcatcggcggcggcgacagcgcggcggccatcgagcagttgggctttgccgataaggtgacccacatctccaccggcggcggcgcttccctcgaattcctggagggcaaagtcctgcccggcatcgcggccctggaagacaaataatcacagtagcatctctacaccggggaggcggttccgcccgcttccccctcttaatggaaatatggaggaaaagaacatgcgtaaacccatcatcgctggcaactggaaaatgaacaagacccccgcggaagccgcggcgctggtcaccgaattgatccccctcgtgaaggacgccaagtgcgacgtggtcgtttgcacgcccagcgtgtgcttcgcggcggtcgcgcccatcctggaaggcaccaacgtaaagctcggcgcgcagaacgtgcactttaagccctccggcgcgtacaccggcgagctctccgccgacatgctcaaggcctgccacgtggaatacgtgatcatcggccacagcgagcgccgccagtatttcggcgaaaccgacaagaccgtcaaccagcgcgccctggccgcggtggaaaacggcctgatcccgatcatctgcgtgggcgaaatgaaggacgagcgcgaagccgggtataccgacgccatcgtcacctaccagacgcagatggccctcaccggcatgaccgccgagcaggtcaagggcgttgtcatcgcctatgaacccgtttgggccattggcacgggcctcaccgccaccgacgagcaggcgaacgaaaccatcggcgtgatccgcaaggccgtggagcagaagttcggcaaggaaaccgcggacgcggtgcgcatccagtatggcggcagcatgaatcccaagaacgcgcacggcctgatggcgcagccggaaatcgacggcggcctgatcggcggcgcgagcctgaaggccgaggacttctcgaaggtggtacatttcgaatgagcatgaccgcactgatcatcatggacggctttggcatcaaccccgcgcacgagggcaatgccatttacgccgccggcacgccgcatcttgacgccctgaaggaaaagtattcttacaccacgggcggcgcgagcggcatggacgtgggcctgccggaagggcagatgggcaacagcgaagtgggccatctgaacatcggcgcgggccgcatcgtctatcaggaatacacccgcatctccaagtccatcgcggatggggatttctttgaaaaccccgccttcctcaaggcggtagacgccgtgaaaaacggcggcaagctgcacctcatcggcctggtgagcgacggcggcgtgcacagccacaacacgcacatttacgccctgctggagctggccaagcggcacggcctggccgaccgcgtgttcgtacacgccctgatggacgggcgcgacgtgccccccaccagcggcaagcactatatcgagcagatggaagccaaaatggcggaaatcggcgcgggcaaaatcgcctccatcgcgggccgctactggacgatggaccgcgacaagcgctgggagcgcgtggagcgcggctacaacgccctgatgggcgaaggcaaagaggccgaatgccccgtcaccgccatgcaggcgtcctacgacgcgggcgtgaccgacgaattcgtggagccgaccgtgatcgtgaaggatggcaaaccggtcgccaccatcgaagcgggcgattccgtgatcttcttcaatttccggcctgaccgcgcccgcgaaatcacgcgcgcgctgatcgacccggaattcgatggcttcgcgcgcaagggcggctacaagcccgtgacctacgtctccatgacgcagtacgacgcgacgttcaccaacctggatatcgccttcaagccgcagacgctggacaataccctgggcgaatacctctccaagaacggcatcgcccagctgcgcatcgcggaaaccgaaaagtacgcgcacgtgaccttcttcttcaatggcggcgtggaagcgccgaaccccggcgaagaccgcgcgctgatcccctcgcccaaggtcgccacgtacgacctcaagcccgagatgagcgcctacgaagtgaccgaagaggccgtgaagcgcatccagtctggcaaatacggcgcgatgatcctcaatttcgccaattgcgatatggtgggccataccggcgtaatggaagccgcagaaaaggccgtgaagaccgtggatgagtgcgtcggccgcgtggtggacgcgatcctcgccatgggcggcaaggccattgtgaccgcggaccacggcaacgccgatcagatgatcgatccggaaaccggcgatccgttcaccgcgcacaccaccaaccccgtccccatcatcgtgatcgatcccgtggcgcccaaaaagcagctgcgctcggatggccgcctgtgcgacctggctcccacgatgctggaactgatgggtctcgctaagcccgctgaaatgacgggcgaaagcctgatcgtgggctaacgctttttctcatgctttgggccgcctcggaaagaggcggcccaaagcataaaccccccttgcgtttgtgcgcaaacgcaagggggtgttccctaggctgagaaccggcgcggcgcaaccgccggccagtcccccattcttttcctttattgcagttcaatcctgcgggtgttgctcttgggctgctccacatgcttgggcaggttcagccgcagcacgccatccttatattccccggtgatgttctgctcctccacgccttccaactggaacgagcggctcaccgagccataccggcgctcgtgcagcacatagttgctttcgttcttgtcattctgctcgttcatttccgcgctgatggtgagaatgccgttctccacatccacgtgcacatgatccttatccatgcccggcagatccgcttccaggcaatagtgatcacccttatcctccacatccaccttaaaggtgctcgcggactcatcgccccagaacgagcggaagaaactatcggcgaacgcgttgaacggatcgcgaacttctgtgttcctgcgtacgggatggttgttggagtaacgatacggtacgatgctaaacatattcagcgcctcccagcgattttttatgatgatgcgttccggaaccgcttctgccctctggctccccagttccttggtacggtattagtatacgtcaaaggtcaaagaaagtcaattaacaatctttgaacaaattgtaaaccttgcagcccgccatcttttcgcgggaaagatgcgcacaagcatcgcacaatcgcgcccgcacccctgacaaacaagcaagccgccgcggaagccaagcttccgcggcggcccgtacaacgcccaaattgacgcttagcccttcaggccctggatgctgatgccctccaccaactggcgctggaagaagaaaaacaacaccaaaatgggcaccagagaaagcaccgacatggcgaacgtcgcgccgaaatccgtgcccgcgctatcggagaagagctttagcgcgtaagcgacggtgtaggtgcgcggggaattcaaatagagcagtgaacccatgaaatcgccccacgaattgatgaacgtcaggatgccaacggtcaccacggcgggcacgatcatgggcagcaggatgcggccaaagatgccataccagctgcaaccgtcgatcttcgcggcttcgtccatatcccggggcacgccgcgaatgaactgcatcaccaggaagatatcgaacgcgccgccgaagaaggccggcaccgtgagcggcaggaacgtgcccacccagcccatctggttaaacagcacaaagcggggaatcatcatcacctggccgggtagcatcatggtgatgatcatcaacacaaaccagaaattgcgccctggaaagcgaatgcgtgccaaaccaaaggcaatgcaagccgcggaaagcgccgcgcccacggtggaaacccccgccaccagcagcgaattggcaaaatacacaccaaaactcatgccagcaaaaccgcgccagccgttcgcgtagttttcaacggtaaaggtttcggggatcaggctgccaacggtcacgaagatttccgaattgggcttaaaggacgaggcgagcatccacaagagcggatacagcatggcgatgctgccagccgcaaccagcacgtggtaaacgatggtggtggtaacttttcttctcttgatgctgtgtacgcgagccgccgtcatatgctcaccttccttccgattcgtagtagacccatgcgctggaggaacggaaaatcagcgccgtaaaggccgcgatcaccagcagcatgaaccacgccatagcgctgccgtagcccatttcataataggtgaaggcgcggttgtacaggtgtacgccgtagtacaacgtggtgttcaacggcttgccctgcgtgatcaagtagctggaattgaaggcctggaacgcgccgatggtctggttgaccaggttgaagaagaaaatcggcgtgatcatgggcagcacgatgctaaagaagcgccgcactgggcccgcgccatccacgatggcggcttcgtgatagctctgaggcacatttttcagcgccgccaggaagatcagcatggaactgccgaactgccacacacccagggaaatcagcacgcccagcgcggtatcggggttggacagccatttcaccggttccatgccaaagtacgatgtgattttgttgattgcgccattgtaagaaaacaactgtttccacgtgagcgccacggccacgctgccgcccatcaacgagggaatgtagaaagccgcgcggtagatgggaatggcgcgcgtcttgcgcgaaaggatcagcgccacgcccagcgacaccagcagtttaatgggcacctggatcagcgcgaatttgaacgtgacccagaaggactgccagaaatacttgtcctcaaagaacattctttgaaagtttgctaggccgatccaacgggctggcgtaagcacatcgtaatccgtaaacgcgagatagagcgagctgaaaaaagggatcacggtgaatgtgatcaagccgatgatgaaaggggctatgaacacatacccggcgactttgtccgagccgacgatcttgctcaatttctgcatgctgcgtcactcctgtcgtccgtagtgtgcggcaatttagcacgaaaacagtccgcaatggactgttttcgtgcctcgggacataagcccagccggtaaaaagattactcttctgcgctctgcgcgccttccagcagcagggcattcgcctcgtccatgaactgctgtgcccaagccgtgaggtcatccacctgaccatactgcacggcttcgaaatattcgcccatcagcgcttccacttcgccgctggcaaccggatccggcggcataatcggcgaggtcttgccatcctggcccaggtaatcgagatacgccgcgatcttctgagaggtctcatccaaagaaggcgtgatgtactcgagcataacgctggaaatgggcattgcgcggtcgatgccgacgatatcaaagcaatccgtgtcgttggtgaagaagttgatgaactgcgccgcggcatccttcacctgagaggtttccgcaacagaccagaacatggagggcttgaagtaaatcggcgggatcgtgccgtcttccggcaccggccagcacgccagcgacagttcgcaacccgagccatcctgataggcctgcaactcattggtccagtgccagctggcccagttgtcgctcaccatggcgtcgaaagcggtggtggcggaagtttcgcccacatccaggcaccagccggcttctaccgcgtccaggcgatcctgccaggtgcgcacgatgtacttgggatcatcgaagcccagtccattgccttccaagttgaacaggtcgagtccataggcgcgcagcaggttgcgcagcgcatccttaccgaccaaagtatcctgcgtacggcccgtcgcctcatacacctgcgcggccagctcggcaaagctttccagcgtgggttccatgggcatttccaggcctgcctcatccagcacatcctggcggtagaaggtcgccaacgcgttggtgccggtggaaagcgcgtagttgacgccgttcacctggccgctaaccagcacggattcatccacgttgctcacgtcgatggcgccagactcataatacggaccaaggtcggccagcacaccgctggtggcatactggttgaggtactgatagtccatctggatcacgtccggcagcaggttgcccgcaacctgcgtggccagcttgctccagtaaccatcccacgaggtgaactcggcctcaacggtgatgttgggatacttttcttcgaacttctcaatggcggccatggtcaggtcatgtcgggtctgcgaaccccaccagcacacgcgcaacgtgacgggttcttcgctctccgcgaaagcaaccgcgctggtgcacagcagcgccaacaccagcatcaagggtagaatgcgcttcatgagaaatacacctccgatagattttgtgatttttattatagtcaaaccatgcaaaaaagaaaatgcaaatatcagaggcaatctgtcatttttccggtttatcaaatctttgtcatgatttttcatccagcgacgcgcggtattccttggtggtcatgcccgtatacttgcggaaaacctggctaaaatagtgcggattgttgcccagacccacctgctcggcgatttcatagctatgcagctgggaatcggccgccatcagttgctttgcgcgctccatgcgcaccgccagcaaataggcgctgaatttctgccccatggcgcgggtaaattcccgcccaatgtaatccgcgttcatatagaccacatggtcggccaggtattgcagggaaagcgactcatccgcgtagtgcgcgtccacataggcggtcatctgctgcacaaagccgcggggactggcgtcctcgttgcgcaggcgcaaaaggcagcgcgccacaaaggcgctgagcgcgccgttttccttctgaaacgcctccactaccgcgctctttttccattccgcctgcccgccatccgcgccgcgcgtgagcacacgagccaatgcctcgcgtaaaaggctggggtcttccgccgttttggcaatttcctgcactttcttttccagccgttgcggatccagcggctcccggcacagggcgagcaacgcctttgtgagcatttccacccggctctgccgttccccatagaggtgcaccacctgcttgcgcattttgtccacggcgcggcaggcgcgttccaacgcctgccccagttcttcctgtgcgcagggcttgaggagatactccgtgacgccggcctggatggcctgctgcgcgtaggcaaacgtatcgtagcccgaaaggatgatggcgcgcaactgcgggtgcagcgacatggcgcgctccaccaattccagcccgtccatgcccggcatgcgcacatccgcgagcaggatatccggcatatcgtccatcatgctatccagcgccgcaatggcgttgctgcaagaagcggtaatggcaatgtccatgccgcataaggcgatcatcttttccaatccttcgcggatgatctgttcgtcgtccaccaaaagcaatttgtacatgcgcaaccccctatgcgtcgaatgcctggccgcggcttccgccgcgcgtatccggcaggcggatgataatctgcgtgtgtccgggcgtactcttcactcgtaagccatactggctggaaaaggcgtattgtacgcgccggtggatgttccgcatgccgatgcccaaaccttccggcttgatttctccgctttccagtttttccaaaatgtcctcgtccatgcccggcccattgtcttctaccaggatttccacatcgccatctaccgtccgcgcgccaaggcgaatggtgcaaatttccagcatttcttccgcggcatggtgcaccgcgttttccaccagcggctgaatcgtcatcgccggaatttggcaggagaggaagctttccgcaatttcttcctccacgcgcaggcggtcgccatagcgcaggagttgaatgtgcaggtattcgcgcgcaatctgcaaatcctcgcccacggtgaccacatcccgcttgtcgttcagcgaagcacgcaacattttgcccagcgcgttcgtcatggtggcgatgcgcttatcttcgctgccaattgccaggcaatagatggattccagcgtgttgtacaaaaagcgcggacgcacctgggcgcgcaactgctgcatctgtttttcctgcaaaagctgttgcttttccgcgttttcgcgcgtgatgcggtcgtattcgcgcgtcatccggtcgaaatgccggtgaagctggccaatctcatccctgcgcgattgatagggattgggcgtctccggcacgggaacgccatcggcggcgaaagcgtcgaatttgtgcagcaggatcttcaggtgctttagcaggctcgcgatcatccacgcgctcaacagcagcgctagcaggctcgccgttacaatcacgcccatggtgatgcgctctgccgcgcgcacggtggactctatcgcgccatagtccaccaacgtcacatagcgccagccattgtccgccgtaaagcgaacgcagagcgccgcctgtccatcctgcgaaattttctggtatccatcctcgcccgcgggagaaaggccgcgcacccgctcgtcgctggaatagagacaaacatcgccgctatagatggcgcaggaaagcggactgttcagccagtgcatattctggcgctgcgtttccaccagtccattcaaatccatctcgatgaggatggtggccaaggggcgcagcgaaaggtggtgcacctcgcggatttcccgcaaaaggaacagcctggcgcttttctcctccagcaaccatacctcgcgtccattactgccgtgcgccagtgcaatgcgctcttctgaaatctcgtgggctacgctcgtttgcccaaatccctgcgtgaaatcctggccgtccgccgtctccaactgcagcgagcgcgcatggctgaaccacatggaaaaataggccatgcgatcccccaccgcgttttttgccgcgccccaagaagccgtggtcaccggcttatccgccatggtggtcagactttcctgcaatacgttatccgccagaatgcgaaaagatagctcttcgatctccgccaagccatcttgaatgtgcccggcgaacacggccatcatctgcatgcagctgcgatacagttgttcatcatacgcggcatagggaatgcgcaacgcggcgaatgtgctggtgcataccaccgccatcgccagcgccaaaatcagcaaaaatttgggtaaaaggcgcaaattgcgaaagcgatccgccagtttctttgccatgcccatatcttcccatcccctggcgcactggtttgcgaaaccaatgcccttttatcttccccattcagtctcttatataaggaaattgtatattggaatggcaaattgtcaatgcaattttccggcatattgtgctgttttttcgtgccaggcttctctacatatggcaatgcatccgcctcaaaacttctccccgttcggccagcgcaaaaagcggccaacgcttgcaatccatagaaaaaccccctggccgcgcaaaacgcgcattccaggggcttgcaaaatccagaaagtttcagtccacttccggcgctctggtaaattggtcgggcttcggcgtgatccaaggcacgcgcgtgggctctggcgtagcgtccggctccgcgaagtaaatggggttttccggatctggatccgtgggatcccagccatatcccttcaccaactccgggattgcgtccatcagttcttgtttcaactcgggcatttcctcgcccagtataatgcgcaccggcgtgccttcggggcaattgtcttgaatccacttggcgtccttgcacaaaagccggatgcagcccgaagactggttgtcgcccaactggcgatacttataccagaatacgtcgttggaatccttggattcgtatggcactgagtggaacaagaatggccccgtgatgcgggtggcgtacttggcccacgtgccatcggccatcagtttccactcgtatttggtcttgagcggatacacgccgtcgggaagcttgctgtgccggtaaccagaggagcaaatcatgtgcttcacaggaatcgtgtattcgccgttttcgtcgatcgtgtacaccgtaacgatctgcgccttcttgttgagttcaatcaagtaaggatattgcacttccaccggcgtgggcgtaggcgtgggaaccggcgtgggcgtaggcgtaggcgctggggtcggcgtaggcgtgggaaccggcgtgggcgtgggactcggcgacggcgtgggcggcggcgtaggcacgggcgtaggcgtcacctgcagggcgagcgtgatgttgatatcgccatcgcccgtcgcgttcggccgcgcaatggcaaaaaagaacaagcatccggccattaacaagaaaaacagcagccatcccaccatcgcgccagcgctcagctttttccgctttttgcgcacaaaaatctcctcccaccatcacaacgccccagcgcggagcctaattctcaaaccaaatttcccgggaaacctagggcaacggcgcgcgtatgcgcttcacatttttggtttagacgaagcgccgctggaattgattcccaattctcagcgtgtcaaaaaagtctttttgacacgctggtggacgggagagcaagcgccccacaattcgcaatggtcgtcctgctgcgcctgacggcttgcagtacttccttgctcattgggcttacttcgcgctgcttcgttccacaattcgcaatagtcgccttgctacgctaccgcttgcaagtctcctttgctcattggacttccgcttcgcctgtttcgcgcactgcgcgcggcgaagctccgtcccact

SEQ ID NO: 735 - DNA, 19021 bp, Unknown
  16S sequences of unknown bacteria
gttgcatatacaaagcctctctttcttcgccaaaaccattatatcatatttctggcgaagaaacattgtctgaaaaaaattacgccgctaatgcgggcattcttcccacgacttatagaagtcggggcttcctgccctgcggcgttggtgaaaaccctgataaatatataaaaatgcttgaaaaagaaggggcggatccggctattctgattgatccgagggaagttgcaacagcgccatggacggtattcaaatgccagttcggctgcagcagctacggtcataatcattgctgtccgccaaaggctccctcctatgacaaaaccagaaaaatactggactgttacagtacaggaatcctttttcgcatacatggctggaatgctacagctatggcctttcgctgctcaagagaaacatttctcgacggatattacaaaaccatagcctttggcagcggtatgtgcaagctgtgtcagagctgcgatcctgcaggctgcaggcagcccgagcgcgcaattccgtccatggaggcctgcggaattgatgtatttgcaacggcaaggcatttcgggcttgagatagacactctcagatgcccggacgaaaaacgtaaccatttcgggcttgttttgattgaataggctgaattcaggatgaattttaagcctttacctttagctgcaaaaatagtataattactttgtatgcaaaggagaaatctatgaaatacacacattttaagaaactgctgtgtattgtgacggcggcagtcctgctggcgtttaccggctgcactacatttgacagtttcaaaacagaattcataacaggcgatgacggcagtaccaaaatcgtcaaaataggagtatttgaacccaccagtggagaagataagagcaaggcggctcttgagatagagggtatagaactggcgcacagtatgtatccgacagttgacggcaaaaaagtagaactcatatattcagacaacaggtcggatatatatgcagccgaaactgcaatacaggatttactgctcaaaaaacctgttgccatattaggcagttacggcaatgccaactcacttgtggcaggtccgtatgtagatgaggcaaatgtgcccgcaatggctataaccaacacaaaccctcttgttacaagcacatctgaatactatttcagagcctgctttgtagacacctatcagggtacggctcttgcaagatatgcctattcgggactcaaagccaaaaaagccggaataataattcccgagggcgatgagggagcgtctgcgatagctcagaaatttatgaagcagttccagaagctcaccgagaaccagaatgcaattacagtaaacgaagaatttgagccgggcagcggtgattttacagagcagcttgacaaaatagaagctgcgggagtaaaggtagtgcttatacctgtgggtatagatgatgcggagaatatactccagcaggcatatgagcgtcatatggatgttaagttcttaggcatagacagctggaacggcgaggagcttgtttctgcaataggcaaattcgcagcctccaaggcggtatttaccaaggttaccgaggtgcaggcagccgaaaccgaaacagatgctctgagcgagtttatggaggcttatcagagcaaatacggcaaggactcggtgccggataatgcgacggccttaggctatgatgcatatatgattttaataaaggctatagatcaggcaggcagtagcgccacaggagagcagcttagggagcagatctcatcaatacagaactacagaggagcatcggggagtatatcgtttaatgcatcgggcgatccgagcaaatccatgaccatatacaccatcagcattgctgacggcagcagcagagcagcatacgttgtcgaaacagacggcagcggcaaacctgttaatcagccataaggctttatatagaaaggaaacatattatggaacagaagataagagaagcaatggaaaaaataagaccgtttcttcagagagacggcggagatatcgaattcattgaatacacagacgatcacattgtaaaagtaagacttcagggtcactgtgcaggctgcccgggcgcaagaatgacacttggcggagtggtagagagaatactcaaagaaagctatcctgaaatcaaaggcgttgaggccgtagattaataacgacttatatattactgctattcatatagcagtaatattaatatggagaggtgaaatacaatatggaaatccttaaaaaagcatatgagataatcaatcagaagcaagatgagataataggaacgcttcagcagtttatagcaatcccaagtgtttccgtcagaacgccgggagataagccttttggcgaggacgtcgacagggctttcaaatttatgctggaaaaagccgaaaacgacggctttgaaacctttaatgcggataactatggcggacatatagacttcagaggcgaaagcggcgaggttatgggcattctgggtcatatagatgtagtgcctgagggcagggactgggactatgagccttacagcgccactgtttcagacggcagaatatacggcagaggagcgatagacgacaagggtcctgtaatagcgtcatactatgctatgaaagcactcaagtcagcaggatttaagccggacaaaaccgtaagacttattcttggtcttgatgaggaaaccgactgggagggtatggaatactattttaaaaaggtaagaaagcctgattttggatttacccctgacggagagtttcctgcaatacacggcgagaaaggcattatagtatttgatatagcggacaaattcggcaaatcgcagacaaagggaatagagcttcgctctgtcaaaggcggcaacgctgccaatatggttgcagaccacgcgagagccatagtgctttcagaggataaggcagaatacgaaaaaataaaggaaatgcttgcagagcttcgcagacagaaaggctacagggtgacacagaagcagataggcaaaagccttgagattgccgttcagggcgtttcggctcacggagcaagaccggagcttggagtaaacgctgtttccgtaatgatggatatactgggacacataaactttgcaaatgatgatatgaactcattcatagacttctataacactcacataggctttgaaacagacggcaacagtatgggctgcggactttcagacgagccgtcgggcaggctggtattcaatgtgggtatgattgatatgagtcagaaatcagtgaaccttacaattaacatcagatacccggtaacctttgacgaggataaagtgtatgaggctatgatgcctgtaataaacagatacgatatgggtatcgtaaagggcgagcacaaagcccctatatatatgccggcagacagccctctcatatcaactcttatgaaagtatacagagagcagaccggcgatatggatacaccgccgcttgtaataggcgggggcacctatgcgagagcggcagacaatattgtagcctttggcgcatgtatgcccggtgaagaggaaatggcccaccagaaaaacgaatatattaaaattgacaatctgatgctcataacaagaatatatgtacaggcgatttatgagcttgccaaaggagaagaactgtgataatcatggaggatatgtatggatataaacaggatacattacttctttcaggcggcagagcttaaaaatttcacaaaggctgccgaaaactgcaatattgcgcagaccacaataagcaaatatatttcggtgcttgaagatgagcttggcacaaagctgtttgcaagagagggcagaaacgtaagtcttactcccgagggagagctgttttacagcggcatgaaaaaaatagagcagcagtacagggagctttgcaggcagattaaaggcatcggccagaaagagcttagaataggtatggtcacaagcgactatgccgattttgacatactccattcctttgaacaggagcaccctgagatttcagtatattactcttttgcaggggagaaaaaacttcttgcagaccttagagagcacaggcttgaggcagttataacgccggattttatcggtgagcagatgcaggcggcagatatggcatcgatcaggctgctgcagataaaagaaaccgttacctgttccagagagctgctggacagatacggcagtctggagcaggtcatagcaaacacacctatgataaccaaaacagataacgaggagcttcacagtttgtggaagtcacagtttcaaagactttacggcgcgaaatttcctgatgttattgcagttgacaacttcccgcagcagatgctgcttctcaatctctccagaggttttgcggtcataccgcagggcaggggcagcgcttatgaaaaccttgtatcgtttaatacggatgaagagcttgatgaggtagaggttatgctttatctcaaagactgcataacgccggctttgcgtacactgacagactatatctatgaaaaaaagtaattaatcaagcaaaaaaatccgtttcacaaatacggcgaaacctgttaaaatctgcacagtgacagagtagaggaggtattgctgtgcagataaatttaactgaaggaaatctattgaaagtgctggcaaaattctcggtgccgtttctggtatcaagttttttgcagaccttttacggccttgcggatttatttataacagggcagtttaacggagccgatgtaattacggcagtatctgtaggcagccagcttacccatatgcttacggttataattgtagggcttacaatgggatctactgtttttataggcaaggctgtcggagaaaaggataaagagcgccttgaatttggtataggaaatattataatactgtttgcgggctttgcagttatagcgacagcggtcctgcttatttttacagacggtatagtagctatgctggaaactccggcagaagcggagcttcagacaaaatactaccttgcaatatgctttgcaggagttccgtttatagtggcatacaacgttatagccagcatattcagaggacttggcgattccagaagtcctatgtacttcgttataatcgcaggaataatcaatatattgcttgacgttctgtttataggacctatggatatgaaagcagcaggcgcagcgctggctacaataatcgctcaggcaataagcgttctggcgggagttatatcccttgcgcgcaaaaacagaggttttaatctgcgcagagataatttcagattaaaccgcagagtattttcggatgtaattaaagtgggagtgccggtatcacttcaggacgggctgatacaggtatctttcctcgttataactataattgccaacagcagaggtgttatgaccgccgctgcggtaggcatagttgaaaaaataatatcgtttctgtttctggtaccgtctgcaatgctttcgtctatatcggctattgtagcgcagaatgcaggcgcgggcaagcatcagagaagcagactgtcgcttcggtacggcataaccataacggtagtgtttggactttttgcggcaggtatgtgccagattttttcagagcagattgtggcgctgttctcatctgcggagccgcaggtgattacgctgggaggacagtacctgagagcctatgccttagactgcatctttgcgggagtgcatttctgcttcagcggatatttctgcgcatataacaaggcaatatattcgtttatacataatatagtttcgataatgcttatcagaataccggggacatatatagcatcagtgatgtttccagatacgctttatcctatgggacttgcagctccggcaggatcgctcctgtcagttgtaatatgtacggctctctacattctgatgcagaagaaacaggcaggtaacaatactttgtaatggagataaaatgaaagctgaaaaaattataaggataataattttaataatacttgcggcggcgctggttataagcgggtttaagctcataaccacactgagcagactttccggtgaaaaaaaccagatagagaaactggcagaggaaacagagcgaggtgaaaacctgtttgaaaaaaacagcgatatgatatgctggcttgatattgaggggacagaaataagctatccggttatgtacactccggatgaccctgagtattatcttcatcgcgattttgacggagagtattcctacagcggtatgccgtttttagacagcagatgcgatatagataaatcctcaaaccttataatctacggacataatatgaaaaacagcaccatgttcagccggcttttaaactatgaggactatgatttctggaaagaacacagatatatagatattaagacaaaagacggtgaaaggaaatatgaaataatagcggcctacagaactgagatacaggaaaagggcagcagcgctttcagatactacagctttaccgacacggacaaggcatcggagtatgacgaatacctgcaaggcatcaaaaaacttgccctgtatgatacagggctttcggcagagtacggaactcagcttatgacgctttccacctgcagctatcatacggataacggcagatttgcggttactgcaatgagaattgaataggcgcgctgcgcagttaacggtaataatcggatattaaagacagaggatttatcagttgtgatgaattatctgtcttttgttgaacatattcccaaaaacttaatttaaccttaaattacctttaaatgcttgactaattgacgaccgtatggtattatagtagactgccacgcaatgtagttgcactgcgatttgttgaatatataaggagtgatgaatatgccaaagccagttaaattaggtagaaaagagcgtatgactttttcaaagattgatcaagttgcgcagatgccgaatctgatccagatacagactgagtcgtataattggttcattgaggaaggcctaaaagaagtgtttgaagacatatcgcctatccaggactatgcgggtaatctcgcgctggagtttatcgattattctttaaacgaccctccaaagtatgagcaggaagaatgtaaggagagagatgtgacatacgcagctcctcttaaagttcgcgtaagactaatcaacaaggaaaccggagaggttaaggagcaggaagttttcatgggagatttccctcttatgaccgaaaaaggtacatttatatataatggtgctgagagagtagttgttacacagctggttcgttctccgggaccatattacagcatggaaatagacaagtccaacaacaagctgttttcagcgcagattattccgaacagaggcgcatggctggagtacgaaacagactcaaatgaagtaatttcagtaagagttgaccgtacaagaaagcagcctgtaacaactctgctcagagcgctgggcttcggtacaaatcaggagataattgatatcttcggcgaagatacaagactgatgaagaccctcgaaaaagacgctacagacaactttgaagacggacttaaggaaatatacaaaaaactcagaccgggcgagcctccgacagtagacagcgctcagcagcttctcaatgcccttttctttgatgccaagagatatgatcttgccaaggtgggcagatacaagtacaacaaaaaactcgcaataagcacaagacttgcgggaactgttgcagctgaggacgttatcgaccctaacacaggcgagataatcatcgaggcaggcggcagaattgacagagacacagccctcgttatagagaacgcaggcgtcaaagtcgtaaacatatacggcgtaggtgttggcaacgaagacgaaatcacaagagtaataggcaacaactttgtagacattaaaacatatatagaatttgatctttcggatacaagagtagaacagacagtatactaccctgtattaaaagaaatacttgccgaaaaccagacagaagaagagattaaagaagcgcttgcagcaagaagaaacgacctgtcacctaagcatatcataatagatgacattatcgcttctgtaagctacattctcaacctgagattcggcatcggcagcacagatgacatagaccatctgggcaacagaagactgaggactgtaggagagcttctccagaaccagttcagaatcggtcttgcaagaatggaaagagtagtcaaggaaagaatgacaactcaggatatagaggcaacaactccacaggctcttatgaatataagaccggtaactgcagcggttaaagagttcttcggaagctcccagctttcacagttcatggaccagacaaaccctcttgcagagctgactcacaagagaagactgtcagcactgggacctggcggactttcaagagagagagcgggcttcgacgtaagagacgtacacgactcacattacggaagaatgtgccctatagaaacacctgaaggtcctaacatcggacttataggttcacttgcaacctacggcatcatcaacaaatacggatttatcgaaactccgtacagaatagttgacaaggagaagggtatcgtaacagacgaaatcagataccttacggcagatgaagaagaaaccctcatcattgcacaggccaacgagcctctggattcagaaggaagatttgtaaacagaaaagttgcgggacgtggtctcggcggcgaaattgacctttatgacagagacaaagttgactatatggacgtatcacctagacaggtagtatcagtagcgacagctatgatacctttcctcgaaaacgatgacgccaaccgtgcgctgatgggctcaaacatgcagagacaggcagtgccgctgctggtgacagaagcacctagagtaggtacaggtatggaatacagagcagctaaggactcaggcgttgttaccgttgcaaagcattcaggaacagtagagttcgtagatgcggacagaatagtggtgctcagagatgacggaacaggcagcgacgaatacaagctgctcaagttcaagagatcaaaccagggtacatgcgtcaaccagagaagcatcgtgttccacggagagcacgttgaggagggcgaagttcttgcagatggaccttcaaccgaaaacggtgaggttgcactgggcaagaacctgctcataggcttcatgacatgggagggctacaactacgaggatgctatcatccttaatgagcgcctcataatggaagacgtactgacttcacttcacatcgaaaaatacgaatcacaggcaagagataccaagcttggacctgaagaaatcacaagagacatacctaatgtcggcgaggacgcactcaaagaccttgacgaagacggtatcatcagaatcggtgctgaggttaaggcaggcgatatacttgtaggtaaggttactcctaagggagaaacagagctttcggcagaagaaagacttttaagagcaatcttcggcgaaaaggcaagagaagtaagagatacttcactgagagttcctcacggtgaagcaggtataattgtagatgttaagatattctcaagagaaaacggcgacgagctgcctcctggcgtaaacaaactggtaagatgctatatcgcaaccaagagaaaaatccaggtcggcgacaagatggccggaagacacggaaacaagggtgttatctcaagaatacttcctgaagaggatatgccattccttgaggacggaactccgcttcaggtaatgcttaaccctctgggcgtaccgtcacgaatgaacgttggacaggtgcttgaagtgcatctgggacttgcggcaaagagcaaagactggtatatttcaacaccggtatttgatggtgcaaccgaaaaagacataatcgagcttctggacgaatgcggctactccaagacaggcaagctgcagcttcgtgacggaagatcgggacttccgtttgataatcctgtaacagtaggatacatgtacatgctgaagctccatcaccttgttgacgacaaaattcacgcaagaagtacaggcccttactcacttgttacacagcagcctctgggcggtaaagctcagttcggcggacagcgtttcggtgagatggaagtatgggcgcttgaagcttacggcgctgcatatacacttcaggaaatactgacagtaaaatccgacgatatcgttggtcgtgtcaagacttacgaagctatagtcaagggtgagaatattcctgaaccgggtattcctgaatccttcaaggttcttattaaagaaatgcagagcttaggtcttgatgtcaaggttctttcagagaacaacgaggaagttgaaatcaaagatgcttcggaatatgacggaactgcggacattgacggcgtaatcgacgttgaagccgacagagctgcagaggacgaactcaaggagggtttcacagaggaaacacctgatgaagaggacgacttcgaagacaactttgattttgaagatgattctgatgaaaagctataggaaaggggaggtacttcaatgagtgaaaatacaaacaacagctatgagctgaacaattttgaatcactgcaggtaggtctcgcatctacagaaaagattctgagctggtcacatggtgaagtaaccaagcctgaaactatcaactacagaactcttaagccggaaaaagacggacttttctgcgagaagattttcggacctatgaaggactgggaatgtcattgcggtaaatacaagagaataagatacaagggaattgtatgcgaccgctgcggcgtagaggttacaaaggcaaaggtaagaagagaaagaatgggacacatcgagcttgcggctcccgtgtcacatatctggtacttcaagggcataccgtcaagaatgggacttattcttgatatgtcaccgagaaaccttgaaaaaatcctgtactttgcagcatatatagtaactgatccgggagatacaggccttggctacaaggaaattctttccgagaaccagtacagagaagcaagagaaaaatacgcggacggcttcaaagccgctatgggcgcagaggcagtaaaggaactgctctgccagatagaccttgacgcgctttcagaggatttaagagagaagcttaaaggagcaacaggtcagaaaaaaatcagaatcgtaagaagacttgaggttgttgaagcattaagactttcaaacaacaagcctgagtggatgataatggacgttatccctgttatccctcctgatttaagacctatggtacagctggatggaggcagatttgcaacatctgaccttaacgacctgtacagaagagttataaacagaaacaacagattaaagagactgctggagcttggagcgcctgatattatcgtaagaaacgaaaaaagaatgctccaggaatcagtagacgcccttatagacaacggcagaagaggcagacctgtaacaggtccgggatcaagaccgctcaaatccctttcggatatgctcaaaggtaagcagggaagattcagacagaacctgctgggcaagcgtgttgactactcaggccgttcggtaatcgtagtaggaccggaactgagattttatcagtgcggacttcctaaaaaaatggctcttgaactgtttaagccgttcattatgaaaagactcgtagaggacggtcaggctcacaacatcaagagtgccaagagaatggtcgaaaaggtaagaacagaagtatgggacgtacttgaagacgttatcaaggaacaccctgtaatgctcaatcgtgcgccgaccctgcacagactgggtatacaggcattcgagcctgtacttgtagagggtaaggctatcaagcttcatccgctggtttgtactgcattcaatgcagactttgacggcgaccagatggcggtacacgtacctctttcagtagaggcgcaggcggaagcgagatttctgatgctgtcagtaaacaacatactggctccaaaggacggttcccctataacaactcctacacaggatatgatactcggttcatactatctgactcaccccggtgttgaagaaagaaacactgcagcagagaaaggcgacggcaagatatttacggatatggacgaaatgctcatggcatatcagacaggtaccgtaggtatccacgcaagagtcaaagtcagaatgtacaaggacgaaaacgatacagagggcagaattatagagtctacagtaggaagatttatattcaaccagggaattcctcaggatttgggctttgtagacagaactacagatccgtactcacttgaggttgacttcctctgcgacaagaaaaagctcggaaagattatcgacaagtgctacagagcgcacggaaatacaggaacagtcctgatgcttgactacatcaaggatacaggtttccactattcaaccaaggcagctataacaatcagtatttccgacatggaaatacctgaagaaaaagaatcaatcattcaggctgctgagcatcaggttgaaaaatacgaaaacgcttacagaaaaggttttgcatcaagagaagaatgtgacgaaaagatcatcaagatatggcataagacaacagacgacgttgccgatgctcttatggactcgctgggaacattaaacaacctgttcataatggcacactcgggagcaagaggtagtaaaaaccagatcagacagataggcggtatgagaggacttatggccaaggccaacggtgaaactgtaagaattcctatcaaggccaacttcagagagggtctgtcggtactggattacttcatatcaacaaacggcgccagaaagggtctggccgatacagcgcttcgaacagccgactccggttatctgacaagaagacttgtagacgtatcccacaacatcattatcagagagcaggactgcggcaccgatgagggtatcgaagtaagagctttcagagatgacaaggaagaaatcgaaagcctcaagctgagaattataggcagaaccgctcttacagacgtatgcgatcctaagaccggcgagatcatagttgagcagaatgaagagattacagaagaaaatgctgaaagaatagaagaagccggcatagaatctgtagccatcagatcaattatgacatgccacagcagaacaggcctttgcgctaagtgctacggcaggaacctggcaacgggagaaagcgtaaacatcggagaggctgtaggtataactgcggcacagtccatcggtgaaccgggtacacagcttacaatgagaacattccatacaggcggtgtagcaggaagcgacatcactcagggtcttccaagagtcgtagaacttttcgaagcaagaaagcctaagggaattgcggaaatctgcgaagctgacggtactgttgtttcaatcgaaagaaagggcagcaagagagaggttataatcagaggcgatgaggaaagagcatacacagttccttacggagctatcctcaaagtaaaagagggcgactatatccttgcaggaagccctataaccaagggacctcttaatccgcatgatatactcagattaaacggtgcagagggcgtataccagtatctgctcaaggaagtgcagagagtatacaaaaaccagggtgtagatatcaacgacaagcacgttgaggtaatcgtaaaccagatgctttcaaagttcaaaatcgatgaatcaggagacacagacctgcttccgggcggactttacagcaaatttgaaatagaagaagctaatcagaaagctattgaagagggcggagagcctgcaaaggctgacagagtgctgctgggtatcaccaaggcgtcacttgcaacaaactccttcctgtcagcggcatcattccaggaaactacaagagttctgacagatgcggctatcaagggcaagaacgacaagcttcagggacttaaagaaaacgttataatcggtaagcttattcctgccggtacaggaatgaagagatacagaaacatcgagctggactacggtgtaaatcaggaacttatggaagcctatgaggctgcacagtatgctgcgcagtttgaagaagaggtcgaagacgagcagcctgaggacatcatggagccggcagaggatatgtttgaagaagtggaagacgaaagcttcttcgaaatgcctgatatcattgaatttgaagacgaagaaaactagaattcaattgacacagacggcacatatgtgataaaataatcgttggctttggttttgtgcgccttaaattaaggacggccggggccagcgataactgtgtttttaaacccttgcggtttaaaatagataattaattgcaaacgattttcccgattagagaaatcgccagcaagacgaggaaaggagaaacaaatgcctactattaatcaattagtacgtcagggtagaacaagcagcgagaaaaagtcaactgcaccggctcttttaaagggaatgaactcaatcaagagagttgctactgacggcaattcacctcagaaaagaggagtttgcacatcagtaaagacagttactcctaagaagcctaattcagctcttagaaaagttgccagagttcgtcttactaacggtattgaagtaacagcatacattcctggtataggtcacaaccttcaggagcacagtgttgtacttatcagaggcggaagagttaaagaccttccaggtgtaagataccacatcgtaagaggtactcttgatgctgcaggtgttgcagacagaaaacaggctcgttcaaaatacggcgctaaaaaacctaaaaagaaataggatttaatcgggaaattatgccaagatataatctgacattaacggcctgaaaccgccattcgcacgggagtagaggtcgagtaccgaacccagtgctttcggcagttccaaagactgtccgggagagtaacttccgcttaaatctgcctgagaagaatatctttggagtattgggcagttatagcagaatgcgaagaatatgagttagcccgttcaatacgggcggaagggaagaaaaaatgccaagaaaaggaaacgttcctaaaagggaagtacttccagatccggtatacggcagtgttgttgtagctaagcttatcaacagcattatgcttgacggtaagaaaggtgttgctcagcagatcgtttacagcgcgtttgacaaagtaaaagaaactactggcgaagaaccactggaagtttttgaaaaagcaatgaacaacattatgccggttctcgaagtaaaagcaagaagagtcggcggtgctaactatcaggtacctatggaagtaagacctgaaagaagacagacattaggattaagatggcttactaaatacacaagacttagaggcgaaaagacaatgtctgacagattagctaaggaaattatggatgctgctaacgaaacaggcgcatcagtaaagaaaaaagaagacacacacaagatggcagaagcaaacaaggctttcgctcactacagattttaatgttgatgtgttcagtaaattttttgattttagcgaaaggaggctatacacatggctagaagttttccactggaaaaaactagaaatatcggtataatggcgcacattgatgccggaaaaaccaccacaactgaaagaatacttttctatacaggcagaactcacaagctaggtgaaacccacgagggtgctgctaccatggactggatggagcaggagcaggaacgtggtattacgataacctctgcagctactacagcacaatggaagggcaatagaataaatataatcgatactccgggtcacgttgacttcacagttgaggttgagagatcactcagagtattagatggagccgtaacagtgctttgcgcaaagggcggggttgagcctcagtccgaaactgtatggcgtcaggccgaaaagtatggcgtaccaagaatgatattcgtaaacaaaatggatattatgggcgcggatttctacagagttgtaggtatggttaaggacagattaaaagcaaatgctgttcctatccagcttccgatcggttcagaagaaaccttcataggtatcattgacctgattaatatggcagccgaaatctacaaagatgaccttggaaaagaatacgaaaaggcagagattcctgaagacctaaagaaaatttcacaggaatggcgtgacaagctgctggaagctgttgcagaaggcagtgaagagcttatgatgaaataccttgagggtgaagagtttacaactaaggaaatcaaagacaccataagaaaaatgactatagcaggagaaatggttcctgtaacctgcggttccgcttacagaaacaagggagttcagcttatgctggacgcggttgtcgactttatgccgtcaccgcttgacatacctcctatcaaaggtattatccccggcagagatgaagaagcggaaagacctgcagatgataatggtccttttgcagcacttgcgtttaagattatggctgatccatttgtcggaaagcttgctttcttcagagtttattccggaactttaaaatcaggttcctatgtatataactccactaagggcaaaaaagaaagaatcggaagaattcttcagatgcatgccaataagagagaggaaatcgacgaagtatattcaggcgatatcgctgctgcggtaggtcttaaagacactactactggtgatacactttgcgatgagaagaaagaaataattcttgaatctatggaattccctgatcctgtaatagaaatagctatcgagcctaagactaaggcaggacaggaaaaaatgggtatagcgctggctaagctggcagaagaagaccctacattcaaaacttatacgaacgaagatacaggtcagacaattatagcaggtatgggagaactccaccttgaaataatcgttgacagacttctccgcgagttcaaggttgaagcaaatgtaggtaagcctcaggtttcatacaaggaaactgttacaggcactgcggatgttgaccacaagtatgctaagcagagcggtggtcacggtcagtacggtcacgttaagattaagctcagccctacagagccgggtgaaggatttaagttcaccaactcaattgtcggcggagctattcctaaggaatacattcctaagattgaagacggaattaaagaagctatggaatcaggtcctatagcaggatatcaggttgtcgatgtggctgttgagctgtatgatggttcatatcacgaagttgactcatcagaaatggcattcaagattgctgcatcaatggcgttcagagaagctgccaagaaagcaaatcctgtactgcttgagcctgtattcaaggtagaggttacagttcctgaagaatatatgggagatgtaatcggtgatatcagttcaagacgaggcagaattgagggttctgacatgaacaacggagcagttgctgtcagaggatttgtacctctttcagaaatgttcggttatgcaacagacctgcgttcaaagactcagggtcgaggcgtatatgtaatgcagttcgaccactttgaaaaactgcctgacaaccttatagagaaaattaacaaatagatgttaaggtaacaaaaaggagaaataaaatggcaaaagctaaatttgaaagaacaaaaccgcatattaatatcggaacgatcggtcacgtagaccacggtaagacaactttaacagcagctatcacaatcactcttcagaagagatacggattaggtgaagtagtagcattcgaccagatcgacaaagcacctgaagaaaaagaaagaggaatcacaatttcaacagcacacgttgaatatgaaacaccgaacagacactatgcacacgttgactgcccgggtcacgcagactatgtaaagaacatgattacaggagctgcacagatggacggagcaatcctcgtagtagcagcaacagacggaccaatgcctcagacaagagagcacatcctgttatcaagacaggtaggcgtaccatacatcatcgtattcttaaacaagtgtgatatggtagacgacgaagagcttcttgacttagtagaaatggaagtaagagaacttcttgacgaatatgacttccctggcgatgacacaccaatcatcagaggatcagcattaatggcattagaagatccggacggaccttggggagacaagattatcgaattattcgaagcagtagactcatacattccagaacctgaaagagacaacgacaagccgttcatcatgcctgtagaggacgtattctcaatcacaggaagaggaacagtagcaacaggaagagtagaaagaggcgtactgaaagtaggagatgaagtagaaatcatcggacttacagaagagagaagaaaagtagtagtaacaggcgtagagatgttcagaaaactgttagacgaagcagaaacaggagataacatcggagcactgttaagaggcgtacagagaacagaaatcgaaagaggacaggtacttgcagcgccgggaacaatcaatccacatacaaagttcaagggcgaagtatacgtattaaagaaggaagaaggcggaagacacacaccattcttcaacggatacagaccgcagttctatttcagaacaacagacgtaacaggcgaccttcagttacctgagggaacagagatgtgtatgcctggagataacattacaatgacaattacactgatcacaccaatcgcaatcgaagaaggattaagatttgcgatcagagaaggcggaagaacagtaggttcaggcgttgtaactgagattatcgaataat

SEQ ID NO: 736 - DNA, 26020 bp, Unknown
  16S sequences of unknown bacteria
gggggatgcttatgtcagtgggagttgaaagctcccactgacaggtcgcgaagcgactgcgttcatgagcaagtagcgaagcggattgcgaatgtccgctttaccgtagatcgcgaagctaggccctgtcagcacacctgcagggatggattgcgaatgtccgactaaggaaaggagaaaccatgcagctttacggatacgatgagaatgatctgcagctggaagcggagaaccgcatccgaaacctgatgtggacggtgagcggggattatgcgctggatacaaaggtagagtccgcattttatacgaaatccagatatgtctgcctctacgatgctgcgaagcagggcgcgtttgcacgctattatgatgtgagcatgctcagtatgtacctgatcaaaaaagcgtactatggtgcggatgaacaacgcctggtggagctggcgcagctgtgcgtggatgcggcctcctatccgctggcagtaaaggagcggcccgggatatcagagctgcggcgcagagcctttgaggatctgctggaatattcctttgaaaaaatgagttcgagtcttttggggcggttgaagattgcgctgctgcgaggctgcctggatgataactggtattgtgaaaagctgcttgcaaacgcagtggcaaaaatccgggcgctggagcatacgacagatacaatggatctgattcgcgtcacagatgagctatataatacactgattgaccggagttttttacagaagcacggggatctggcatttgtactggataccacaccggaggaactgctggagtcggattggcgggagtacctggaggaggaaagcctggaggatttcctggaggaatatatgaaacgcctgaacagccgcgtcgttcatctcgaggatgagcaggaggaagaggaacaggcacagcgtggaaatggacggaaggtcatcataatcgatgaaaaggccgccgcaaagatgtactcctacatagagctgaactacggaaaatcttacttatcagagccggagcagaagcgggtgaacctgcggctgtgcagaggggcgcatgcagactgcagtctgtattttaccgatggtattctggcaaatccggtacgcagcaatgcgcagtatgtgaatgcgagacgtcacgcagaaaagaaccgtgtcctttaccgcaacaataaaaacatgctgaaccgcagtattgagcacctaagtgcagagctttcccaggctttgcgccggagacaggagccggaacagtcgctttcacagaccggaaagatccttccggcacgtctgtggcgcgtcggaaggatggaagatccggggaagctctttgagaagacacgaaagcgtttttcttcggagtttgtcgtggatatcctgatggatgcaagcggttctcagcgggaccggcagggacaggtagcgctgcaggcatatattatcagcgaagccttaagctgcaatcaggtgccgcatcggatcatgagcttttgcagcttctgggactatacagtgctgcagcgattccgggaatatgatgcgccccggtcggagaatcggaaaattctggactataccacatctgcaaacaatcgggacggacttgcgatcagggctgccggggatggactgctggctcgtccggaggaggggaaaattctgattgtcttaagcgacggtcggccgaatgatattattgtgaaccgtccgaacagccacaatccgcagccgtattacggggaatatgcggtgaaagatacggcctatgagatccggaagcttcgcagtcagggtgtgtatgtgctcggtgtctttgcaggacgggaaaaagatctggcagcggaaaagaaaattttcggacgggattttgcctatatccgggacattcagaatttttcgcgtgtgaccggccggtatttaaggcggctgctagaagagttgtagaaactcattgcttttatgtccgataagaaaaggaaaagtatgaaaaagcgcttgcatagaggcaggttttgatttagaataataaggatatgcagacacgacggacagaacagaagtaccgtcgtgttgttgcgtgcgcagatgggggaacgaacaaatgtgaccctctggactgtgcagcagttgaacaggaggtgtcaaaaatggcagaaagagagtgcagcaactcaagctgctcaaaggaaagctgcgaaggctgtgcaagcgcgaagcagaagcagagctttgcagccgagatgaatgtctattccgatgtaaagcatgtgatcggaatcgtcagtggaaagggaggcgtcggaaagtcgatggtgactgcatcactggcaaatgaactatcagcggcaggctatcgtgtcggcattatggatgcggacatcaccggcccgtcaattccgcggatgtacgggctgaccggcccggcgcaggcagatgacaacggaatccttccggtgctgacggacaatgagatcaaggtcatgtccatcaacctgctgatgccggatccggagtccccggtcatctggcgcggaccgattcttgcaaatatggtaaagcagttctggaccgatgtgatctggggcgagctggattacctgctcgtggacatgccgccgggaaccggtgacgttccgcttaccgtatttcagtcactgccgatcgacggtatcgtgattgtcacatccccgcaggaactggtacagatgatcgtcaagaaggcctacaatatggcaaaaatgatgaacatcccggtacttggcgtcgtagagaatttcagttatctgaaatgcccggattgcggaaaagaaattccggtattcggaaaaagtaaggtagatgcggcggcgaaggagcttggtcttgcggtaggcggcaagcttccgattgatccgtccctgacggagctttctgatgcgggagcatttgcaaatgcaagaaatccatatctggaggctgcagtctgtgcgcttcgcgtgctggatgtaaagcacgagacgcaggagtaagcaaattacgcgcagaattatttgtgcgtgcaatcacatgatgttggggataaaaagtgttttgcccccttgtatcatcacacagaaggagagagaaaatggagaaaaccacaggaaaaaagctgattctcggaattcagcatgttctggctatgttcggtgcgaccgtgctcgtaccggcactgaccggactgaacacatcgatcacactgatctgtgcgggtcttggtacactgctgtttcacctagtcacaaagagaaaggtaccggtattccttggatcaagctttgcatttatgggtggaattatggcggttatcggtaattccagagcaggcgatccggactttttggaaaagctggcagcgaccaagggcgctctgatcatagccggtcttgtctatgtagcatttgcactgattatcaagctggtcggatatgagaaggttaataaagtgcttccgccgatcgttaccggtccggtcatcatcgtcatcggactgcgcttaagttcctcagcgatcaacaatgcgttttacgtaaacggagagttcaatctcaaagcactgtttgttacagtctgcgtattggcaacggtcattgcaatctcaatttttgcaaaaggtatcttcaatctgatgccgattctgtttgcgattatcgttggttttattgtcagctatgcgatgggcttctgtgattttacaaccgttagggaggcacacttcttctccttcatggataagagcattcgcgatcagctgctctgcgcaccggtattccgggcagatgcgattcttgcgatcgcaccgatcgcacttgtcacgatggtagagcatgtcggcgatatcacgacgaatagcgccgtgaccggacagaactttatggtagatccgggcgtacaccgcacacttctcggtgatggcctggcaacggctttagcaggacttcttggcggaccggccaatacgacctatggtgagaacaccggcgtccttgcagttacaaagaattatgacccgtccattatccgtattgcagcagtctttgcgatcctgctcggtattttcggaaagatcggagcagtcatcacgagcatcccgagcccggtcatcggcggtatttccatcgtactgtacggaatgatctcttccgtcggtgtacgtattatcgtaaatgagcgtctgaacttcggtgacagccgcaacctgatgatcgcagctgtcatcctcgtactcggtatcggctgcgacagcattccggtatacggcaccgtaacgatctccggactggcactttccgcacttgtcggcatcgtactggcacagatcctgccggagagtgaagattcggtactgaagtaaaaacagcaattactgtaatcggaaaaagaacaaagattggaaaaagcgtatagcttgtataagaggaaattcagaggcaacactccaggtaaaggagggttgccttttatgttgaaaaaatatatgcgaagaaatgaaaaagaaatagggagttgtacctcaggcagaatggtggagaagccagaagtgcagatgcgatacaattggcacagatactttcagaaaatatggatgtttgcaggaatgctgattctttcatttctgatgcagttactgatctcttcggcacagcagtcgcggattcagcaggggatcgccggggaggtgctgcgttttcatgtgctcgcaaacagcgacagcggagaagatcaggcagtaaagctgcaggtgcgggatgcggtgcttgtgtggatggaagcggctctgaaagaaacacatctgcaggcggggttagaggaaggggcaacggccgaaaaggcgatagggccgcaggagagaaaagaggagctctggcatatggaaaatcagataaggatatccgggagcaatttaaggaaagaagaaactgcggaaaacggagaatggaaacgggaagaaatcctgcaattcctcaagagccatcttccggaaatcgaagccgtagccaaccagacgcttgtcggacagcatcagtcttaccgcgcgacagctgcgatcgagacggtatattttccggaacgtacctacggtacctgtacctttccggcgggctggtatgaggccttgcgcatccggctgggcgaggcaaagggacataactggtggtgcgtgctctatccacggctctgctttacagactgtctgcatgcggtggtggaagagggagagcagcaggagctaaaagaggttctgacggaggaagagtatgagacgctgctgcatgagccgggtcggtggaagatcggactgcgcatccttgagaactgatgcctgcgaatgttcgctttacaaatggaaaaacggctgcatatagaaaacaggaaagaggattctatatgtagccgttttatttatagcctgtaaaatttataagtccttaggagcagctttagttcgcattctttttccggatcatcgcacgctttcgcatggtcggatccagaatcttcttgcggatgcgcagactcttcggggtgacctcaagcagctcgtccgtatcgatgaactcgagagcctgctccagactcaggatcttcggcggtgtgagcttcagtgcttcgtcggaaccggaggaacgggtattggtcagatgcttggtcttgcagacattcagttcgatgtcctccggctttgcgctctggccgatgaccataccggaatataccttttcgcccggtccgatgaacagggcgccgcggtcctgtgcgttgaagaggccataagcaaccgcttcgccggattcaaatgcgatcagagatccctggctgcggtactgcaggtctcccttgtacgggccatagccgtcgaagactgcattcatgataccatttccctttgtatcagtcataaaatcgccacggtagccgatcagtccacgggacgggattgagaactccagacgggtgtagccgccctgacctgcgcccattccctgcagctcgcccttacgaaggctcagcttctggatgacggtgcctgcaaattcttccggaacgtcgacatatacgagctccatcggctcgagctttttgccacgctcgtcggtgtggtagatgacctctgccttgctgactgcgaactcgtagccctcgcggcgcatcgtctcaatcagaatggagagatgcagctcgccacgaccggataccttgaatgtatcggtgtcttccgtatcctcgacgcgcaggctgacatcggtattcagctcgcggaagagacgctcacgcagatggcgggaggtgacgaatttaccttcctgaccggcaagcgggctgtcattgacgatgaaattcatagagatcgtcggctcggagatcttctggaatggaatcggctccggagcgtcaactgcacagatcgtatctccgacatgcagatccgcgataccggaaatcgctacgatggaaccgacggtagcggactgtacatccaccttattcaggccgtcaaactcatagagcttgctgatttttactttatattttttggacggatcgtggtggtttacgacaaccacatcctggttgacggagacagtgccgcggtcgacctttccgacaccgatccggccgacatactcattgtagtcgatcgtgctgatcagcatctgcgtcgggccgttctcatcaccttccggagccgggatgtagtccagaattgtctcaaagagcggaaccatgttctttggctcatcattcaggttgcgggtcgcgtagccgccctttgcggaagcaaagatgaacgggcagtcgagctgctcgtcggaggcgtccagatcgatgaacagctccagtacctcgtcgatgacctcattcggacgtgcctccggacggtcgattttattgatacatacgatgaccggcagattcagctccagcgccttgcgcagcacaaatttggtctgcggcatagcgccctcaaatgcgtcgaccacaaggattacgccatttaccattttcaggacacgttctacctcgccgccgaaatctgcgtggcccggtgtgtcgatgatattgatttttgtatccttataaaatactgctgtatttttggaaagaatcgtgatacctcgttcgcgctccagatcattcgaatccatgacgcgctccgcgacctcctgattggcacggaaaacgccgctctgcttcagcagctcatcgaccagcgtcgtcttgccgtggtcgacatgcgcgataattgctatgtttcttacatcttctctcttcatatagcctgcactctctctttttcttcttattattataatccattgtctacatgcgtacccgatacagtttagcacaattttgcgagattacaagtagggattcgaaaaaaaactgcaaaaaaccgggcaaaaataggtataaaatactggatggccgaataagatggttaatataaaaaatacaagatacttcggatgaagaagggagaacaggggttatgacagataagattattgaaaacaatcaggtaaccatcatgggaaaaatcatctccggctttgtgttcagccatgaggtgtttggagagggcttctacatggtggatgtttccgtgcagcgactgagcgaatctacggataccattccggtaatgatttcggagcggctgattgatgttacgcaggactatcagggggaatacatacagatcttcggtcagtttcgttcgtacaaccggcatgaggagaagaaaaaccggctggtgctttccgtgtttgccagagagatcagctttgtggatggagagggtgataaagtaaagagcaaccagatttttctggacggctacatctgcaagacaccaatctaccgtcggacgccgcttggccgggaaatctcagatatgctgctggcggtgaaccggccatatggaaagtccgactacattccgtgcatctgctggggaagaaatgcgcgctttacttccggcttcgaggtcggaggccatgttcagatatggggccgcatccagagccgtgagtatgtcaaaaagctggacgatgacacgacggaaaaaagggtggcgtatgaagtatcggtgagcaagctggaatatgtcgactaacagttcagagcagcagatacccgctcttgcaatcatgctgtatgtgtagtaaaatagcaatcagaaaaccagaacactgccgattgttcatcggcagtgaatatacggttcgaggtgaaacatgagcagacgatatatacacatcttctgcggcgtcggcatgggaaagacgtcagcggcgctcggaaaaggcttccgggaggcgagcggcggtaagagtgtggtagtgatccgttttctgaaaaagaagcatacatgtgagagggaagaatttttcaaacagctggagccacagatccgcctcttccgatttgaaaagtttccgcagaattatgagagcctgacagagcaggagaaggaagaagaaaatctgaatataaaaaatggcctgaattttgcgcgtaaggtgatccagacagaggaatgcgatgtgctgattctcgacgagatactcggtctgacggatcgggggatcgtcacgatagatgagctgaagaagctgatcgaccagttaggcagcggaatggagctgtatctgaccgggacaagccggtgcgaggagctctggccgtatgtcgacgaggtgacagagatgaccacgccataccgcaggacatcggacagtcatttttgcgaggaagactgattgccgcggagatgactgcgaagcagcagccgtcgcgtgattggcagaacggatgagcggaatctccgccgcatatcgtgcaaggcggttgacaagcgaggaaggcagtgttatagtaaaaattaaacaggaacaatgatagaggttgcgcacttcatcagtacatggcaggatgtgttcaggcacaggcgaatgccgtgaaaaggggagagcgccgaaagattacagcacctgaagccgtattcttgggcataggctgaagaagcatatgactgtcatcggatttcgatggagggctatcttgaagaaatgaaatgagattctttgggactgcctccggacagtcctttttttaaccgaatcaagcaagtcccctgcttcaattgcgcaaagcaataagcataagctgcgaagctaggccctgttggcagagctgcagggatggattgcgaatgttttgcaggtcaataagtcatgaaatatcataaggaggataaatatgtcagtatttaagggcgcaggagtggcgatcgtcacaccgatgtacgacaatgaggaagtaaattatgacaaattaggtgagcttctggaggaacagattgcaagaggtacggatgcgatcatcatctgcggcacgaccggagaggcatccacactcacccacgaggagcatctggctgtgatcaaatatgcagtcgagaaggtcaatcaccgggttccggtcatcgcgggtacgggttctaatgcgacggatacagcgatttatctgtcgactgaggcagaaaaatacggtgcggatgcgctgctgctcgtgacaccatattacaataaggcgacacagaagggactgaagcttcatttctcaaagatcgcagagtctgtaaagcttccgatcatcctttacaatgtaccgagccgtaccggatgcaatcttcagccggagacaatcgtatggcttgcggagcatgtagaaaatattgtcggtgtcaaggaagcatccggaaatatttctcaggtggcaaagctgatgagccttgcaaagggaaacgtagagctctattccggaaacgatgaccagatcgttccggtcatggcgcttggcggcagcggtgtgatttccgtcctgtccaatgtggcgccggagctgtcacatgacatcgcgacgacctatctggagggcgatgtgaagaagagctgcgagctgcagctgcaggcgatcgaactgatcgatgcgctgttctgtgaggtgaatccgattccggtcaagacagccctgaatctgatgggtaaggaggtcggaccgctccgtgcaccgctttgcacgatggaggcggcaaatgaagagaagctgcgcaaggcacttgtaaacagcggcattgcagtaaaatagacgaaggaagacgaggaaaaagtatgacgaagattattttatgcggctgcagcggccatatggggcatgtggtgacggaaatagcggcagcggatgcggaagtagagattgtggcaggcattgatctgtcagagacgaaggatgcctcctatccggtatttgcgagtctgaaggactgcgatgtaaaggcagatgcgctgattgatttttcatccccgaaggcgctggacgcgatcctggcctattgcatggagaaaaatgttccggcggttctgtgtacgaccggttatacagatgcgcagatggagcagattcgtgaggcaggcaaaaaggtcgctgtaatgaaatccgcgaatatgtccctcggtgtaaatatgctgctgaagctgctgaaggaagcagcaaggacgctggctccggcaggctttgatatcgagattgtcgagaagcatcacaaccgcaaggtagatgcaccgagcggaacggcgcttgcgatggcagacagcatgaatgaggcactgggaaatgtatatacttatcagtatgaccgcagccagcgtagagagaagcgtgatccgcaggagatcggcatcagcgccgtacgcggaggcagcatcgtcggcgagcatgaggtgattttcgctggcatggatgagattgtggagttcaagcatacggcctactcccgcggcatttttgccaagggtgcggtacaggcagccaaattcatggcaggaaagccggccggtttttatgatatgagcgatgtgatagggtaaagcagtaaagaaaggctttgacaaatacaggcgtatccgctaaaatgttgtatcagaacaggtgcggatacgcctttctgggagtacatgtagagaaaagaatcggaggaacctcagggatgaaaaaagtagtaaaattcggcggaagctcgctcgcaagtgcagagcagtttcgcaaggtcagcgagatcattcatgcggataaggacagaagatatgtagtgccgtcggcgccggggaagcgcggatcgaaggatacgaaggtcacggacatgctctatgactgctacagtgcggccggtgatgccgaggcactcacgaaaaagatcgcggcgattcaggcgcgctatcaggagatcatcgacggacttgggctggagctctctttggaggaacagttcaaagagatccgggagcggttcgagcagcacgcgggcagtgattacgcagcatccagaggcgaatatctgaatggaatcgtacttgcggcttatctggaatacgacttcatcgatgcggcagaagtgatctgtttcgatgaggacggtgtatttgacgcagagaagaccgatgaaaagatgcgggcccgcctgggagagacagagcgtgcggtgattccgggcttctacggcgcaatgccggatggcagcatcaagaccttttccagaggcggctccgacatcaccggatcgatcgtggcgcgtgctgtgcatgcagatttgtatgagaactggaccgatgtttccggtttcctagtgaccgatccgcacatcgtacagaatccggagacgatcgagacgatcacgtaccgggagctgcgcgagctttcctatatgggagcgaccgtactgcatgcagatgcgatcttcccgcttcgcaaggaaggtattccgatcaacattaaaaatacaaaccgtccgcaggatccgggtactctgatcgtggagagcacctgccgccagccgcggtttacgattaccggaattgcgggtaagaagggcttctgtgcgatcaatatcgaaaaagatcagatgaactccgagatcggttttggaagaaaggtgctgcaggtatttgaggagaacggcatttcctttgagcatgtgccgtccggaatcgatacgtttaccgttatcgttcatcagtctgagttcatggagaaggagcagaatgtgatctccggaattcaccgtgccgtacagccggatacgcttgatcttgaatccgggctggctctgatcgcagtcgtaggacgtggcatgcgggcgaaccgtggtactgcaggacgtatttttgcagcgctgtctcacgcgcggattaatgtcaagatgatcgaccagggatccagtgagctgaatattatcatcggtgtccgcaatgaagactttgaaaatgcagtccgcgcgatctatgacatttttgtacagacacagctgtagggagaggctgtaaccggaggatgaaaatggacggatcagaagaaatacaggcatttgcatatgaaagaaagggaaacagcgcagtcatccggcgctgtttttctcgtgatacgaaagcggtggtgccggggatgatcgacgggctaccggtcacagagctggcgccgtatgcgttttctgcacatatggaccagcagctgctcgaacaggagctggcagcagggaggcttcagcttggccggtcgatgctcgtgccggaggaggatgaggtactgacgtcgcaccagcgctatcagaggctgcggcaggcgcagatcccggcgctttgcggagaacagctggaggagctggaactgcctgggagcattgtgcgggtcggaagatactgcctttacaactgcgatcatctgcggaagctgacgtttaccggacagcttgcagactggggaaccggtgtgtttaccggttgtcatcacatctgcgaggtagtacttacaaccgatgcgtccgggacttcgactttgaaggatatgctcgatgaggtgcatgaggcgcttcatgtccggtggaacgatacatcacagcagatagcagaactaatgtatccggagttctatgaggagggtgtggaaaacaccccggcacggattctggagacgcatgtgcacggctccgggatgcgttatcggaactgctttgaggggcggagaattgattttactcagtatgaccggctgtttccgtatgcggtggcgcaggagccggagcgtctgctggtgcggcttgtctgtggacggctgcggtttccacacgccctcggcaggcaggccagggagcagtatgagacatatctgcgcgaaaatccacagctgtttgcagcatattttaccgagcttcgggatatggacggcattcgctggtactgcgaaggtccgggctttgggcatgagcctgcagttctggcctttttggatgctctgacagagcaggccgggcgtgccggctttgccgaagcgcttgggtatgcgatggagtaccggcatgtgcatgggaagaagccggaagtgaagagaagatttgagctataaagaggaagatcataatggttcggaaagaaaagaggttgttacatgaatccaatatatgcaagcgatgagcagcagctcgactttatcgggatcggaatggaaattctgcgggtggcgcgcaatgagctctatctgaatatgcggtttctggatgtggcactttcctctttacagtttgtgccggacgggcagatccgtccggtcggcacggatggggtgcatttgtattttcagccggatgcgcttgccgagctcttccgtaccggaagagtgcgggtggcgcgggcctatctgcacagcctgctgcactgcctctttgggcatctgtggatccggaaggagcgggatgagcagtactggaatctggcctgtgacatcgcggtggaatacgtgatcgacgggctgcagctgcgggctgtgcatgtgccaaagacgatgctgcggcgggagtattaccggaagctgaaggaggcaggaggaaccgtgacggcacaaaaggtgtaccgggagctttgcctggagcatccgcagacgatgcgctttgagcagctcgtacgggaattccgggtcgatgaccacagccactgggaagaggaatcacagaagaacccgaacatgccgcagccgcagaagcagcgatgggatgatatcagagaccggatgcagacggagatcgagacattttccaaagaagcggcggatgatgtgcgaagcctggaggaggagatcgcggccgagagccggcagcgctatgactatcgggagtttttacggaagttctgtgtgctgaaggaggaaatgcaggtcgacctggattcctttgactatattttttacaattatggaatggagctctatggcaacatgccgctgatcgagccgcttgagacgaaggagcagcagaaaatcgaggattttgttattgtggtcgatacctcgatgtcgtgcaagggcgagctgatcaaaggctttctggagcagacgtgtgcaattttgcaggagtcggagagctttttcaggcggctgcacatccatatcattcagtgtgatgacaaggtacaggaagatgttgtgatccgcagtaaaaaggaatttgatgattacatgcggcattttacggtcagaggttttggcggtaccgattttcggccggcattcgcctatgtgcaggagctgctggcgagaaaggcatttacgcggctgcgtggactcatttattttacagatggttatgggacatttccggtaaagaagccgccgtatgagacggcatttgtctttctgaaggaggactaccgggatgtggatgtgccgccgtgggcgatcaagctgatcctggaggaagaggatctggagaggagacaagaggatgaatattaagcgtgcaaagcaggagattaaggatgcgatcgaggcatatcttttgaaggatgaatacggggcttatgtgattccgcagatccggcagcggccggtgctgctgctcggcgcgccgggtattggcaagacgcagatcatggagcagatcgcaaaggagtgcggcatcgggctcgtggcctatacgatcacgcaccatacgaggcagagtgcgatcggtctgccgtttatctcgaagcatgagtacggcggaaaggaatacgccgtcacggaatatacgatgagcgagattgtcgcgtcgatctataataaaatggagcagaccggactttcggagggcattctctttatcgatgagatcaactgcgtgtctgagacgctcgctccggcaatgctgcagtttctgcagtgcaagatgttcggaaatcatgcgattccgcagggctgggtgatcgtggcagcaggaaatccgccggagtataataaatctgtccgggagttcgatgtcgtcacgatggaccgtgtgaaaaaaatagaggtggagccggacttcgcagtatggaaggaatatgcggtacagaatcagctgcatccggcagtcattgcctatctgacgacgcggacgacgaatttttaccggatggagacgacggtcgacggcagaaaatttgccacaccgcgtggctgggaggatctctcgcagatgctttatgtctatgagcagctgcaaaaaaatatggatcgggatgtggtcgtgcagtatattcagcatgaaaagatcgccaaagattttgcaaactatctggagctgtattataaatatcagatggattatcagctggatgcggtgctgcagggcaagatcgatccgctgcttctgaaaaaagcaggaaatgcgtcgtttgatgaacggttgagcgtgctcagtctgctgctggctaggtgcagaagagcatttgcagcgatatttcagaaacgggcggagctggagctgctctttggcgagctgaagaagctgcgtatgcagctgcttgagggggaggcagtgacagagccgcagcgcagggtacaggcggcagtggaagcatttgccggggaatatgaggcaaagcatcgtgcggagcttctgacccgtcgtgaggatcatatttatcgggcggtgcaaaagacactggagcattatgccagccgactgtttgctttggatgaaagagaggcagcgacggcagagggagcgtttgcctgtattcgcagctggttcaatgaggcacaggatgcgctggatgcgaaggagacggaggcgcttgccatgctggagcatgcctttgattttgtggaagaagcctatggcggcggacaggagatggtcatttttatcaccgagctgaacagcgattattatagtgtgaaattcctcggagagcatgagtgcgagcgctattaccggtataataagcagctgctgctggatgatgcgagccggagtattgaggagcggctgcggcagatgggaagataaatgataaaagcttccggtctattggtagagccgtgggcctgtgcggataacaataaatgaatagcatgacgaaaaataacaacccctgggaatatcagatcaaacattcccaggggttgcatatatagaaaatcagaacttactcaattaccttgatccagccctttggagcctcaatgcggcccatctggatgccggtcagtgtctcatacagcttcttcgtgatcggtcccatctcggtcatgccgctcgggaagcagatctcattgccatgatccacgatcttgccgaccggagagatgacagctgcggtaccgcaaaggccacactctgcgaaatcctttacctcatcgaagtaaacctcgcgctcctcgacatccagtccgaggtaatcctttgctacgacgagcagagaacgacgggtgatggacggcaggatgctgttggacttcggggtaacgaccttattgtcctttgtgacgaacaggaagttcgctccgccggtctcctcgaccttcgttctggtcgctgcgtcgaggtacatattttcatcatagccctgacggtgcgcatccatgatcgcgtacaggctcatcgcatagttcaggccggccttgatgtgaccggtgccatgaggtgctgcgcggtcgtagtcgcagacacggatcgtgatcggctttacgccgcctttgaagtatgggcctaccggagtgacaaatacacggaactggtactcattcgccggctttacaccgatgactgcgtcgcttccgaacatgtacggacggatgtagagcgtagcgcctgatccgtaaggcggcacatatgcttcatttgcctttacggtatcaacgaccgcctgtacaaaacggtcctccgggaataccggcatctcaagtctttcacaggagctcaccatacgggcagcgttcaggtccgggcggaaggtaacgatacggccgtcctcggtcgtgtacgccttcattccctcgaagcaggtctgtgcatactgcaggacgcctgcacactcggaaatggtaacagtagcatcagaggtcagagtgccctcatcccatgcgccgttcttgtaatttgaaacaaaacgcttgtctgtcgggatatagccgaatccgatgttagaccagtcaatattctttttttccataataaacactcctttttttacaattatgcttagtttacgccccgttttaccgtgtgtcaagcggaaaaaggagattcgtgaaggaaagtaaatccgtgtcggccggtcatatgctgtcggggaacgggcatgcggatattcatgagtcggacggatcggtgcgggacacaggccgtgcaaggtgtgagccgcgcatgatggcatcttttccgaaccgctgccggatctgatccatcgccgcatcgagctttcgctgcttgtccagatccggcttttttgcagggaggtcaaaggaagacgagacatctgacggagagacgttggcaagcgaaaagttcagatcgaacaaggagagctggatcggatcctgctccgattgcagacggcttgtgcgtacgccgagcagccggatcggactgccgttccacagggcgttaaacagctgacaggcacagtcgtagagtgcatcggtcgtcgcgatcggtgagagggtctgcatctggcgggaagcagtgtgaaagtcactgtatttcacttcaaccgtgaccgtggaggcgagctgtccggccttgcgcagccgtgcggcgacctcttcggagagggagagcaggacttcaaatgcttctgaccgggtggtgacatcgcttgcgagcgtcgtggaattcccgatgcatttagcctttgtggtatccgagtgtacagcggaatgatcgatgccgtttgcgtactcccacatgagaatgccgtggcttttgaaatgcgtctgaagaaaagcacggtccgagtgcgccagctctccgatcgtatggatgccgagctcctccagacgggaagcactctttcgtccgaccataaagagctcgtggaccgagagcggccacattttgaccggaatctcatcccggtagagcgtgtgtacgcgatccggcttttcaaaatcactcgccatctttgcgagcagcttgttctctgcgatgccgacgttgacggtaaagccaagggtattccgcacctcatctgcgatctgacgtgctgctgcctccggggaaggaaaacggtagctgatcggtgtgtagaaaaggtagcattcgtcgatcgatacctgctcaatgtcagaggtgtaggtgtgcaaaagtgtcatcagttcccgactgcgtgtacggtaaagtgcatgatccggaggaaccagcgtaagaaacggacatttccgaagggcggtcgcgaccggttcgccagtatggataccatagcgcttggcgggaatggacttggcgaggacgacaccgtgccgctgcttttcatcgccaccgatgatggacgggatcgtgcgcagatccacagatgcaggatcctcttgcagtcgcctggaggcagtccagcttaaaaaggcggaattgacgtcgatgtggaaaatgatagacataggcgttcctcctgttttcagaatccgaatgtatgtttgtacttagtatagcaccggagaaaggagaaggcaagggcgggagagggggaatgcttatctgcggtaaaaatatcccctttgacagccgggaaaaacagggtaaaatgagagaaggtcaactacccacgacctaaaggtcatgggcttgtaaatttaatttatgaaagtaagagaagataagaaaagataaaaaaagaagaaaataagcgataagaaacgataagagaaggagaaagcctgtatggaacaaaaaagtaatacatttacacagatttatgacatcgtgcggcaaatcccgtacggaaaggtcgcgacctacgggcagatcgcggagcttgcgggaaataaacggctctccagagtcgtcggctatgcgctgcatgtcaatccggatccggatgggattccgtgctaccgggtcgtgaaccgcttcggtgcggtctctccggcctttgcatttgggggagagaaccgccagatcgggcttctggaagcggaaggaatcaaagtgaccgacgggatcgtcgatctgaagcaatatcagtggagcagaagaagcttctgaattcgctccacagcgcctggtacatcggtatcgctgacgtcgacggtcagatgtgcgtaggtttcatagagcggcgtgcgttcctcgtaaagggtggcgagcgtctgtcccggctttaagacgacaccgcgcttgcgtaggtcaccgagccgccgggagagcgtattgcagtcgaccttcagatagatgaccgtgctgatatcgcgcagatgctccatggagcgggcactgtagacaacacttccgccgggcgagataacagaatgatctgcacagacatggctgttgacgcgctcttcaatccggttgaagccgtcaatgccctcgtcgcgcatgatctgccagaggaggcggttctcttccttctggatcagcagatctgtgtcgacaaaatcatagcctaatacttttgcgagtacgattccgacggtactttttccggcgccgggcattccgatcagagtaatattgttcatgttccgttcctttctgcctccggcatttgcggcagcgggacgctgtggaggcaatgctttttttcggtctattttaccgtacctgttttggaattgcaactgtggaatgcctttacggaacaaggcaggtatggtacactgaaaggagtcaaaatatataaaaggaaagaagaggacaggagtatgaaatttcacgagatgccctacgaacgggtgcagctgccggacgttacacacgcatatgaggagctgatcaaagagctgcaggcggcaaagagcggcgaagaacagtttgccgtacatcagcgctactatgagatgcgcggccatgtcatgacgcagatgacgattgcgaatatccgacacgatatcgacatgaccgatgcgttttatgagaaggaacaggagtattacgacgagatcgggccggaggttcagaatctggaacagaagtaccggaaatgtctctatgagtctccgtatcgggcgtatctggaagaaaaaatcggtccggtcgcctttaaaaacatggaggtttccttccgttcatttgacgagaagctgatccctctgatgcaggaggagaaccgcctgacgaatcggtacaacaagctgatcgcgactgcgaagattgactgggacggagaagaactgaatttatccctgttgcgcccgtacctgactgcagcagaccgtaccgtgcggcgtgcggcctacgaaaaatacacggcattttttgagagcattcaggatgagctggatgagatttatgatgaactggtgaagaaccgcacacaacaggcacagatgctcggctattcgaattttgtaccgcttgggtatgaccgcatgatgcgcaactcctatggggcagaggaggtaaagagcttcagggagcagatcaagcgtgattttgtcccgtttgcggaacggcttcatgaggagcgccgggcacgtcttggtgtggagaagctttcgtatattgatgagggtgtttattatccggagggcaacccggctccggagctttcaccggaggagatcctgaaggccggacaggtaatgtatcgggatatgtcgaaggagacgcaggaattttttgattttatgctggaaaatgagctgttcgatgtgcttggccgcaagacaaagcgtgcgggaggctacatgacctatctgccggattaccatgcgccgtttgtttttgcaaactttaacgggacgagcggggatctggatgtcatcactcatgagtgcggtcatgcctttcaggggtatgtggcaggtaaggatccgatcgaggaacactgggatatcacgatggagacagcggagatccactccatgtcgatggaatttttcgcagaccgctatatggagctgttcttaaaggaggatgcggaccggtatcgcagaatgcatctggaggatgcggcggcatttatcccatatggctgcatggttgatgagttccagcacatcgtttatgagcatccggagctgaccgcgcaggagcgcagggctgagtggagaaagctcgagcaggtgtacaagccacatctggattatgaaggaaatacatttttcgagaatggaggcttctggcagaagcagcagcacatttacaactctccgttctactatattgattatgtactggcgcagacctgtgcgtttatgtacaagatccggatggaggaggaccgtcaggcggcgtgggagagctatctgcggctttgtcagctttctgcatgtaaattctattcagatatgctgcatacggtaggccttgaggtgccgtatgaggaaggatgtatcgcgcggatggcggaaaagcttgaggaactgcgcaagaagatgtaaaaagataagacgtaacagaacagagaaaaaacaggcgggaaatatagggccgggtgtcatgcttcttccttacaatcaggtatggttgcagaggaagagcggcagcacgtcggttatatttcctgcctgtttttttgactataaataaatgctgaaaaggatatgatatatgtttatgcgaacatcgcgccgactgccccgaagagtcctgcgcttgcagcccccatgatgatgccggccaggagtacgccgagcagtactgcgatgacactggacttgaagtccatatccagaaggctggctgccagtgtcccggtccatgcaccggtacccggaaggggtatgccgacgaagagcatcagcgcgagaaacagtccgcgtccggctttcgcctgtagcttcttgccgcccttttcgcccttttcaagacagaacgtgaagaatttgccgatcaccggtttatcctttccccagatgagcacgcggcgggcgaacagataaatgatcggaaccgggatcatatttccgatgatcgcgattacataggacggcagcagcggaaggtgaaagcccactgcataggggatggctccacgcagctcgatgagcggcaccatagagatcaagaatacgatgagatagtgtgtcatgatacgtctcctttaaattttctcaatgttatttcttatgatacgatgtggtcatacagaacgaagacgacaaagcctgatcacaaatcagatgcgaagccgttttgaatgacaacacgcctatcattatacatgataattacgcctgcgaacagtggaaaaattcacaatatgagcttgacaaataccgggagagggtatatgatatgcgacataagataccggtatggggtatataaagcagacagataaaaggcatagcgggaatgtgcgagaccggctgtcaggaaaggagagctgagatggaagataaaattacagatacatgtgcggactgcaaggagcgcaaagcgacgcaggactgcacctgctgtcagaaaaagaaggagcgctcagataaagagtaccgggatctgatgaaccgcttaaagcggatcgaagggcaggtgcgcggtattcagggaatgcttgagaaggatgcctactgcacggatattatggtgcaggtcgcagcagtcaatgcagctctgaacagcttcaataaagtattgcttacgaatcacctgcatacctgtgtggcagagaatatccgcgcaggcaatgacgaggttatcgatgagctggcgacactgttacagaagctgatgaaataggcgctgtaaggtgatggctgcaaggcaggaaatctgcggataaaagtggtcacaggcaaagtccgtatggatcaatacggcagatcacaggggtgcataccgctgtgattggcatcaaaggagggattgaggatggaacaatacaatgtgacaggcatgagctgtgcggcgtgcagcgcccgtgtggaaaaggccgtattaaaagtaccgggcgtgacgggctgttcggtcagtcttttgacgaattcgatgggtgtggaggggactgcttcggcacaggacattatccgggcagtcgaggcatccggctacggcgcatcgaaaaagggcagcgcaaaggaagcttccggaagcagcgcttctgattatgaagagatgctcaaggacaagacgacaccgcttctgaaaaaacgtctgattgcttcgctcgtgctcctgatcccgctcatgtatgtgtcgatggggcatatgatgtggaactggccgctgccgtcctttttcgacgggaatcacgtcgcaatgggactggtacagctgctccttactgtcgcgatcatggtgatcaatcagaggttttttatcagcggcttcaagagcctgtggcatcgcgctccgaacatggacacccttgtggcgctcggtgcgaccgcatcatttggatacagtgtatatgcactgtttgcgatgaccggagcacaggtgcgcggggatatggacgcggtcatgggctacatgcatgaattttattttgaatcggcagcaatgattctgacactgatcacggtcggaaaaatgctggaggcgctctcgaagggacgaacgaccgatgcgttaaaaggactgatgaagctcgccccgaagaccgcgacgctgctaagagatggacaggagacagaggtttcaatcgatcaggtaaagatcggtgattgttttgtcgtgcgtcccggagaaaatattccggtggatggtgtagtcacagagggcagcagtgcagtcaatgagtcagcactgaccggtgagagcattccggtcgacaaggcggcgggggatactgtatccgcggcgactctgaatcagtctggctttctgacctgcgaggcgacccgggtcggcgaggatacgacactttcccagattatccagatggtcagcgatgcggctgcgacgaaagcaccgatcgcgaaggtggccgatcgggtatccggtatttttgtaccggctgtcattacgattgcgtttctcacgatcataggctggctgctggccggacagagtgtcggatttgcgctggcacgcggtatttccgtgctcgtcatcagctgtccatgtgcgcttggacttgcgacgccggtggcgatcatggtcggcaacggtatgggtgcgaagcacggcatcatgtttaagacggctgtttctctggaaaatgcaggaaagacggagatcgtggcacttgataagaccggaacgatcacgggtggagaaccgaaggtgacagatctgtacccgatcaccccggtgacggaggaagcgctgctgctggcggcaggtgcgctggagcaaaagagtgagcacccgctggcacgggcagttctggagctggcaaaagagcgcggcatggactgtggtgatctgactgagtttacggctgtgccgggcaacggactgaccgggcggcgtggcacaagctttctggcaggcggaaacgcagccttcatcggaggaaaggtgacgattccggaagcggcaaaggctatggccgagcagtattccaagcagggaaagacgccgctgttcttcagtgaaaatggcagtttgctcggaatcatagccgtagcggatgtcatcaaggaggacagcccgcgcgccatccgggagctgcagaatatgggcatccgtgttgtcatgctgaccggagataatgagcggactgcacaggcgatcggtgccgaggccggtgtagatgaggtcattgccggagtgctgccggatggaaaagaggctgtgatccgtacactaaaggagcaggggaggaccgcgatggtcggcgacggcatcaatgatgctccggcactgacacgtgcagatgtcggcatcgcgatcggagccggtacagatatcgcgatcgatgcggcagatgttgtactgatgaagagccgattaagtgacgttccggcggcgatccgcctgagccgggcgaccctgcgcaacatccacgagaacctgttttgggcatttatttacaacatcatcggtattccgctcgcagcaggtatttggtatccgatctttggatggaagctgaatccgatgttcggcgcggcggcgatgagcctctcgagtttctgcgtcgtcacgaatgcactgcggctgaatctgttcgggatgtacgatgccggcaaggataagaagcgcaggaaaaaaggcagcacgaccggaaatggaagccggtctgcaaataccggaagcgccacagcggtgcagccggaagaaaatcaaaaagaaaaggagaacaaagacatggaaaagacaatggaaatcaaaggaatgatgtgcggacactgtgaggcacgggttaaaaaggcactcgaggcactcccggaagtgactgaggcaatcgtcagccatgaggcaggcaccgcagtcgtaaagctttccgcggcagtctcagacgatgtgctgaagaaggccgtcgaggatcaggactatgaggtgaccgggatccggtaggataataaaatgataccagggtcaaaaggtcatgcgtttcatgcttgcatgaaaaagcatgact

SEQ ID NO: 737 - DNA, 28514 bp, Unknown
  16S sequences of unknown bacteria
ataattaatatattattaacaggactttcggatggcgacgtcgaaaaatggcaataacagggaatttgtgtgtcgtactcagtcacaatccgcggagtgctgtcgagggagagcgggagagcatggcgcaggtcgtcgaaacacgggaaatattggaaaacgaaaatttaactgaactttaattaaatataccccgtattttttctcgaaaagctcttgattcttcgggcgatatagtatataataatatcgcgtggagacaaatggcggcaaaattaacgaaagggtggtggaatgagatgctgacaggcaagtacaatcattcgcttgacgctaaaaacagaatcatcattccctcgaagctgaaagaacagctcggagacaccatcaccatcctgcgtggaagcgacaaatgcctgaccatgtactccgcggaagaatgggaaaactacgcgcggaagataagcgaaatgccgaaaaccaaggttcgcgagcttacgagatatctctactcgaattcgctcgaggttcagccggattcccaaggacgcgttatgctgccgcctgagatgcttaattacgccggaataaccaaaaacgttatcacggtaggctgcggcaagtacgctgaaatctggtcggaggaagtatggaacgagcagcatcttgatgaagaacccgaaaacttcacggaaatgctcctcgaactcggtctgtaacatggaattttcacacatttcggtaatggcgaaggaagtcatcgaagctcttgacgtgagccgcggaggaatattcgtggactgcactgccggcggcggaggacattccctcgagatagcaaaacgtcttcccgaaggttcgcgtcttatctgccttgacagggacgacgacgccatcgaagcctgcacaaaacgccttgaaaactaccgcgataagttcaccatagtcaagtcaaacttcatgaatatcgccgccgcgcttgactcgctcggagttgagaaaatagacggcgttatgtgggatctcggcgtgtcctctcatcagcttgacgagggtgagcgcggattctcatactcgaaggaagctccgctcgacatgagaatggacagggagcaggtaaaaaccgcgtatgacgtcgtgaacctgtattccgccgaagagctgacaaggattctgcgcgactacggagaagaaagatttgcgtcaaaaattgcgcatgatatagtgaccgcgcgggagacaaaaccaattgagacgacaacagagcttgccgagctggtaacaaactccattccggcggctgtgagaaaaaaagaaaaccaaaaccccgcaagaagaacgtttcaggcggtacgcattgaagtaaacggcgagcttgacgcgatagaaccgtcgataagtgccgcggttgacagacttaatcccggaggacggcttgcggtgataacattccattcgcttgaagacagagcggtcaaggagacattcaaaaagctgtccgagggatgcacctgcccgccggagtttccggtatgtgtgtgcggtaaaaagccgaagataaggctgctctcgaaaaaaccgatactgccgagcagagaagaggaagaagaaaacccgcgttcaagaagcgctaagctgagaacagcggagaagtgctgagaaggcagaaaatttaaagctgaggaggatacaatgacttaccaaagacgtgaatacgttctcgcagataagctgaaaagtgaattcaaggaacgcggaaaagatgtcagcggaatgcgtgcgtcctctacctcggagctgatgagacgcgccgcgatgggacatgatccccgtgaaaactgcgccgaggaagcgttccgagaaagctacagcaaacgtccaaatggtacaagacaagccgcgagacaatccgctgcgaataacgtaaattacacatacagtcgggctcgttccgctcaaaacagtgcgaatagaactcaaacgaaaagcaccgctcattcatcctcgggaacaaaggcaagagcaagttcttccagtgtgcgttatgcttcgagtgtgaaaagcgctccgaaaaccgtgcagtacagacccgagacggtaaatgtcagagcggaagcaaaagataccgcaagaaaaagactttcccccgtgtttgtggctctgctcggagtcgttacggtgatgataatgttcctcgtgacgcagatatccgatgtgtacaaagcctcaaacgagatagcacagctcgagaatcagctccagacaatgcagtcggaggcggaagagcttaagttaaagcttgacgaaaagaacgacatccgcgagatagaaaaaatcgcgacgacaaagctcggtatggcaaaagaggataccatgcagagaagatacattaccttgtccgacggcgaaaggatagaagtgatagacaacggcgagagcgaagaaagctccggcggcgtcatgctctcgtccatcgcgtcggctatagaaaacctcttcaattgaaattacaaaatatcgcgggctgcaatttttatcccaagtggcagcccgttagttttcagcatacatcacagcgaagtgaaatataatataaaacggacagactgaatcggaggcacgcgaatgaataaggctcaaaaccgtacagacagaaaaaccatgcataagatggtctgtatgttcgcgttctttttgctgatagccgcgtgggtcgtgggaagactcgccagctaccagataaaaaatcacgattactaccagtcaaaggttttaaatcagcttacgatacaaaccgaggtcacgccggaaagaggtacgataaccgaccgaaacggaaacatcctcgcgacaaacatcacggtctacaatgttattctctccccgtatgatattataacacatatgcagaaggacagcgagaaaaactctgacaacgaccccgaaaatgacgttcactacgagtatacggacagcgactacggaattaattactccggcagacagcttgacgacatgatagcggaggtgctctcgaagtaccttgacgtcgacaaaagctccatcctcgagaaaaccgctaaggtcaacagatactacgaggtcgtgaagaaaaacgtagacgcggacatagcggaaaaaatcgagactttcatcgctcagttcgacttaaaaaaagacatttacttcgtcgcttcatcaaagagatattatccgaagggcgaccttgcctgccacgtcataggctttacaaactccgacggcgtgggaatctacggacttgaagcgtactacaataacctgctcgagggaacatcaggcagatacatcctcgctcaggacggaaagaaaaacgatatgccgttcgagtatgagcggttcatagaggcggaaaacggttataatataacgacgacgcttgatatgtacatccagtatgagcttgaaaatcagctggaaaaaaccttcaacgagtccggcgcgggagacagagtctgcggtatggtgtatgacgtcgataccggcgaagtcctcgcgatggctacatatccttcgttcgacttaaacgacccgtacaccatcgacgagtattcacaggcggagcttgacgcgtcagggcttaaagaaggcacggacgaatacaaaaccgagtacagccgcctgatgtaccgtatgtggaacaacaaatgccttaccgagacatacgaacccggctcgacattcaaggttgtcacaagctccatggctctcgaggaaggagtcgtaacgcccgagtccccgttctactgcgcaggctctctcatggtagatggatggtcaaagccgatttcgtgcgctaaccataacggacacggcgccgttacattccgcacaggtctacaacagtcgtgcaaccctactctcatgcaggtggcggcgcttatcggacgtgagagattttactactacttcaaggcgttcggctacggcggaaaaacaggcatagacctccccggagaagtaggctcaatttacgcgtcatatgaaaacttctcgggagtttcgcttgccgtttattccttcggtcagacgttcaaaaccactcccgttcagcagctcagagctataacagtcgtcgcaaacggaggatatctcgtaacgccgcatctgctccgtgagataaccgacgacgacggcaacgttatccagacatacgaatccgaacccgtcagacaggtagtcagcgaaaacacctgcaaaacgctcaccaacatccttgaagaaggcgtggcaacgaacggagcggcaaaaaacgcgtatgtcaaaggctacagagttgcggcaaagacaggtacatccgagaaaaaggacgaattcgacgaaaacggcaacacaccgtacagagtcggctcgacagctgcctttgcccccgcagacgatccgcagatatccgcgctgataatggtcgataagccgctgaaaagcgcggtctacggcggtacagtcgcggccccttatatatcgaatcttctctcctacgttcttccgtatatcggagttgaacctcagtacacaacggaagagcttgccaaactcgacgtaacgctatcgagctatgtcggagctacggtggagaacgcgataaacgacctctcatggcgcggcttcagctatgagataatcggagacggcgatacagttaccgcacagatacccgaagccggctcaaaaatctccagcgatacgggacttctcatactctatactggcgaagaaactcccgcgaacactgtggaagtaccagatctcatgggaatgagcgcatataacgctaacaacgctgccgtttcacttgacttgaacgtaacattctacggctcgacaaacggctcgacagcgactgttataaatcagtatcccgcggcaggaacaaaagtcccgagaggcacgataatcgaaattgagcttcgccacctcgacggaacggactgataaaactcgcagacgtctaaagaaaataaaatctttggaggtactgtgatgaagctgtccgaattgctccttggcgtgaggataaaaggaaaaatgccggagactgaggttttcggtatttcaacagactcacagagcgtgaaaaaaggcgacctcttcatttgcataaaaggagggagagccgacggtcacgattacgctcgtcttgcacttgacacaggcgctgctcttgttttagccgagagaatgccgcatgatgtcgagaaagcgcgcgttatcttaaccgaggacacaagaaaagccgcgtcggtcgcgtggtataacttttacggacgtcccgctgacggaatgacaaaaatcgctgtcacgggaactgccggaaagacgtcggtcgcgttcatcctgcgggagcttcttctctcgtccggacggcgtgtcggtgtagtaaccactatccgcgccatgtccggtacaagaacactggagcttggcgaaaacggcggctcttcggtaaacggagtcagcggagctatgacaacacccgaccccgaatacttctggtacgccgcagccgagatgaaaaaagacggatgcgataccgtgatatacgaagcgtcgtcacaatctctcctgagaaaggcggtttcggcggtaactcccgacttgtgcattttcacgaatctctccgaggagcacatggacgctcacggaacgatggagaactatttttccaccaaagccggacttcttgaaggcgtgaaaaacgcggttgtcaatgccgacgacgagtatttctcccgcctgccggatatgttccgctcgtgtaacttcatccgagtttcggcgagacgggaaaacgccgggaaaacggaggtctgcgcgctcagataccacagcatgggagagaacggaacagagtacgtttacttctccgaaaaagccgtgttcagagtgctcagccgtcagataggcttctactcggtgtacaataccatggaagctgccgccgccgcaatattcctcggagccgaccccatgacggtgcaggaagtccttgcgtcgtttgacggagttgacggaagaatgtaccgtgtgagatatcgcgggaacgaggataaacaagcggagctgctgccgtcggtattcattgactacgcgcatacgccgaaagctcttgaatatgcctgccgcgcgctttgggagataaagaactcaaagtcggacggcgagcacaaattcatcgtgatgttcggctgcggaggggaccgtgacaagacaaaacgtccgctcatggcaatggctgcgcagaaatatgccgacatgacagtcataacaaacgacaacccgcgaagcgaagagccggagaaaataatctcggacattctcacgggagtcgacaaagaaaagccgtatacagtaatccctgacagacgcgcggctataaaatacgcgatagaatatgccggtgcgggagatatagtgcttctcgccggaaagggacatgaaaaatatgaaataacgagccgcggtatggagccgtttgacgaagaaatgacagtgaacgaggtcttttacggcttgtgcgggaataataaaaaatagaatcctgttcgtgtgctcttcagctttgcgaatggatttcgggaggaataataatgagcgtagacctcaaacttaaaaaattgacggctgccgagattagccgagaaactcatggcgaacttcagatatataacggcgcggactccgaaaaacaacagagcgctatatccaccgactcaagagaaagcggcgagggcgtgattttctgcgcgataaaaggacagaacgtcgacggaaacgacttcattcctgcggctgtagaggcgggagcggactgcttcatctgccagtatgttccggaggaagcgaagaagtcgggtaagccgttctgtgcgataatcgtagaggacactatcaagtctatgggcgacctcgcagcgtattaccgcggattctcgtctgcaaaatttgttgcggtaacgggaagcgtcggcaagactaccacaaaggagtttatctacgccgtagcctcagcctcgttcaaaacacataaaactcagggcaactacaacaacgagcttggtctgccgctcactattttcggtatcgagcctgacgacaaggttgtagtcctcgagatgggaatgagcgcgctcggcgagatagagcatatgtcaaaaatcgcccgccccgatatcgctttggtaacaaacatcggcacgtcccacctcgcctctctcggaacaagggaaaacatctgccgcgctaagcttgaaatcagactgggacttcccgaggacggtatactcctgctcaacgccgatgagccgcttctctttaatcagtatgaaaccctcgagaagaagccgaagctcatgagcatatacaatcgctgcggtgacttccgtgcggtgaacataagacagaagctcgacggaatagtatacgaccttatctattcaaataaagctgttacaaacgtagaaatccccgcgctcggcaagcataacgtgtataactcactcgcggcttatgctgtcggagtaatgctcggaatgaccgacgacgctatcagacgcggacttaaaaccttcgtcagcgcggatatgagacagaagatatacgacgtcggcggaatcacaataatagacgactgctacaacgcaagccccgagtcaatgagagcggctatagatgttcttatctcgatggcggcaaagagacacgcacgtcctgcagcccttctcggagatatgctggagcttggcgaatactccagacttatgcacgatcagctcggacagtacgccgcacagatgcaggttcagaagctgttctgctacggcatgatggctgacattgttgcggaggctgccataaagaagggaatccgtgcggataacgttttcgtctgccttgacacacgcgacccgcagggaatggctgacatgatactccaggctataggacccggcgacattcttctcgtaaaggcaagccgcgcggttcaggctgagaaaatcatagaatgcatcaaaaagcgcaagatccgcaaaaagagataaagaataacgaaggacgttcacatgaattacaatataatgtatgccgtcgcgcttgttctgacattcctcggaacggtgcttatatccaaaaagctcattccgatactgaaaagccataaaatgggacagaaaatccttgaaatcggaccgagatggcataaaagcaaggaaggaacgcctacaatgggcggcatcgctttcataattccgtcagttatcgtcggtatggcgggctctgtctacctcggaataacggacggcataagagagtcgcttccgcttgtgttcaccgtggctctcggactggcgggcggacttatcggatgcattgacgactccgcgaagctgagaaaaaagcagaacgaaggcctgactgctccccagaaattcgcgcttcagttcgttgtgtccgcgctgtacctcctcggaatgtcgcttgtgtgcaagatggacacggagatttacttcccgtttttcgacaagagcgtgaatttcggcatattctactatgttgttgcaatgctcctgctcacgggaataatgaacagcgtcaacctcaccgacggtattgacggactttgctcaagcgtgaccttggtagtgggactgttcttcaccgccgcgggatatatgaattctctcgcagaacccgacggaacgctgacccttctcggagctattctgataggctcgtgcgccggatttctcgtatataacttttatcccgcaagagtgttcatgggcgacacaggctctctctatctcggcggacttgtcgtgggcggtgctttcatgatggataatccgcttcttgtgctcgtgttcggcataatttatgtaatagagacagtttccgttatcatgcaggtaacatactttaagctgacacatggcaagagaatcttcaaaatgactcccatacaccaccactttgagaaatgcggatggtcggagataaaaatagtcgtcgtggcttcaatcgtaacggcagtcgcggcggtggtatcactcgtattcggtttaagataatttacatacaggagggaactgatgaacaataacggcagacaaactcacgcgcacagaacgccggaatcagtaagccctcggactgcacagagaaccggtcagacacgcactccgcaaaggaaaaacagcgcaaatacagggggcagaaactccggagactatgttttccgtgcgggagacgcgagacatcagaacaccgcgctgagagcacagcagagaataaccgcgctcacccccgaagaaaagaaaaaaatacagaagcgcgagagacgtgaggtcgaggaaagggagcgggagaaaaaatggcagaatgaagtcgtcagagtacgcggaagaatagacgttttcatgctcgtcataatcctcgttcttcttgcgctcggctcgataacagtgttcagcgcaagctatcccctcgcagtgtcggagggaaaagcaagcaattactacatcataaagcagctccagttcgtcggaataggcggatttctcatgctgcttgaggtattccttataccggttgacttttacaaaaataaagcgattgtattcgcagcttattttgtctcaatggctctgcttatctacacgttttttagaggaaacgcacagggtgaggctgtaagatgggtcagaataggaccgattaacgttcagccgtcggagcttatgaaggtgtctctcgtgctgatgctagcgtggtacgccgacaaataccaaagacagatgaaggagctgaacctcggcggaacaagctatctttataatataggctttcccgtgctcatactcggcggagctgccggatttgtgcttatcggaaaacacctctccggtacgataatcatcggagcaatcgcattctttatgatgataatcgccggatgcaagataacgtggctgcttgaaactttaattcccgtgggagctgccggaattggtttgttcctgctcaaaaacccctacgcgctcaagagaatcacgacattcacagacgaaaacgcagatactcttgacgagctttatcagacaacgcaaagcctttacgctatcggttcgggaggactgttcggagtgggactcggcaacagcagacagaaatacagctatctcacgcaggctcacacggacttcatcttctcgatatggtgcgaggaatggggctttatcggagcggcggggcttatcatactgtttatactgttcgtctggcgaggatatgttatcgcaatgagagcgccggacaaattcaccatgcttaccgcgttcggtgttactacacatgtaggacttcaggcgttcctcaatatgtgcgtcgcgtccgatcttatcatgaataccggaatcacactcccgttcttctcgtacggcggttcttcacttgtcgtgctgatgatggaaatgggaatacttctgtcgatatcaagacagtattacagaaaaaaatccgatatcgagcgtgagcagatgatgaaacagctcggcatggattaaatacgcgaaaggcttcattatgagagtgcttataaccggcggaggtacgggaggtcatgtaaatcccgcgctcgccattgcaaatacaataaaacaaaacgatcccgacgctgtcatcgcatatgtcggaacaaagaggggaatagagaacaagctcgtcccgaaagccggatatccgatgtactatgtcgatgtgaagggaataaagcgcagtctctctccctcaaatatcaaagcggcgtatctcgctctgacttccccgattaaggcgaaaaagataatccgcgagtttaagccggatatcgtagtcggaacaggcggatatgtgtcgtggccggtcgtaaaagctgcgtctcagatgggaatcccgactgcgctgcacgagtcaaatgccattgccggagttgcggtgaagatgctgcaaaaatccgtcgacaggatatacttaaacttcgagaaaaccggagagagcctgagctgcgacagagcaaagctgatgaaggtgggaaacccgatactcggcggattttcgtccatgacgcgcgaagaagcaagaaaaaagctcggcattcccgataaatataagtacgttatcctctcatacgccggaagcatgggagcggaaaaagtaaacgacgccgtcctgtgcctgatgagagagttcacgtcaaagcatcccgaggtgtaccatatccacgcgacaggttcgatagagcttgagctgtgtacatcgcagtttaaggaaatggggcttgacaagtgcgaaaacatagagctttgcgagtatatttacgatatgcccgtgagaatggcggcggctgacattacgataaaccgtgcgggagctatgactatatccgagcttgcggcaacgggaaagtgctcgatattcattccgtcaccgaacgttgcggaaaatcaccagtacaaaaacgcaaaggttctctcggacgcgggagctgcggctctgtttgaggaaaaggagcttacggacggcgcgaagcctctcatagaagaagtggaaaagctactgtccgacgaaggagacgagctgagagcggagagaagcgaaaaaatacgacagtttgccgtaagcgacgcgaataagctcatatacaacgacctcgtgaagctcgcgcagtcaggcagaaataagaaataatttaaattccggcaaacgaaaggagggtgagcatgggaaaaaaagtcaaggacgttttgtacgtgtacgacagaatatgcacaaaaacatccaaaaagaacgagctgataagcgaatacggcaagaccgatacggcgaaggttcataaatatacgggggaactcggcaaaggcttcgcgaaaaaacagaaggacagagcccgcgcgtattccgatgctcatccgtattccgatgccgctcgaaattccgcaaaagaacgacgggcttcgtcaaccgcatatacatatgcacatacatacgaaccgacaaggcagggtggcggagagaaagttcgtgccgagacaagacccctcaagctggttctcgacagaataatcaacctcttcgacacccttgaagaacgaggacaagccgacgagtggatcgcaaaacagcgcgctattgcaagaaagcggttctacgaccacaaaaacaccatcctcactgcactctttgtgacactgttcgcggtgctgttcctcactgtcgtttataaagtagtatttgtcgtgaagaccgtcaacgtcacgggaacggaaaaatacaccgacagtgaagttctcgcggcgtcgggtatagtggagggcgatacgctatactcgttcagcaggactgacgcggaaaacgaaataatcttccgttgtccttatatacgctctgctgagataacgcgcacaatcccgaatacagtcagcgtagcggtagacgaggacacggaaatgtacttcgccgatatctggggggactgcctcattctgtctccttcgctgagagttctcggaaagacggatcgcggacaggctcgtgaaaacggacttgtggagcttgtgcttccggcggtgtcgtcgtccgtgacaggcaaaaacatctcctttgtctccgcgcgtgacgagagattcatcagaaatatcctcacggaagtgtcgtcatcggagatgtttgcggcgggaatgcttgataaggttgacttgtccgatgaatatgccgttgccgcgcaggctgagggaaagtatctcctgaaattcggaaacgaaagtgacagcgacctgaagctcaaaatggcgtacaaaaccataacgagccttcaggatgaaaacacttctcccgcgagagtagacctcactgtagtcggtgaagcaagcgtcagatttgacatgaagctcgagcttgactgaaaaacactcgaatcttggcgaaatttaaccttcgcgagtgaaaattcaaggattttttaagaaaaaactattgcaaaatcttcgtacttattgtattatattagatagtagtaagtatgtctgactttacatttgaagaaagtatatttcaatcagaattaccggtaaggagggcagtataatgccatttgaacttgatgataataactacgagagcggtgtaaatataaaggttatcggcgtaggcggcggtggaaacaatgctgtaaacagaatgaccaacagtgtcaagggcgtagagttcatcgctatcaacaccgatatgcaggcactcgtaaaatccaacgctaccgcaaaaatcgccatcggtgagaaaatcacaaagggtcacggcgcaggctccaaccccgatataggcgcgaaggctgcggaagagagcgaagaagttattaaggaagctctcgaaggcgcggacatgatattcgtaaccgcaggtatgggcggcggaacaggcacaggcgcggctcccgtagtagcaaagctcgctcaggaaatgggcattctcacagtgggtatcgtaacaaagccctttgcttttgaaggcaagaagagaatggatcaggctgagatgggtatcgaaaagctcaaggaatatgttgactcccttatcatcattcctaacgagagacttaaggacgcaggcgagaagattacattcatgaacgcgttccagatagcggacgatgttcttctccacggcgtgcagagcatagttgagcttataaacgtacctcagtacatcaacctcgacttcgcggacgttacctccatcatgaaggacgcaggatacgcatacatgggcatcggcaccgcatccggcaaggacaaggcttccgaggctgcaaagggcgctatctccagcccgcttctcgagacaacaatcacaggcgcgaagggtatccttatcagcatcaccgcgtctcccgatatcgctcttgacgacatcaacattgcggcagacctcataagctccgaagcagctgaagacgcaaccgttatcttcggcgcagcctttgacgaaactcttgaagacacaatgaaggtttccatcatcgcgacaggcttccagaacaaaagcgaggctgaccctacattcaataaaaaaggcgacggcagcacaatcagaccttttacctccggcaagattaagtcgggagtaaaggatcagataatcgtctccaaggacagcgcgacaaagcagacgcaggaagaggaaaaaaaggacaagactgacgattctcccatctccgacgacgacttcaacgagattctcgaaatgcttaacatgggtaagaaccgcaatcaggctcaggctaaggaacagaacaacacaaacggcttcccgaagagatattgatctcaggcaaaataaaatcaagcacaggcggcaggagtacaagcagtttctgccgctttttgttgcacaaagacagaaaaaactcccgaatttgagctaactcacactcattttcgggagctttgtattattttcggttattcaaaatccttacaggcgatgaggtttgtgccgtcctcgatgaagttttttactattatgtctccggctttcacgggcgcgctcacactcgtcttgcggactattgccatgccgtcgaacagcttttctttcggtattgctttgtcggtgcgaacggggagcatcttttttcctgccatcgtcattattgaaaccgtagaggtcagcgttctcacgggagctgttacttcgctttcagcatactttttgcctctcgcacaggtgaatcccgttatgtccgttatctttccgtcgtcgagagttaccgtaattttgcagcctgcgggacaaaccacacaggtcagttctcttgttacgctcatttgttgtcgcctcccatctcgtttatgtaaaccttgacatagctgtctccggatttaaggagcgcgccgagcttttccgcggatatctcaagcgattccatttcccccggagcaaccgcgctttttgccttcttcacgagcacttctcccgactctgtctcaacgatgagctgtaccttttttataatgtcggtcacgcggaagaatattctgaggctttcgggatgagcggtgaggtcgagcctttcgggaacagtgtagcgtactccgtttcctgtcttgacgtcgagcttctttacgcattcttcggtctttccgagaatcttctttgcggcgttttctccggcgatagcggcttcttcagatacaaagtcaacaaggtcgtgtacatggagcacgtttccgcaggagtagataccctcggcttcggtttcgcggaactggttgaccgacgcgccgtttgtcattctgtcgagctgtattcccgcacctcttgtaagctcattttcggggataagtccgacggagagcaggagcgtgtcgcattctatgtattcttccgttccggggatgggtcgtctgccgttcgcttcgtcaactgcggcaattgttactcccgtgactctctccttgccgtggacttcgatgacagtgtgcgagagcttcagcggaatgccgaagtcgtcgagacactggacaatgtttcgtctcagaccgcccgaatacggcataatctcacatacgcatttgacttccgcgccttcaagggtcattcggcgagccataataagtccgatgtcgcccgagccgagaattactacctttttgccgggcatgaagccttcgatgttgatgtatctctgagcgcagccggcagtgtaaacacccgagggacgggttccgggaatgttcagcgcaccgcgtgtcctctcacggcatcccatagcgagtataaccgcgtcggcagttacggcagtgtatccggtttcgggggaaacgaacgataccgccttgtcctttgagactgagagagccatggcgtttgtcgtgacgtgaatgccgcgctcttcagccatttttatgtatcttccggcgtattcgggacccgacagctcttctccgaaacgatggagaccaaatcccgcgtgaatgcactggttcagtattccgcccgcctcgctgtctctttcaagcacgagaatgtcctccgccgatacaccgctttcgtaagccgagactgccgcagaaagacccgcaggaccgccgcctattatgattaacttcttgtggtttgtcattttgtgcctccttcgcgcggaacaacgagccatgaaccgccgccgttctttgtgacttcatcgagactttttcctgtgtgctgtgcgataatgtccgctactctcggtgagcagaatccaccctgacatctgcccatacccgcacggagacgtttcttcatcatgtcaaccgtaacagccggaatgggggaggtgagcgcgtcaaggatatctccctcggtgacagtttcacagcggcagattatctttccgtatgcgctgtttagcttgcaggcttccgctttttcttcatctgtgagacggttccactgcttgtgattgccgtcggcgcgtcttgtggggatgtagttgtcctttttttcgagcttaagtccggcttcttcaaggagggaaacaagatattcgcctgttgcgggagaagcggcaaatccgggagactcaactccgacagcgtgaatgacgtttttcagctgctctgagtgcttgatgtaaaagtcgtaaatgtcgggcgtgggacgaactccggcaaaggacgtgataacgtttctgagattaatagaaggcataatcctgcgcgcgccttcgctaatctcgttcagtccgggagcggtcgtgctcttgtcgtcgctgtcggagatgggataagcgttcggacctacgataatgtttccgtcaaccgtaggacttacgagaattccctttcctcttgacgacgggcatacgaaaagtgtagagtgagcaatgtctccgcatgacttgtcgagaatcatgtattcgccgcggcggggagttatgctgatggggaaatcgttttcgccgagaatctttgcaacctcaaccgaatgcacgcccgcgcagtttactacatactttgccgcgatagtgttcacgccgtccgttacatagtgtacgtcgcctgccgaggacgcgtccgttaccttaaagttaagatagaagtgaacgccgtttgtcgcagcattttcagccgccgctattgtaatgccgtagggacaggttattgcagccgtaggagcccagagagacgccgtagcttccgcggatacgttcggttccatttcgcgaagcttgtcgccggagattatctccagtccctccacaccgttgtccacaccgcgcttgtacagctccttcagatgaacgaggtcgctgtcgccaaatcctataacgtgagagccgacatttttcagctctactccaagctgtgccgcaagctccttcataagacggtttccgcgcacgttgagctttgccttgagagtaccggactttgcgtcgtatcccgcgtgtactatagctgagtttgccgccgtagctcctgtcgcaacatccgacgccatgtcagccaccgcgacgctgcaattgtattcggacaggagacgggcagtcatgacccccgtacatcccgctccgattatcaaaacgtcgtatatcataagaatacctcccttgtgataatgacaatagtatatttgaagtttctgccgataacacaattcaacatagtataacataatcatttatgcaatacaacaaaatccgtaaaaaagttgttggcaatagtgacaaaaatattcatcaaaccatgttttagtattgtttttataaaggaattatgataaaatagctcttagtaaaaatcgaaaaaactaaattttaatatagaacggagaagcataagatggcaaacaacgaaagctcctacaaatccgcacaggctcttatttcagaggttgaaaaagtcgtaatcggtaagcacaacgagatcgtactccttgttactgctatgcttgccggaggtcatgtactcatagaagacgttcccggtacgggtaaaactactcttgcggcggctcttgcgcgtgcggcgggacttgacttcaacagagcgcagttcactcccgacgttatggcttccgatatcaccggattcaacgtctacaacagacagaaggaacagtttgaattccgcgaaggtcttgttatgacaaacgtgctcctcgctgatgaaatcaaccgtgcttccccgaagactcagtccgcgcttctcgaggcaatggaagaggctaaggtcactgtcgacggcgttacatataaagttcccgacccgttcatggtaatcgctacacagaaccctaccggctacgtcggaacatatcccctgccggaagctcagctcgaccgttttgccgtccgcctttcaatgggatacccgacggaagaggaagaggtcaacatcatcagcaaccgtaagacagtgaacccgcttgaaaaggtaaacgctgtcacaaacgtcgatatgattcgtgagattcgcgccgcaacaaaggaagttgctcttgaagacgagatctgccattatatagtaaagctcatccacgcgacacgtaagtctcccaagctttccctcggcgcttctccacgtgcgtcactccttctcatgaagctgtcgcaggcgtatgcattcctcagaggacgcgactatgttcttcccgaggatattgcgtttgtattcacccccggaatcgcgcaccgtatcgttctctcacaggaggcaagacttaaccgcgaaactcagaccgatattctcgcagaaatactccgcagcgtggaagctccctttaaaaacaaaagataaaatatacacggaaagagctgaaaatggataactatacaaaaagaccgctcgtaaaatttcataaggcggcagtgttctatgctctgcttctcgtgttttcgctgatattcacccaggctctcagagccactgcctcggctgtgcttttctggttccttgtgctcgtgccgattctgtcgcttatctacgttcttgtcggcaatgcgcttgtcagaatctacgtaagctcctcgactacaaaggtagagaaaatgcagccgcttgaatatgagcttagaatagtcaacgcctcgccgttcgcttatccgttcattgaagctgttgtgagcattcccgaaaacgacggagtgagatgtacggagcagtcggtcaatatgtcgctcgccccccttgcggcatactcggttcagcgcgagactacattcaaataccgcggcacatacgagataggagtaagatgtctgtatatctccgactttctcggactgttttcgataaggcttgacgcttatatctatgaaaacatcatggtgttcccgcggaagcttggcatggatatgaaaacgcagacctccgcttccgatataccgaacgactccgcaaaagtggtgttctcgacggaaaaatcggaaatcggcaacataagagaatacattcccggcgacagtcagaagaatatccactggaagctgtcgtcaaaatcggtcggcggcacgctcatggtgaaggagttcaacacaaacacctcacgcagtgtgtatatgttatgcgacttctcacgctcaattccgccggaggtttttgaggatgaggacgcaagaatcgcaagagaaaaagccgccgcagaggaagcgagaaaacccaaagaaaagcacgtcaggctgaaaaaagcaaagcaggataaaaaatctcttgaagccgaacgtgccgcgaaaaaagctcaggcgagggcaaaacgcggactcagcgcaaaccgaatcggagacgccgcgcttgttgacgagctgataaacaccgccgcagaagccaagcatccgacaaaagtcaaagaaaaatccgagagaaagcccctcttcgcgtcaaagaagaagaacgcggcggatgatatcattcttagcgacgagcagattaaagccgctgagaagaaacgccgcgacgacgagataaagagcgagctttcgatgggcggagtgctcaaaaccgaatacgcgaacgatatcgacgaatactgtgcagacggtatggttgaaatgtcgataggagccgtgctgaacgagctgaacaacggaaacactgtcactctcgtgtgggtggacaagcggcagaagggcggtatcgcggcggttgagcttacctgtcccgaggacttcaacgtcgtttatcccgtgttcgctacaacctctccctgctccgagaaggacaacgtcaccacgcttctcccgctcataacggagtctctcaacgtcacgataagaatatgcacatcaaatatcgacccgctgtcactgaaccgatacgcatctatcccaggacttttcggcggcgcgggaagcggatgtgtgacggaggtgctcctgttcaatccggaggagagatatacggacgttaaaatccgccgtgagtacattgaaatgtgcagaaatcgtcttgcgcaggacggcgtggatctgaccgagcttgaagccgcaaaagatgaaagcggaagatacgcgataagaatagcggcgcactaaggagaaaaatactaaaaccgaggacgaaaactcttatgaatataaattctgaaaggaaactgaagcgaaatcccaaaaaatctgccgaaacgctcggtcagaagatagagggcgcggagaaaaaacggaacaaacttcgtgcggctgcgcttcgtgaggcggtaacagtctcccctgccgaagggctgagtgctccgtatacggcagtaggtcttgtccttcgcgcgctgacattgtttatcggcattctcggactgaacctgtttttgttcgacgctttgaaggttgttatactaaacagtgcgagggcggacaatatcacaatccaggtaagctccgttgtgctgtggagtgcgatatgcgccgcttatgtaatgcttctctcactgacgaaggtaacgcgcatcctctccccgataatcacagcaggcggcgcggcggcatatatcttctcgacatattcagaccccgtgggatacttctcgaacgcgttcagacggctatttgaccttgttttcgagaacatgggcgcggcaggatataccacatacatgaaatacatctccggcgcggcttatccttatcccgaagaagagcttgtaaagtcggcggcgtgcgttatcgtcgtagtgtcgggacttcttctcggactgtttgtagcaagacgtgtaaaagctgtcggagtgggactgatgtgcacgctgtacatgattcccgtgttcacgttcaatatcacaagaacgaacaaaggacttgcgtttcttctcgttttcatagtcggagtggtcgcgacatatctttccgactgtctctacggcggtgtgtttgccgagcgtaaagcaaagaaagagcgcaaaaaagccgcaaagctcgcgaaaaagcaggcgaaaaaggacaaaaagaccgcaaagctgaacctgaaaaacctctcaacctcggcatacaacagcgcgcttgaaaaaggaatgccgaagtccgccgcaaagaaagcaaaagccgccgtttacgctaaagccgaaaaagacaaaaaagcggctgaacttgcggtaaaagaagcgaaaaaagcggaaaaatcccaaaaatccgaagaagcaaaaattctgaaagagcagaaaaaagcgacccgtctcgctctgacagaggaaaagaaaaaggtacgcgcaaaggcagctctgctcaaaaagtcaaagaccccggaggacgcacaggagcttcaaaagctgacagctgacacaaaggctgcggcgaaaaaggcgagaagcgagaaaaactcagggctggtgaattcattaaagctgcgctctgcatcgggatttgcgggtggaatggctatgctcatcgcggctcttgccgtctggattccctacgcggctgtcagcaaaaacttcccgattatagacgttatcaacaacaaaatgcagctcgcgagaacctatgtcacagcttacctcatgggagacgacattgacttgaactctctctcgatgtacggcggcgtggctgagcttaacccgagaagcgtcgacttcaatactccccagtacacaggacagaggatattcacggtcgacgtaggctatcaggctcccgtatatatgcgaagctggattggctcggactacaatatggaatacgacagctggctctctgccgacgcggatgaagttatagcttaccgttcacgcttcggaagctcgtattccccagacaatatctcgtatttcttcgcgaagtacgtttacccgaacgcgcttgaagtgaataaggtgaaccagtaccgcaaccttgacgagtttggcttccgcgtgttccaggttcatgtaaagcgcgactcgggcagcagcaggattctgtttgttccttcaatcatgaacgctgcgctcggtatcatggaatacggctcgattgaaccgaacaccgtaaaatactctgcctactacgacggaatatattcctcccgcttcttcaacgagggcgtgtcgtattcaacttcatccttcaatcccgtcctgaagcatcccgacctcgcggagaatctcgaaggctcgatagaatactatatgctctgcaagaagtacgccgacaccattgacataatcgaatccgatatttcgagcacggttctgtgggacgagacaaaatcgtacacccacgaaacaccgctcggagagattgcaatgaccggcacggattacacgttcctcatcgaaatgtttgaaaatgacgttgccgcgatgggatacaaatacaaggcgcagtcctttgtcgagatgtaccttgcaatgacagcgggagagagacgacagtaccggagcgcatactcctccgagctgaactaccgcgactacaccgaggaaacctacagaaacactttcggcagtgagaaaatatcagctctcgccgcagaaatcctctcggaaaacggcatagtcatgggagaaaagccggagtgggacaaatcatacctcgagacgaagaacgagaaccagataaagcgcatgaccgccgaggaaaaatacggcaactacagcgaatcatggttcaccgatgcttcaaccggagagactgttccgcgccacaccgtgattatggctgtgataaactaccttagaaataactacacctacactctctatccgaactgcccgacaaaggagctgacggacgagaacggaaacgttgtgcttgacgaaaacggcgaccccgtcatggtattcgacatcacggcggactccaacctcgaagcgttcctgtttgatataaaggaaggctactgcgttcactttgctacctccgccgtcgcgcttctccgtgagcttggctttgcggtgagatacgacgagggatatatagcaagccgcttctccagaacctacgcaaaggacgcatgcgcgacataccgctcatctgtacgggactacgacgcgcacgcttggattgagatatactatcccgctatcggatggatgatgtacgaatgcactccgtcctactgcgagatgatgtacgacctcgaaagcacgacctcgaccacaacgggaatagacacaagcaaggtcacggtaagcgacagaaacaccgataccgacacgacaaacgacacagttttcggcaccgatgagacagtcgattacaccgtcgtcattgcagttatcgccgcagtcgtcgcagttatcataatcctttcgataatctggggtgtgctcagacatcgcgcgatgaaggctgtgaagagaagacagacgcttgtcgaggacgcaatgagcgagcagaaattcacctcaggcgagacggacgtacacgcaagcgcaagaagcatgaccgacgctgtgttcgatatcctttccgctctcggaatgccgcacgaaacaggcgagcttcccatagaatacgccgtacgtgtcgaagccgaatacggtaatatatcgggacataagataaccgacgtcatggcaataatagaaaaggaagaattcggcggaaagctgtcgtatcgtgagctatgcactttggcggaatatctcaaggatatcgaaagctcggtatattcttcacttccggctcatgataagctcagaatgcgctatattatgaatgtaatataatttaaggagacaaacacacaataaatggcagaaacaaagctaacatcagaagaaatcaaccaaattagcgcgcagaatcttgcttatctcggagactgcgtgtatgagctgtacgtccgcgagcaccttgtcagaaaaaacagcagccgtgcgagtgtggaatcactgaaatacgtgactgcgcacatccagagcggcgttgtcgagaagatactaccgcttcttacagaggaggaggaggacgcttaccgcagaggaagaaacctcggtcactccagcacgccgaaatccagtacggtaggggaataccgccgcgcaacgggacttgaagcgctgttcggatggctgtacctctcgggaaagcacgacaggctgagagagcttttcgatacggctttcgcggaagaaaacgaataaacaaatatagaacagatggagaccatgcttcgtctgttcttttgtttaagttttagtattgatttatcttccgaaatgtggtattatatagaataatcctatcgcatgataaaaataaattttataataaatcggagaacagtgatgaaatatatagcggtactcggtttcggtacagtcggcgggggaattcccgaagtaataaaagccgaccgagagaaaataagcaagctcatcggagaggacgtggaagtgaagtacatacttgacctgcgcgattttccgggttctccgtatgccgcgaaggtagtgcatgacatcaacattattttaagcgataaagacgtagaggtcgtgtgcgaggtcatgggcggctctcatcccgcgcgtgagttttcgctgtcgtgcatggaagccggaaagagcgtcgttacctcaaacaaggaggtagtggcaaactacggcgacgagcttcttatgtgcgccgcgaaaaacggggtgtcatacctatttgaagcaagcgtcggcggaggaatacccgttatacgctcatttacgacgtctcttgcaggagagaagataaaaagcatcacgggaatagtcaacggaacgacaaactatatcctcacaaggatgaaaaaaggcggactttcgtttgacagcgcgctctcggaagctcaggttctgggatttgccgaaaaagacccgtcggctgacatagacggaatagacgctcagcgaaaaatactcatcctcaccgctcttgcgacaggtaagctctattctgcggaggacgtagtgacaaatacgctcagaaacatcaccacggcggatatggaaagcgcagctcagctcgacggagaggtaaagctcatcgcacgggcagagatagcggatggcggagacgtttcaatgtgcgtttctcccatgatagtgaagcattcgtcgctcctgtcgggaatatcggatgtgttcaacggaatatcggtcgaatgtgaaacgctcggcgagataatgttctacggcagaggcgcgggaagaatggctacggcaggtgcagtcgttgcggatgtatgtgcggctctcacgggaagcgcaaagcatgagttcgctccggaatttatccgtgcagcaacagatagcgtaaaacgccgcgtaaggcgatatgacagcgagaaatacgactggtgcattacagcgcgtgcaagagatgaggagctgtgctatgtcctcgagcattacgacacaaaaataaaaaagctccccagaagcggagagcgggcgagagtttctgcggcaaacctgagcatagacgagctgaacgaagccgcgggactgctcagcgacctcgaatacatacgcgttatataatacccaaacgagcgcgggctgaatatactgcttatagaacgaacagtattggagagagcctgtggcagcttttgcgataacaagggagagggatatctccgtcatcgacataagaaatccgccggatattttcggtatagcgtatctcacgttctcttctctcgccgaggcaggagtggatgtggatctgattttccaaacatcccccggcggcagaggatgcggaatcatgttcaccgtgcggggagaggattcatccgctgcgcttgacacgatgaagacactgtacgaaaaatacgacaagaccgagataatactgaacagaagcgcggaaaaaataagcatttcggggcttggaatgcgcggcggagtgggaacagcggcgagaattttgaagaccctctacagagaggacatattcatcctcggcatatccacgtcggagataaagatttcccttgcagtggaggaaaaatacgccgacgccgctatgaacgcactcctgcgcgaatttgaaatgtacccgaactgaatatcagccgaacatcatgtctcttgccacaccgagagaggggagcattatgtccggcttgtctttttcttctgcggcgtcaacatcgtccgttgtgcattctcccgtgagaacaaggcaggcggttattccgtggcggcgtcctactgctatgtcggtgtagagcctgtctccgaatattatcatgttttccttagcctcacccgtaatctcggagatcatgtcgacggtttcgcggtacggctttccgaagtacatgggttttacgcctgttgaagctgtgattaatgccgcaatagcgccgctgtcgggaatgaatccgttctcggtagggcagttgaggtcggggtgtgtcgagagaaattccgcgccgtaacggatgaagtcgcatcccacgacgagcttttcgtaggtcagccccgtgtcgaagctgcttacaacaatgtcggcgtttcttccgtccggctttccgttttcgtcgcatacaaggtcaactccgtcggataaaaactgcctgtacagagcgggagttccgatgaggtagaccttttttccttttctgttccgtgtgaggaaagcggaggtgacgttgcctgatgtgcaaatctcgtcgtcagtcggagcaaaaccgagctttgtcagcctttcaacgtaggttttcgggtcacgggaagcgttgttcgtgaagaaaagtatcttcctgccgtccgcgcggagcttctttataaagtcgatggcgaagtcgaacgggttgtttccgaggtagatagtgccgtccatgtcgaacacatagagtttcttcttgctcagcagggattttacttggtcatagtttttttcggtcagcatatgtttttcctttataaataaacccgcctgtgtgtgagacgggagtttttgttatcggtggggaagagatgccgcgctcgggtaaagctaatggttagtcattgccgattgattattttcagctttcgtgagggattctgcactcaaatacctgatgctgcccacagtagtctccggcggctgcagggtcatgaggtgtttcggagtgttcggttgcgtcctctatatgtacggcgtcgtgcagctttatgagttcgcatgatttctcgtcgtgggagtcaaaacttctctcaaagtagccgcagctttcgcagtagtacgcattccatgagagggttttgtcaccgttcactgcctgttctccgcagcacagtttcatgttttcaccgcaggcaagacaggacacgctttcttcttttgagaaaactccggcggcaaatacggagcacaccgaaattgctgtaattaaaacgaatacgattaatgcgcaaacgagagatttcttcatgtatgtatctcctaggataagacttggctttgtcctcacgcggcaaattcttcatatatagtataacacaagggagagcgagacgtcaatgccaaaacaataaaaaatagttttttaatatttcccaaaaaacgaatacggttgatttttatcctatgttgtgatatgataatgaagtaacaatgcaattttggagtaaacaatgtcaggaaaaataatcataggtatagatataggcggaagcacaacaaaaattgtcggattcgatacgtctgacggaaaaagagagcttattcagccgatttttgtcaaggcaaccgacccgataacctccgtctacggcgcgttcggcaaattcctcgactcaaattcactgactcttgaagatataaagaaggttatgataaccggcgccggctcgtcgtatgtgtcaaagtcgatatacaacctcccgtgcgaaaagatagcggaattcaaatccataggactgggcggactttatctctcgaagctcgacagcgcgataatcacaagctgcggcaccggcactgctcttgtctacgcaaaggcgggagaagaaccgaaatatcttggcggaacgggcgtcggcggcggaatgattattaacggcaaaatatactccggatt

SEQ ID NO: 738 - DNA, 5290 bp, Unknown
  16S sequences of unknown bacteria
agggctttttcccgtagtcgccgtgccgctggctttctttggtactttctttcgcttcgaaagaaagtactgccccactcggggcggcagccccaccattcgcgccgtagtcggcgcgtcaggcccccaaccggggcaaggggtatgcgcctgcgggcgcaccaaagagctttccgctcgccctttggaaaccttcgggcaccgaagttggcgagaaacccgtagacggcaagtcttgtttccacgccagagttggcgtacaacgacacaagcaggggtgcttttctcccaaacaaaatcgccgcttgcaaaaaccccacacctgcggtcacaagaagagccaccccggcccctccgggttctaccccctcccctcccccgcatagactttccccggagccaaatcacactcccagctccagagaggaagggaacgccccatgcgctatttcgccggtggtaatacatcacagggattctgtacccgtttcgaccacatcctgcccaaagaacagcagaaacgaatgttctatatcaaaggcggccccggcgtgggcaaaagcagcctgatgaaggccgtcggcaaggctgccgagagcgcgggcctccgggtggaatatttctattgttcctccgacccggagagtctggacggcgtggctattcccgaaaaaggcgccgccctgatggacggcaccgcgccccacgtgtatgaccccgttctccccggtgcgagggatacccttgtttcactgggcgattttctggatgaaaaggccctccgcagctcccgggaggaactgcaggagacccagcgtcaaatttccgcccgtttcacccgatgctatcattatctggccgcggcggcgcaggtgcgaaaggccgcctgtgccggagaggaaaagcccgctgccatgcgcgccctgctgaaggactggacggacgttctctcccttcggggcggcgaaggccgctgccgccagctgttcggcgaggccttcaccccggcgggactggttcgccgcacagagtttcccaaggagacccgccggtttgagctttgctgcccgctgggctgccacccggacggcctgatgaaacgactgggcgatattgtcgccgcccgcggtcttgaccgcatcgaactgctggacccgttggagccggagcacgtgcggcagctctatctgccgggtcacgacctgctttttggttgcgcccctgagaatactcccgacgctctccccccggaacaactctttgccctgaagccccgggaggaagaacgcttcgaccagaacgcctatgaactgctctgccaacgggccgtggagcagctttccgccgccaaagccctccatgaccggctggaagccccctacatccgctgcatggatttcctgaaatggcaggcaaagctggactggattctggaggagctttctctgttgccttccaagggcgaaaacgccctgtagcactgaacgggaaaagggttttcaatcccggaaaagtatgataaaatgaagggcgaaagaacatttttgggttctttcgccttttgttatcccgtttttgatttttaatttcggaggcgacctgagtgcccacagtcggcgtgatttcccttggctgcagcaaaaaccgggtggatacggagctgatgctctccatcctgaaggagcacggctataccattaccgcggatgaaaaggaggccgaggtgctgatcgtcaacacctgcggcttcatcgaccccgccaagcaggagagcatcgacactctgctgcagatggccgaatacaagcgcaccggcaagtgcaaggtgctggtggctacgggctgtctggcccagcgctacgaaaaagagctcatgactgatatgccggagatcgacctgctgatgggcgtgagccagtacccccgtctgccggaggcgctggaggcggccctgcacggcaagcgtcagagcttctgcggccgggacaataccatcctgtccggcagccgggtgctgaccaccgcgccctattccgcctacatccgtatcgctgacggctgtgacaaccgctgcgcctactgcgccatccccctgatccggggcggctaccgctcccgggagatggaagacgtgctggatgaaattcgcacgctggcggaaaaaggcgtgaaggagcacgttctggtggctcaggatacctcccgcttcggcatcgaccgggtgggtcattcccagctgccggagctgctggaacgggcggcggagattcccggcgtggaatggctgcgggtgctctactgctacccggatgagatcgacgaagaactgctgaacgccatggcgcgccatgacaatatctgcaaatatctggacctgccgctgcagcacgccgatcccctgcttttgaagcgcatgaaccgccggggcgacccggaaaagacccgtcagctgctgcaccgggcccgggaaatgggcttcaccctgcgcactacctttatcgtgggcttccccggcgagacggatgagcagttcgcccatctgatgggctttgtgcgggaaattcagttcgaccggctgggtgctttcacctattcgccggaagaggatacccccgccgcccggatggacggccagcttcccgaggagatcaagcagaagcggctggacgagctgatgactgcccagcagaccttctcgctggagcggaaccggctgcggatcggcacggaagaaaaggtgctggtggagaccgtggacggcaaaggccacggcgtaggccgcagcgcgcaggaagcgccggacaccgacggcgtgatcaagctcaccggcgtttccgaggccgatctggggcagttcgttcgcgcccgtatcaccgacgcggaggtctacgacctgcgtgccgaacgcatcagagaggattgacgtccatgaagaacctcaatattccgaatcgtctttcgatcctgcgcatgtgtctggtgccggtgtgcgtgctgctcttgtacctgcccggtcagaccgcccgcaccgcggcgttgatcgtgttctgcatcgccgcctttaccgattttctggatgggcagattgcccggcggcagcatatcgtcaccaccttcggcaaattcatcgacccggtggcagacaaactgctggttttaagcactatgatcgccttgtgcggtctgggcgagtttccggcctgggcctgtattgtggtgctgttccgggagctggccgtggacgggctgcggctggtggcttcccagcagggcagcgtgatcgccgcaggcaagctgggcaagatcaagacctgtacgcagcttctgaccctgattctgttcctgctggacggccgcgcttacagcggcagcgaattcacggtgggaaatctgatggtctggcttgtcgtggccatgaccctctggtccggcattgactatttctggaagaaccgttccgtactgagcctgaaggaggaaaccaaatgagcgagtcctctctggctccgcaggtggttcggcaatttaccgaaaaggggctgacgcttgggacggcggaaagcctgacggcgggcctgatcgccgctacggtggcggatgtgtccggcgcgtcggcggtgctgatgggcggcgtggtcagctatgacccccgtgtgaagcacgaggtgctgggcgtttcgcaggaagtgatcgacaccgtgggcgtggtcagcgaggcctgtgccctgcagatggcctccggggcgcggaatctgctcaaggtggacgtggccctgagcgctacaggcgtggccggccctaccggcggcacggcggaaaaccccgtaggcacggtctggctgggtgtaagcaccgccaaggaaaccgtcgcccgccgctttcactttgacggcgaccggcaaagcgtccgccgccagacggtggaaacggcgctgcggctggcgctggacgtcctgcattctaaataacaaacgatcattcgacttagatacataagggggaaaagggcatggctccgaaaaaggatacggccaaaaaagagatcgccagcaaacagggtgatcttcgggaagaaaaaatgaaagcgctggaaagcgctctggcccagctgaacaagacctacggcaagggcgcggtcatgaaattcggcgacgcggcggcggacgcgaatctgcaggtgatccctaccggctgtctggagctggacatggcgctgggggtgggcggtctgccccggggccgcgtggtagaaatttacgggcctgaaagcagcggtaaaaccaccgtggccctgcactgcgtggccgaagcccagaaaatgggcggcgtgtgcgccttcatcgacgcagagcacgcgctggaccccgtctacgcccggaagctaggcgtaaatgtggacgagctgtacatttcccagccggacaccggcgagcaggcgctggagatctgcgaagcgctggtgcgttccggggccatcgacatggtggtcatcgactccgtggccgcgctggtgccccgggccgagatcgagggcgaaatgggcgacagcttcgtgggcctgcaggcccgtctgatgagtcaggccctgcgcaagctgaccggcgtcatcgccaagaccaacgcggtggccatcttcatcaaccagctgcgcgaaaaagtgggcgtgatgtacggcaaccccgagaccaccaccggcggccgggcgctgaagttctacgccagcgtccgtctggacgtgcgccgtggcgaacagctgaagaacggctccgaggtcatcggcaaccgcaccaaggtcaaggtcgtcaagaacaaggtggccccgcccttcaaggtggccgagtttgacatcatctacggcgagggcatctccactgagggtacgctgctggatatggccgtggatcgggacatcatccacaagagcggtgcgtggttcagctacaaggatcagcgcatcggacagggccgtgaaaacgcccgcctgttcctgaaggacaaccctgaaatcgccgccgagatcgacaagatcatccgggacgaagccaagcaggctttggccgctggaaagggcgtagccaaggaagaagcccccaccgacgaagaacgtgccaacgccgacgtggacgaagatcccgatctggcgctgctggacgaggagtaattcccgaaggtggcattctttcgacaactcaatcaaccttccaaaagaagcgtcttcggacgcttctttcagtgtgtcaaaaaagtggaggtgcaggaggcactgctgccactcaatcgtcgcagggac

SEQ ID NO: 739 - DNA, 2443 bp, Unknown
  16S sequences of unknown bacteria
gagacagggtatatgctgcagcagtgattctcccgccgggacggctgattcccggcctgaacgattccaagaagctgactgcccggcagcgggagatactgttcgatcagatttgtgcggaagcgcaggcgtatgctgttgcttcggtagatgagcagactattgatgtcatcgatattctcaatgcccgtatccgggcgatggatgaagcgatcaggcagctggtgccgaagccggattttgcattgattgacggaaaccgagatcatgggagccgctgcagtatcgccataccgcatgcgctgctggtcaaaggtgacagccgtagcgccaacattgcggcagcttcggttctggcaaaagttagccgtgaccattatatggaacgcctgtcagagaaatatccagagtatggctttggacagcataaagggtatggaacgaagcagcactatgcggcgctggaccgctgtgggccctgtccggcccatcggcgcagttttctggtgaaatgggaggcgcggcgcagtgaatgcaaaaaagttgacgggtgactggggcgaagcctgcgtggcggcgtatcttcgccggaatggatatcgcattgaagcgagtcagtttcgctgccgtatgggagaggttgatttgattgccagccgggacggtgtgctctgctttgtggaggtcaaaacgcgggcggaaacagcgcatggactgccgcgggaatttgttggcccttccaaacagcggcgcattcgcactgcggcggcacagtatctgatgcgttatgcattggattgtccggttcgttttgatgtggctgaagtttataccggcggtgtcctggacgaggcgaacgtgaaaattgagtatttggaagcggcctttgaataaagccaaacgcgagcaaaggaggaatgccatgctacctttttcattttttgacgcccattgtgatacgttaagctgctgcttacacctggggtgggatctgcgcagcagccctggacacacagatttggagcggggcgggcaatttcagcgctatgcgcaggtgtttgccatttttcacgatgcggcccgggcgccgatggacgggatgttcgccgagtgctgtcggcaggcggaagaattttttgtgcagatgaaacggaatgcggcgctggtggcgccctgccgcacggcggcagatctggaacagacagagcgcgcgggaaaatgtgcggccatactgtctattgaaggagcagatctgctggaatgtgatccggcccgtcttgagacggcggcgcaatggggcgtgaggctcattaatctcacctggaaccgggccaatgctttgtccggttcccatctggaggagccggagcgtgggctgagtgcgcagggaaaagactttgtgcgccgtgcgcagagccttggcattttggtggatgtatcccatctttccgacgcgggcttttgggatctcatgaaccaaagtgaaaagcccgtggtggccagccacagtgatgccagagcgctgtgcccaaacacaaggaatctgaccgacgaaatgttccggtgtatttgcgccgccgggggctttgccggtttgaatttctacacgccgtttctgggactcgatcattctctggacgccgtgttcgcccatttggagcatttccttgatctgggcggtgaaaagtatgtgggctttggcggcgactgggatggctgtgaccggctgcctgacggtatctgcggtgtgcaggacgtggaacggatttatgaggggatgctccggcgcaattacagtgcagaattgatcgaggatctcttctatagaaatctcaaacgggtgatttttgagcaatcagaataataaggagcgatgcaactatgcattatttgagcacgagagaccgtacgctgcgctttacggctgcggaagcgatcaagcagggcctgtcacgggacggcgggctgtttttgccggaaatgctgcctgcgctgagcgcccggcagatgaaagcgatggagtccatgtcctaccaggagcgggccgtggagattatgagcctgtttttggaggactacagccgcgaagaactgcgcgcgtttgcagatgcagcttacagcccggaaaaatttgacgatcccgcagtggctccggtgcggtctctggacgcggcgacgcacagcttggaactgtggcacggtcccaccagcgcgtttaaggatatggctctgcagatgctcccgcatttgctgtatgccagcctgaaaaaaaccggtgaggaaaaaaccgcctgcattctggtggctacctccggcgacaccgggaaggcggcgctggaaggtttccgggatgtggatcacactaaaatcatggtgttttatcccaaagatggcgtgtctgaaattcagaaactgcagatggtgacccaggaaggcagtaatg

SEQ ID NO: 740 - DNA, 5491 bp, Unknown
  16S sequences of unknown bacteria
ttgcgggtcaataagtcatgctttttcatgcaagcatgaaacgcatgaccttttgaccctggtatcatcatcatgatatttgtctaaaagataaattgcacagggctgctgtgtcgcagggatcctcaggtcggccaaaaagggccggggttgagaggagatgcgatatggcggctctgtgtttatctcagactcgaacgcagagaggacagaaaatatatggaattagatgcatcactggatacgttaaagggcatcggagagaaaacaagacaggtatttgaccgcgccggggtgtcgaccatcgaggagctgatcagctattacccgcgtacctatgagcggtatgagaagccggcagcaatcgcatccttaaaggaaggggattttgcttctatactcggaagactggagggtccactggagacgcgctatctgcgcgggctttcgatctcgagtgccgtgtttggcgacggcattgagcatattctcgtgagctggttcaacatgccttatctgcgtaattcactgaagagcggcgtgctctatgtgtttcgcggaagaatcaaggcaaagggacagcggctcattctggaacagccgacggtatttcgcccggagcagtatgagggactgatcggtacaatgctgccaaactatacgctcgtcaaaggactgaccaatcagatggtcacgaaagcggtaaggcaggtgattgcggataaacagcttctgtctgatgcaatgccggaggcgatccgggaacagtatgcgctggcagagtataatttttcgatcgagcagatccattttccatcgtcggatcaggcgctgcagctggcaaggcgcaggcttgtatttgatgaatttttttatttccttttgcagcttcgcggattgaaagaacgcagagagcgtgcttataaccagttccatatgaaaaaagcccctgagacgcagcagctgatcgggcggttgccgtatcagcttaccggtgcgcagcagcgggtatggcacaccgtcgagcaggagctgcagggaaatgcggtgatggcacggctgatacagggggatgtcggatccggtaagacgatcgtggcgatcctcgcacttgtgatggcagcggccaatcatctgcagggagcgcttatggtaccgacggaggtgctggcgcggcaacattttgcttcttttaccgagctgatgggaaaaaacggattcccgtttcgtgccgagctgctcaccggttcgatgacggcaaagcagaagcgggaagcctatgccagaatcgcttccggtgaggtatcggttgtgatcggtacacatgcactgattcaggaaaaggtacagtaccagaatctggcgcttgtgatcacggatgaacagcaccgatttggcgtgcgccagcgtgagacgctttcgaaaaagggtgcatatccgcatacaattgttatgagtgcaacgccgattccccggacgcttgcggtcattttatatggagatctggatatttccgtcatcaatgagatgcctgcgaaccggttgccaatcaaaaactgtgttgtgaatacgggataccgaaagaaagcctatgaatttatccgccgggaagtcgaagcgggacatcaggcgtatgtgatctgtccgatggtcgaggaaagtgaggcaatcgatgcggagaatgttgtggaatatacggaagtactgcgcacggagctgccgcctgcgtttacgattgagtatttgcatggaaagatgaagccgaaggaaaaaaatgagattatggaacggttcctggagggggagattcaggtgcttgtctccacgacggtcatcgaggttggggtcaatgtgccgaatgcgactgtaatgatgatcgaaaattcggaacggtttggactggcacagctgcatcagctgcgtggacgggtcggacgtggcagtgcacaggcgtactgcatttttctgcataccttggacggtaagcatatccgggaacggctggatattctctgcaaatctaatgacggatttgagatcgcgaatcgggatatgcagctgcgcggaccgggggatctttttggtgtgcggcagagtggactgctggattttgcgcttgcggatatttacacagatgcggataccctgcagcaggcaaatgaggcagtaggcgaactgctcgcaaaagatccaaaactggagcaggaaggacattctgcactgaaattaaaatttgaccgccttctttttcatcaaaacggacaaatcagtctgtgattttaagggaatttttggcttgcaagtttacttaatttattatatcatacaattaatatggcagtaagggcagtgccggtattatgaaagggccaatcaagttcccacttcaattacgcaaagtaataagaaggagattgggtttgtataaataactgtcgtggtttatgaggaggaagtagtatgagaaaatcaacaaaagctacagcaaaagcgactgcatcgcaggcaacggagaccgtagcaaagaccgtagagaaggcagtaaaggcagcggagaagacgacgaaagcagttgctgagaaggctgaggaagtaaaggaagcagtaaaagagactgcaaaggctccggcaaagaggacaacgaccagaaaaaccgccgtcaaggagactgtatacctgcagtatcttggcaaggagatcaataaggatgatctcgtaaagcaggtaaaggatatctggaccaatgagctgaagaataaagcaggtgatctgaagtccgttaccctgtatctgaagccggaagagaacatggcttactatgtaatcaatgatgatgtaacaggaagcattgcactgtaaggaagatccgataagtgccaagaggcagctgtagtgatacggctgccttttttctaccggacatattaagcttcaactgcaaacggggattacaatgttcccttatgctgtgtcagaagagaaaggcaggctgtatggcacgaaagaaaggaaatgtggaattccgatattatgagattccgcaaggagagccggtgctggctctgtatggagatgcatggatccggacttatggatatgatgagaaggatcagccgatactggatctccattttcacaatctgctggagatcgggctgtgcatctacggagatggggagattattttggaggagactgcgtttccgtatcaggccgggacgcttaccgtcattccgaaaaattatccgcatacgacaaatgcggcaaatcaccagccaaacaaatgggagtatctgtttctgaacattgataagcttcttgcagaattctatccggataaccgatggctttcagagcggctggcttaccgcatcagaaaatgtgcctgctgcacgacggtgcaggagcatccgaccctggcattgctggtacgccagatcctgaaggagatgcaggtgcgtgaagaattttatcgggagacgacaatgggactgttgcgcgcgctggtcgtggagatggctcggctgaacccggagctgatcgaggaatccggaagggcggaaaaaaaccgaagagcagatacattgcagattacccgtgcgctggagtatgtcggagaccattatgacagggagattaaaataggggatctggcgcagctgtgccatctgagtgagacgcatttccgccggatttttgcgcggtgtatgggtgtacacccgattgattatgtaaatcaggtacggatcaggaatgcctgtcagctgttgaaaaagacaaatgattcgatcatggagatatctattaaatgtggatttggcagttcagctgcttttaacagaaatttccggaagtttatgggcgtaacgccgaatgagtggagaaagcttccggagaattacgaaagaagactgacgaaaaacaatatttcatattatgatggttggtaatgcaggtcaagatgcacaaaaaatggtcgaatatgagcaacatgcaatcgaatatgatgagtataagaatgggaaggtgatataatatgcacaagaaataaaaaaataacggcctgaaaaaagcaaaatatacaaaaatgcggtggggtgtagcagatcgtatatgcgatagaaggtcgaaaataaggaggaatttcttatgaaactcaaaaaggtattggcatgtattctggcaggtacgatggtaatgtccatggcatccgtgatgacggcaggtgcagcaagtgacgaggacaacaagctgactgtatggacttgggatccgaacttcaacatctacgcaatcaataaggctgcagagatctatgcaaaggatcatgaagggtttactgttgaggttacggaggttaagtcgaatgatattgagacgaagattacgaatgcagtacaggctggtgatctgagtaccttaccggacattttcctgatgcaggataattccttccagaagtacgtgaccttctatccggatgtattcacatcactggcagattccggaattgatttcacacagttctccgcagcaaaggtcgcttattctaccgtagatggtacgaattatggtgttccgtttgataatggtgctgtagtcaactgtctgcgtacagacttgctggaacaggccggatataccgtagatgattttaccgatatcacatggtctgattacatggagaaggcaaaggtagttctggagaagaccggacttccgatgctgactgcacaggcaggctccccggatatcatcatggagatgctgcagtcctgtggagcatccctcttcaatgaggatggcaccggcaatatcgcagaaaatgatgtgctgaagaagtgtgttgagatctatgcccagatggtagcagacggcacactcgtagaagtaacagactgggatcagtacatttcttccctgaacagctcgactgtagcaagtacattcaacggctgttggatcatggcttccattcaggcggcagaggatcagtcaggcaagtgggcgatcacgaatatgccgaagctggacgatgtagagaatgcaacgaactactcaaacaatggtggttcttcctgggcaatctcttccaacaccagccacaaggatctcgctgtagacttcctgaacgctacattcgcaggcagcacagagctgtatgatgatgttatctccaagggcgcacttgcaacgtgggcaccggcaggagagtctgatgcatacaacgtaccggttgatttctacggtggcgataccgtttatgcaaagatcgttgattttgcaaccaagaccccgtccaacaccaccggcgcattctattatgatgcacgtgatgcagtaggcgttgcactttccaacattacccagaccggtgcagatgtagcttccgaactgcagaccgcacaggaaacacttgacttcaacatgggaatgtaatgatgccagggtcaaaaggtcaaaaagccgttcatgcttgcatgataaggct

SEQ ID NO: 741 - DNA, 7248 bp, Unknown
  16S sequences of unknown bacteria
ccgccgcaggaaagggggcgaaggcagcgcatgagaaggaaagaatctaaggaggaaggccgtgagatcaaggacaacatcgcggaaaaatactccaaggtgagccggccgatcagccgtttttccaagtggatctcggcatggatggaccgcatcctgttctcacagcgttatggcaagctggtggccctgctgctggcggtgttcgtctatgccatcggcgacagcgcttcttcgctgtttgagacgaaacaggtctacaccttcaaggcgcagacggtgaatgtgctggtcaatgaggagacgtatgaggtcagcggcctgccggagacggtggatgtgcagctgctgggcgacatcaacgacctgcagatggtccgccagcagaactcgctgagcgtggtggccgatctgcggcagctgggcgagggcaggagcgacgtcgagctggaggtgcagaacatcccttcccggctggaggtcatcatcgagccgggcacggtgagcgtggagctcaagaaaaagcagacgcagacttatgcgctcggctatgatttcgtcaatcagtccgagatggacgcgacatatgatctgggcacgccggaattcgatgaagacaccgtcaccgtgcgcgcgagcgaggatacgctgaaccgcgtctcttatgtgaaggcgctgatcgatgtgagcggggtgacgagcgattttgagacggatgcgcccttggccgcatatgatgagaacggggaccggctggaggtggacatcatcccttccaccatgcacgtctcgatcagcgtgacgcagccgaagaagaccgtgccgatcgaggtcgtccaggtcgggacgatggaggaaggcctggccatctccacctgcacgctctccgatgaggagatcacgctgtatgccaagcaaagcgtattggatcagatcgatcatatcgagatctcgctgccggtatcgaacatcaccaacgatcgcacgctggcgatgccgatcacgctgccgcagggcgtgacgcaggcgagcctgagctcggtcagcgtctcggtcacggtaggcgagcggacctcgacgaccttcagcgacgtccaggtgcgcctgatcaatcaggaggcagagatcgacggcatgccggtcacgctggatccgcggacggtgagcgtcaccgtgagcggcagcgaggagatgttgcaaaatatcacgaaagaagatatcatggtgacagctgatctgaaagggatcaccgcggcgggcgaacggcagctgacgctgagcgtgagcgggtcgaaccgcctggtggaatatcagctggaaacatccgagatcacggtcaccgtgagcggttgatgaaaggatgaatgaaatgggaaaatacttcgggacggacggtgcgcgcggccgcgtgaacgagacgctgacactggacatggcagtgcgcatcggccgttatctgggatggcattacggcaagggaaaacgcgcccgtatcgtcatcggaaaagatacccgcctttccggcgacatgttcgaaatgggactggctgccggcgcgacctcgacgggcgcagatgtatacctgcttggcgtctgtccgacaccgagcgtgtctttcctggtgcgtagcgaatcatttgactgcggcatcatggtcagcgcgtcgcataatccgtatcatgacaacggcatcaagctcttcaacagcgaaggctgcaagatgaatccagagatcgaagcagagatcgagagctatatcgatggagagatcgacgtgccttctgcgctgaatgatcatgtgggccgcgtggtcagctggagcgaggggctgaagatctatgaggaatggctcatgggcatcgtggacgtggacctgaacgggatgcggatcgctctcgatctggccaacggcagcgcgacggcgaccgctgcgcagaccctgcgggcgatgggtgcacaggtggatgtcatccacggcgagccaaatggcgtgaacatcaatacagactgcggatccactcatccggaaagcctgcagcgcatggtgcgcgagggcggctatgacgtcggctttgcctttgacggagacgcggacaggctgatcgccgtcgatgagggtggcagtctgttcaacggcgactatatcctttatgcctgcgggcggtatatgaagaagaagcggcggctggcacacaatatggtggtgaccactgtcatggccaacctgggcctgtatcacgccttgcgcgatctgcagatcgactatgcgcagacggcggtcggagacaaatatgtctttgagtgcatgcagagcaacggctacagcatcggcggagaacaaagcggccacatcatcttcctggagcatgcggtgaccggagacggtctgttgacagcgctgaagctgctggagatcatgtgcgatgagcacaagtcgctgaaggagctgggcagcgagctgttcatctatccgcagctgctcgtcaatgtcgaggtccaggacaagaaccggacgatggcggacgaagggctgaaggcgaagatcgccgaagtggaggcgcagctcggcgatgaggggcgcatcctcgtgcggccaagcgggaccgagccgctggtgcgcgtgatggcggaggctcgcagcgatgagctgtgccatgactatgtgtatcagatcatcgatttcatccgggacaatcagctgtgaacaaagggggaccatgccgcgcatggcccttttttttcatcacatcatttgcgatgaagaaacataaaataacactgatttttctctgactttttgctacaatagaaacgaagtctgacatgatacagcaagaaggaaattcaggtgatgacgatgaaaaaagtaatctgtgttgtagaagatgagaaggcgatcaacgatttggtcgcacagtatctgaagaaagaaggatatgaggtaagatcctattatacgtatgaagaggcgatcgcgcatgtgcaggacgacgatgtgcatctgtggatcctcgatatcatgctggatgataagagcggattcgatctgatcgaggagatccgcctgcagggaagggatatccctgtcattttcatgtctgccagagacaaggaattcgaccgcatcatcggtctggaaaagggaagcgacgactatatcacgaagcccttttctcccaaggagctcgtgctgcgcgtgaacaacgtgatcaagcgcgtctataagaatgacaacaaccgcattcagatcgacggctatgagctggatgaggaacagcgcaaggtgttcgcgggcagcgatgagatcgatctgacgaccaaggaattcgatctgctcatgatgttcatcaagaacaagggcattgccttttcacgggacaagatcctggaaaacgtatgggaagagaattattacggcagcgaccgcgtggtggatgacacgctgcgccgcctgcgcaagaagctgcctaatctcaacatccatacgatctacggctatggctatcgtctgggctaggccatgaagcggttttctgaatttatcaagcagctttcgctgtcacagcagctggcagcgatcatcttttttctgatctcgttttttacggcattcttctttatctatctgaccggaagcgtggaaaatgtcatccgggaacagatgtacacgacgctggatacttctcaggatatgatcgtcggcctgtacagcgggcaggacagcagcaacttcacgcagagccagctgcgccgggcgctcaccaattcgcagatgcatctcatcgtcgatatggaagaggtcattgccggtgaggaaccgcagctgcactatctgagcagcgagtcggatgcggcgctggtgcgggaagagctcagcgaaaacagcgcgctggtagagaagatgatctcgcagggcgtcacgatctatcagaacggactgaccagtgccagccatgggcatatgaagatcaacgggcaggagtattgttacagcgtgcggctgatgaacgacggttcgagcaatgtcctcatgtcgtatatggatgaggagtatgcccagggagccaaggacatgatgatcaacagcatcctctacatcacggtgatggcgttctgcttcatcttcctgatcctgatgctgtgggtgatcacgctcatccatccgctcaaccagatccgcaattacatcgagaagatcaaggcgggcaaggaagcgacgctgaagctcaatcgcaaggatgagatcggcgagctggcagacgcgctggtgagcatgcgcgaagagctgcagaagcaggagaagaccaaggaggagatgatccataacatctctcatgacctgaagacgccgatcgcaacgatcaaatcttatggcgaaagcatcaaggacggcatctatccgtatgagacgctggagaagagcgtggacgtcatcatcgaaaacgcggaccgtctggaggccaaggtgcacagcctgctttatatgaaccgggtggaatatctcatctcgcaggacaacaacggcgcggtcacgaatatgaaggatgtcgtggagaaggtgctgctcaacatcgcggtcatcaagccggacatccgcatcgagaccgagctggaggagatcaccttcgagggcctggaagaaagttggcgcgtggtggtggaaaacatcctggaaaacgcgcagcgctatgcgcagtctgtcatcaccatccatctgaatgagcaggagggactgacgatcgccaatgatgggccgagcatggatgagagccgcatcgagacgctgttcaagccgtttgagaaaggcgagggcggacgcttcggcctgggtctgtccatcgtggccaaggtcgtccgggcaaatcattatgaggtgcgcggggaaaataccgcagacggcgtgatcttccgcatctatcgcgatcagcccaagaaagcgaaacaaaaaacagagcggcgcagcagacagcgcggcgctaaaaataacaacgaagcttgaacaaaccgggagcgttatgcctgactgtgatcaggagacgctccttttctgatgtgtcgggcagtgtgtcaaaacaggcgaaaatatcctttgtaaaaatgtgccgaaaaatcataaaaatacacaagtaacacctataaataaaggagttgttgatacacatcgttatagtaaataaataataaaagatttttacttttttttgtgggataatgtgtgaaagggctttctccttgtgctacaatgtacatagcgggaaacagttggaaaactgcagctgtttccaaagaagagaccccataagatgtacgggcgccagacaatgagacgcagtgagtaacgatcatgtaaaattcattcagttttcagaatgatgccggtgcccgcaaaaagggatgaaggaggaatgcgggaaaactacgatcaagataatatttgggaaaagaaaaaaataaagaccaaggcgaaaggagaaaaggatgtttaagaagcttgtatcgatcggacttagtttgatgatgatgcttggagtgacaggttacgcaccagtgagcgtgcaggccgctgacgatggacatctgggaagcgtgacgtcagtagaagtcgacgcggacgataagaacatcgtgtgggtgaccttcgataacggatatcagggaaagatcactttcctcgataacgatatcttccgttacaatgtcgatccgagcggacagttcaatgaatacgcacaggtgtacaacggttatccgaataccgcaaagatccagcagtatccggattcatccgatgcttactcacaccctgaggcaagtgttcaacagaacggaaacagttatgagatcaaagcgggcaatgtgaccatcagctttgatgaagctgccaggatgagcatcaaggcaggagataaaacagtcatggaggaaaaggaatcactggatttccagggatcacgcaccgtgcagacgctggtcaagcacgacgcgaccaattataattcctcactgcctgagaactattttggcggcggaacgcagaacggacgcttcgtgcacaccggcaatgtgatcaacatcagtaatgaaagcaactgggtggatggcggcgtggcatcaccgagcccgttctattacacgaccaacggttatggcgtgctgcgcaatacgtacatggatggaagctatgacttcggatccacggacgccagcaccgtgacggcaagacacaatgaaaatgagtttgacgcgtattatttcgtgtctgacgcggcggatggaagcagcgtatcacaggatctgctgcagggatacttcaaggtaaccggaaatcctgcgctgctgccgatgtatggattctatcttggccatctgaacgcgtataaccgtgacgcatggtcagattctagcgcagacggcggtacggcatgggagatcaagggcaatggttcttatgatgagcctggtgaagtgacatatgaaaacggcggaaccggctatgtgatccaggccaatcagcaggctgagacgctgaatggatatggtccgagctttgcgaccgacaatgtgccggatggcgtgacatattcctataaatattccgcacgcgcggtattggatgaatataagaactatgacattccatttggcttcttcctgcccaatgatggttatggcgcaggctatggccagaacggctttaacatgaccggcggcgtgaatgcggatggatccagcagtgaagcgcgtctggcagcggtagcggccaacgtcgccaacctgaaagatttcgcagactatgccaaggcaaatggcgtggctaccggtctgtggacacagagcaacctgacaccggattccaacaataacacgtattggcatatcctgcgtgatttcagcgctgaagtgggtgccggcgtgacgacgctgaagaccgatgtcgcctgggtaggctatggttattccttccagctgagcggcgtcaagcaggcttatgacatcatcacgacgaaggcgtatgaggatggccgaaacaacacccgtccgaacatcatctcgctggatggctgggccggatcacagcgttacaattcggtatggacaggtgaccagacgggcggaaactgggagtacatccgtttccacatcccgacattcatcggacagtcgatgagcggaaatccgaacatcggtagtgatatggatggtatctggggcggcgcaccgatcatcgcgacccgtgattatcagtgg

SEQ ID NO: 742 - DNA, 5188 bp, Unknown
  16S sequences of unknown bacteria
ggataaaggatacgagtatcttatcaaaaaaaggagccgtcgggattttcccgctgcggctcctttttttatttagtttattttaacgttttcccaaagggtgttgagatagtccagcatatcggcgtcgagattgcggtaggcataggtgttatattcgcttgagaagttgccgagctcgggatagagcaccgccatggcctcttcgcccatttcgtcgatgtagtccgtgcttgtatagacggcgctgttgggagaggcatagtaggtgtattcggcattggcgacggccggctcctccgacagcatatagtttatgaaaatctcggcaagctccttgttatcggcacaggaaggaatgcacatggcgtcgatatagaagtttgttttgtcgggataatagaatttaaggtcgacgttttccgactgattgtccttcatggtgaaatagtcgccggcatagtaggagccgacggcggcctcgccggattccatcatgttgaaaatctcgtccataacatagctgtgaacaagggggcgctgagccagaagctcgttgtaggcggcgtcccaatcggccttgtccttggtgtttacgtcaagaccgagcttatacatggcggttccgaaggcgtcgcgggaattgttgaactggacgatacggccggaatatttggaattccacataaggtcccaatcctttgcgtcggcctcgtccacaacgtttgcgtcgtagatcacaccgactattccgtaggcatagggcaccgaataaagatcgtctgcgtcgtagtaaagacccttgaaattgctgtcgatgttcttataattcggaatgttgtcgaaattgaggggctgtaaaaggccttcgtttaccatgcgggcgatcatatagtcggaggggatgatgacgtcatagctgactgcgccgctggaaattttgttgtacatatcctcgttggaggcataggtggtatagttgacgttgaccttttggccgtaggtctccttataccatttttcaaattcttttaccgtgtcaaagctgccctcgctgccgtcggagatgtattcgccccagttgtaaacgttcagggtgagtgtttctccgccgccgcagcccgtgagcatgatcgacatgagcatggatgcgatgataagaaatacgatttttttcattgattttcctccctttatctcaaaccgctttttgcggctttttcacggtgttttttggcttttctctttttctttgcctctttaagcgctttttggtcctcgtcgtccaccaaattgcttatgagaagcagcgacagcgtcacgaaaaagatgattgtggcaagagcatacattttcggtgtgaccgtctttttggtcatggcgtatatgcggatgggaagggtctgaaaaccgtttcccgaagtgaaatagcttatgacaaaatcgtcaagggaaagggtgaaggccataatggcgcctgtaattattccgggaagaatttcgggaagctcgaccttcaaaaatgccctcatgggagtgcagccgaggtcgagagcggcctcgggaagggctctgtccatttggcggagctttggaagcacctgcaaaatgacatagggcgtgcagaaggtgacgtgggcggcaagcatggtgaagaaattcaggcttgtggaaaggccgaaaagccgacccacaaaaacaaacatcagcatgagtgaaatgccggttatgatgtcgggatttgtcatgggaatgtcggtcacggtgttcatgaccgtgcgataccatttggagcgcagcttgtttattcccaccgcgccgagagtgccgataacggtggaaacggcggtggccgaggcggcgagaagcagcgtgtttttcaccgattcgagggtgcttcggtcggcaaacagctcctcataccatttgagggaaaatcccgaaaataccgaaaggcttttgccttcgttaaaggaaaaaatcagcagcacaactatgggagcaaaaagaaaaacgaaaattatgccgctgtatatttttgacgacagcttcatgttaatcccctccgtaaagtcgtttggtggtgaaatgcttcatgaccgccatgccgacgagcagtataagcattaaaataaaggcgatagcggcggcaaaatgcagattgtttgccacatactgtccctctatggcgtcgccgatgaggaaaaattttccgctgccgagcttttgggaaatgtagaaggtggatatggagggaatgagcaccatggtcactccggatataactccgggcagacttaaggggaaaatgacccgccgcagcaccgagccgccgttgcagccgagatcccttgccgcctcgataagacggccgtcaagctttgcgagaatcgaatatatgggcaaaatcatatagggaaaatagtcgtataccattccgattatgaccgccgtttcggttccgatgacgtgaacgggggagagaccgattttggcgagcagaccgttgattattcccgaatcctgcaaaattgtcatccaggcataggttcggatgagaaagttcatccacatgggaatcatgatgagggtcatcatggttttctgcacctttttgctcgcccttgccatgatatatgcaacgggatagccgagaaggaggcatatcgccgtggaaatgacggcgagcttaagcgaacgcaggaatataactatataggtgcgaacctcggccgagctgccgtcgtcgccggtgatggtgcttgtggcggtgaaaaaacgggtgatgttttcggtggtgaaggcaaaggaattgtcggtgaaggcgtaataggccacgaaaacaagcggaatgaccgtgaaaagcagcgaccacaccgaatagggggctatgacccctctcgagccgggaagatttgtttttgcgtgttttttcattcctcttcaccgctttccggatcggccagctcatccagctcgtttgagaaggaggaatagtcgccgaacattcccgaatattcggattttttcatgatgtgaatggcgtcgggatcgagggttatgcctataaaggcttcctcctccaccgggtcggtggtctgaatcatccatttgaagccgtcaatgtcgacaatggcttcgttgtgaacgcccataaaggtgaccgaggtgaccttgcccttaagccgtcccttttcgggggggacgatgtccacgtcctcggggcgtatgaccacgtcgaccggctcgtctttgccaaacccgctgtcgagacattcaaaaacctgcccgccgaaggaaaccttgaaatcctctttcataattccgtcgacaatgttgctttctccgatgaaatcggccacaaaggcgttgacgggctcgttgtatatgtcggtgggactgccgatttgctgtatctttccgtgactcatgacgacaatggtgtcggacatgctcagcgcctcttcctggtcgtgagtgacgaaaatgaaggttatacccgtgtttttctgaatttttttaagctcctgctgcatatccttgcgaagcttgaggtcgagggcgccgagaggctcgtcgagaagcagaaccttgggttcgtttacaagggcgcgggcgattgccacacgctgctgctggccgcccgaaaggcttgtgaccttgcgctgagcaaagcccgaaagcagaaccatggacagcattttgtccaccttttccttgatttcctttttggggaccttgcgctctctcaaaggaaacgccacgttttcaaagacgttgaggtgggggaaaagagcatatttctgaaaaaccgtgttaacatggcgcttgtgaggggggacgtcgtttatcttgtctcccatgaaaataacgtcgccgctgtcgggatattcaaagccgccgataatacgcagggtggtggtctttccgcagcccgaggggccgagcagggttataaattcgttgtcgtggatgtcaagacttatgttgtcgaggacggtttccccgtcgaaggacttggagatgtttttaagttcgattatttttttcatgctctcttctcctcatttgttttgcgggcaaaataaaaaacggcaggccgccttttggcagcatgccgcttgcacatcatttatgacgatgaaacccgaagcccgacataaaaaggccggtctcggcaaaattccccctttggggcgcatatgggtcaacatcaaatcacaatgagatcagagtctatatagcaaagattacttttactactcttattgatcatttcacaagttcatgccaaaggcacttcggttataaagtaaccaacttataaaactgagcttttaactcaaccaataaggcaacagaagttgccaaccgccccgcaaagggcaaattttcggcattcgacccggctgtccgtatggccttagccgaccttgtcggcggtcgtttaatcttgcttcggaacgctgtcccaattgagatcaaggtaaagtatatcacataaatttaaattgtcaatccctttcggggactaaaattcgggggctttaattgtcgttttttgtcccttttcccaaataggtgtgtattgtggaaatcaacttttcggtggaaaggggctttgccacatggtcgttcattcccgcgtttttgctttgcacaatgtcgtcggaaaaggcgttggccgacatggcgattatgggaaccgtcttgccgtcgggacggttggaaagtcggatacattttgtggcttcatattcgttcatgaccggcatcatgatgtccattaaaatgacgtcgatgccgcccacttcggagttttcgaattccttgaccgcttcaaagccgtttttggcctcaatgacctttccaccgttctgctcgataaagaattttgctatctcggcgtttaaatcgttgtcctccgccacgagaattcttgctccgtcaaggccgtcgaagggttccttctcgattttcggcacgggctcgcttttgtcgattttaagcttgagggtaacgtgaaaggtcgtaccctttccgattttgctgagacacttgatttttccgcccatttgctcggcaagtccctttgcgatggaaagcccgagccccgagccgtcgtatttcgtgcgggcgttgtttcgtctacggcggggcgaaggcgttctattcgccgacgatcacc

SEQ ID NO: 743 - DNA, 30482 bp, Unknown
  16S sequences of unknown bacteria
cctgaatccgatgatcggcgcgctggcgatgagtttaagttccgtattcgtggtggcgaacgcgctgcgcctcaccgcgtttaaacccaaatcgggcgcgaaaatcaagaaaaaaggagaaaggaacatgaaaaagatcttagtgatcgaaggcatgagttgttcgcattgcagtgcgcgcgtggagagcgcgctcaacgcgatcgagggcgtgcatgcgagcgtaaacctcaaaaagaagaccgcggaagtcgacggcgacgccgcggacgagatcctgataaaggctgtggaagacgcgggctattccgtcaaaaaaatcaaatgacaagaaaagcgggccacccttgacaggcggcccgcttttctttgttgggagtattgagttatcgaggaatgagcaaaaaatcagtttccgcagccgcacgaattgccgcaagagttaccgccgccgatacggttgtttccgcatccgcagccgaggtattgcattgcgatcagcgccgcaaagcatgccaactccgtattggaaatgttacacgaacatttcaataagtataaaagtgcgatccagagaataatatcagaattcatgaaagaacctccttttgacaaattttgcgcaactatgtttttatccgacaaaatcggtaatgtgcatatattgacatatacgcctccgtcgtttacaatgatagtatacattttggtatcggaggtgtttcatggaatgcgatatgcttttattggacaggcggacgcagtctttggtagaggattatgtaccgagcggtgagatcttggaagggatcgtctgctttttctctattttttccgacagtacgagggtacggatcttatccgcgctcgcgatcacggaaatgtgcgtgaccgacctatcccgcgttctctccatcaatcagaccacagtctcccatcaactgcgctttctgaaaaacgtgggcatcgtcaaaacggagcggcacggcaagatcatcttttacagtttgaagaacgaaacggtaaacgacgtccttttaaaaggggtggaatttctgggatattgaatacataaacacggataaaaagggcggctttttaagttgctcttttttattgcaaaaagtctccgcttgtagtataatttatgggaagaagaatacgaagttttctgcgcttacgtatttctatatcataatatgaacgtaattcaagaaaagttaaaacttttgcccgacgatccgggcgtatatatcatgaacgatcgcgacggcaacgtgatctacgtgggaaaggcgcgcaatctgaaaaacagagtgcgtcaatattttcatgcctcggtaaagacggaaaaggtcatggcgatggtgcagaacgtcaccgatttccattatatcatcaccaaatctgagatcgacgcgctcgcgcttgaaaacaacctcatcaaaaaatacaagccgaaatacaatatcctcctcaaagacgataaaacgtatccctatatcaaagtcgcgatctccgaaaagtttccctctttttccgtttcgcgcaaactgaaaaagggaagcaaatatttcggtccgtatatgggcggcgtgcgggtgcgcgacgttctggaaatggtcaacgtggcgttcggcgtgcggctttgttcgacgaacgtcggtgaaaaacccaaaaaaccttgtctgaattatcatatccaccgctgccttgccccgtgtgcgcatctgtgcaccgccgaagaatacggcgagcgcgtgcggcaggcgatcagatttttggagggcgacgaaacggaagtggaacgccttctgacggaaaaaatgcagaaattcgccgcgcaggaagaattcgaactggctctagactgccgcgaaaaactcaatatgctctccaagatcaaattgaagaggatcaccgcgctcaaccgcgacctcaacgcggacgtcatcgctttcgcgaccaaccagatgtacgccgccgtcaatattctcatcacgcgccgcggcatcatgcagggcgcgagcacgttcgccgtggaaaatacttccaccgacgcggaggcgctttcgtcctttatttcgcagtactacgcctcgcacgagatccccgacgagatcattacgcacgactactgcgaaagcaaactcatcgaggactttttccgttctcgctatcagaagaacgtagccgtgatttcgccgcggcagggcattcgcaaacaactcttggaaatggcggaaaataacgccgccgattatctggaaaaggcgatcgataagatacgccataaagaagatatgaccgtgaccgcctgcgagcgcttgcaggaaattttagggctttcgcgttacccgcggcgcatggaatgttacgatatttccaacatcagcggcgtggataaagtcggctccatggtcgtctttatcgacggcgaggcggaccgttcgagttaccgaaggttccgtatccgcacggtggagggcgccaacgactttgcgagtttgcaagaagttctgacccgccgcttgtcaaaactcggcaccgaggaagaggaacgctttcccaagccagatctcgtcatcatcgacggaggcaaggggcaactctccgccgtcaaggagattttcgatcgtatgggcgttgcggatatcgatcttatatcccttgccaaacgcgaagaggaagtttttacgctcgattctaaggagagcatactgctcgataagcgcgattactgtctgaaaatgttacagcgcatccgcgacgaggcgcaccgctttgccatcacctatttccgcaatattcattccaagcgctcgctttcgtccgttctggaagagattgaaggcgtgggaaagaaaaagcgcgtcgcgctcgtggaaaaattcggctcgatcgataagatcatgcatgcgtcgatcggggaactgatgcaggtggacggcgtcggggaaaatctggcaaaacaaatcaaaaaattctttgaggataaaatataaatgataaaaaaatatccgctgatcgtttctgatttcgacgaaacgctgcgaaacgacgagggtacgatatctcccgaaaacgcggaggcgatccgcaaatacattgccgcaggcggcattttcgccatctgtacggggcgcatgatgacttctattctgccgcacgccgaaagtctgcggctcgacagccttctcgtaggctatcagggcgcgctcatactcgatttaaagagcgggaaatatctccgcgacgaacatatgagcgtgaaggaggcggtgcgcgtctgccgcacgctcgaaaaaacggggctgcacattcacgtgtacgatcgcgacaaattttacgtgaacgcggacgacgggcttctcgccgcctatgaacgaatctgcaaagtcaagggcaagatcgttacgagcggcatggcggatttcgtcgtgcagaacgggattcagccgcagaaaattctggcgatggtagagcccgaacaaaaggcggcggtctttgaaaagaccgcgcaacttctgggcgaagatttttacgtgacgacgagcgcgggcgcgctcgtggaaattacgaaaaagggctgtgacaaagggagcgccgtgcgatttctcgcagattattatcgcgtccccatcgaagacgtcattgcgatcggggacaatatcaacgatattcccatgatcgaagccgcggggctgggcgtcgcggtggggaacgccgtgcagccgctcaaagacgccgcggacgaagtgacgctgacgaataatcagaacgccgtggcgcatatcattgaaaaatacggaatgggggaaaatccatgaacgaagtaacgcagagcgaagacgttttgctcgattctttttgccgcgatctggggctggaagtggtctacgcggggcgggggaaagtgacgctggatacatacagcgtgtgccgtcccggtttgcagttggcgggctatttcaaatttttcgaatcggaacgcatcctcgtgctcggcaacgcggaatatgaatttctgcgcgatctgacgagcgaagtgcgccgcgagcgtttaagggagatcctgtcctatccggaccttccctgcatcatcatggcgcgcgatctgcccgtcgtacccgaaatgatagaggaagcgcgcaaagtcgcctgccccatccttcgaagcgaccgcatgacgaccacgatcatcaacgacctgtttttatatctcaaccgcaaattggcgccttccacaacgatgcacggcgttctgatggacgtatcgggcgtggggatcctgctcactggacacagcggtatcggcaagagcgaaacggcgatggaactgatcaagcgcgggcacagactggtcgcggacgacagtgtgatcgtgcgcaagatcatggattcgctcgtcggcacgtctcccgaaatgatccgctattttatggaactgcggggcatcggcatcatcaatatcaagaatatgtacggctcggggtccatactcaacgaaaaggagatcgagttggtcatggaactggaaaactgggaagagggcaaggcgtacgatcgactgggcgaaggctccatgtacgaaaatattctgggcgtcaacgttttgaaacacaccgtccccgtcaaacccgggcgcaacctttccatcattatcgaagtcgcggcgcgcaatttccgtctgaaaagcatgggctacgacgcggcgcaggaactcatcggcagaacgatcggaagataaaaaaaggcatacggaaagtatgccttttttctttatataaagtactttgccagacataaaccgcccgtatcggttcatatatatatacgtatgaaaaagcggatagtaaggatctgcgcgatcggattgatactggcaatcgtgaccgtttcggttttttttgcctatcccgcgctcacggaaaaagaacaggcagaagcggaaggcgtcaacgatattctccgcgtctggcatatagacacgtttgaaggcggcaagggttcgcgcgcttcttttctcggcgccgcggcgaaaaaattcgaaaagaaaaataaggacgttctcgtcatggtggtaccgcattccgtatccagtgcaagggtcgcgctggacgcgggcgaggcgcccgatatgatctctttcggcacgggcggcgcgctctgtccggaactctttctgcctctcgaaaaatacgattttccgtattcgaaacagaacggcaagacgtacgccgtgccctggtgccgcggcaactatatgttctttacgctcgacggcgattttaccgacatgacggcggaaaacaccgtgatatcggagggaaattattccatggcgctcgtcgcggcagcgtgcgaatctctcgcgggcgggcaggcgaaaagttccgtttccgcctacgtcgattttctgaacggtaaatacaagtatctgttcgggacgcagagggacgtcgcccgcctcaatacccgcggcgcagcgtacacggcaaagcccgccgaaagtttttccgatctctatcaatacatcgccgttttgtcttccgacgcggcgaaatacaatgcctgcctagattacgtcgcgcttttgttatccgaatccgtgcagaaagatttgaagggcgtgggcatgatgagcgcttattattccatatacgacgagtcgaacgccgccctgcaagatgcggaaaagatttccgccgccgcaggcgtgagcgcctttatcgaggaaaattcttacgccgaaatgcgtgttctcgccgcggaggctctcggcgggaacggcgagtcgttaaaaaaaatgaaaaacttccttatatagcgttgtaaaaatccgcgttttgtagtaaaatataggagaacagataaattgatcgaattccaggaaataccgtcctatttgccgcacgtacgtttcagcagggacttttccttttcccgccataccacggtggggatcggaggcacagcgcccgtcgctctctatccgaaaaacgagaaagaactgacggatacggtgaattttttgctcgaacggcagatccctcatttctttttggggcagggcgcgaacgtgctcgtttccgacgaaggatttcaaggcgcggtagtttgtacaatcggtatgaaaaaaatctcgcgcatgagcgaatgccgcgtctatgcggagtgcggcgcgaccgccgaacagttggtgcgtttcaccgcggaaaacgcgctgacgggcgcggagtttttggcagggattcccgcaagcgtgggcgggctcgcgtttatgaacgccggcgccgacaatacctacgtgcagtcggttatcgaaaccgtccgcgtcgtccgcagcggggttctgacggatgtacctgtcgatgaatgcggatattcttataaaaagagcgtgtttcagacaaacggagactgtatcgcggggtgcgtttacaggttccgcgcggggaacgtgacggagatcgccgccaaagtgcgcgcgcgccgctttgcccgaagcaaactgcccaaaggcagaagcgtgggctgcgtctttctgaatccgccgcagggacccgcgggagaactcatcgagcgcgcgggctggaaaggcttttcgatcggcggggcgctcgtatcgcccgaacacgccaatttcatcatcaatacgggaaacgccacggcgaaggattttcgcgaacttgtggggcggatccgacgggatatatatacgaaaacgggaattaaattgcaagaggagttccgttacataggagaatagcatcatgttgctgacaggcgattatcacacacacacagtttacagccacggaaaaggaaccgtgctggaaaacgcgatgcaggcaaaggcgctcggcttaaaggaaatagccatcaccgatcatggtttcgaacagttggcgttcggtatcaagcataaaaaaatgccctcgctcattcgcgacgtcaaagaggcgaccgaaaagacgggcgtgcaggtttacgtgggtatcgaagcgaacctctgcggcgaaaacggccgcaccgacctcaaaagcgaagattacaaagatttcgacgtgtttctgatgggcattcaccgctttgtgaaattcaataacttcaagagttggtacaatctcttctggtccaattatattcacacggcgctccccgtcaagcctcccaaaaaactggtagactacaatacgcgcgcctatatcaacgccatcgaaaaatatccgatagacgccgtcacgcacctcaactttctgtgcttttgcaacgtggaagaggtggcgaaagcggcgcgcgattacggcacgtatatcgaactcaattccaaaaaaaagcatctgagcgacgaggagttggaacgcgtgcgcgacacgggcgtgcgctttctcgtcaattccgacgcgcactcggtggaccgcatcggcgacaccgcgctcgtggacgaacaactcgaacgcgtgaagatcccgcgcgatcgcatcgacaatatcgacggcagactgccgaatttccgtttccgagaatataaagagagaaatttatagcgtgagtacttccgtaaattttacctatgagatcaaaaaagaaatcattcggaacgggtttgaaaatacctgttgcaaaacggcggctctgtccgcctttttgcgtgcaacgggcagcatcatcacccgcggcccgcacgtcggtttcgagatcgtgacggagagcgaaaacgtcgcggaatactttgtggggctcatagaaagcatgtacggcgcggaactcaagatcgcggaagtcggcacggacaaccgcaacggccgcgacaggttggttttagactgcgtgggggagcgttctttctttatcctctccgaactcggcctcgccgaattcgacggcgagggcgtcaatctgaaaatggagatcgatccctatctcgtggaaaacgcctgctgccgccgcgcctatatccgcggcgcgtttctgggcagcggcagttgtacgcttcccaaagaggacgagtcgggctcgggctatcatttggagatcgtttttttcggcgaggcgctggcggataacttttgcgaccttttggcgcaattcgacgtgcttgccaagtgcgtgcagagaaaaaattcatacgtcgtctacctaaaaagcaaggacagcatttccgactttttacaactgtgcggggcggagaactgtcttgaaaaactggacggactcgccgaacggcgggaaatgcgcaacaatatcaaccgcgtcgcaaattgtatgcagaaaaactacgataagagcgtattggcgtccgtaaagcagatccgcgcgatcgaagtcatcgattcggtcatcgggatatcggggctggacgaagcgttggaaacggtggcgcgggcgcggctgtcggacagggaggcgtcgctcaaagaactgggggaacggctggggatcagcaaaagttgtttgaaccacaggctcagaaaactggttaaaatttccgaagaattgacggaggagtgaatttcgaatggaaaaagtagtgtttcaatataaaaaaggatcgtacagcgcgtacgatgcgcagcggatcgtctttgaggcgtgcaaattcgagagcgatatttcgatcgggacagaacgcaagcgcggcaacgcaaaaagtatcgtggggttgatttccatgcagttcgtcaagggcgaagaatactacgtgaccgccgaagggcgcgacgcggcaaaggcggcgagcgcgatcgcaaaatttatttcgacgctcgcagattaaatttttactttattttacataagcacaaggattatcatgacagatttcgttcatttacatttacataccgaatacagcctgctggacggggcctgcaaggtcgacgacctcgtcgatcattgcgtgaaaaataatatcaagtccatcgccgtcacggaccacggcaatatgtacgcgaccttatactttgcggagttgtgcaagaagagcaatattcaggcgatcatcggctgtgaactgtacatgacgcaggatctgcacgataagagcgcgaattccgatttcgaacatctcatcctgcttgccaaaaacaaagtcggctaccgcaacctcgtcaaactcgattccatcgcctttgtcgacggcttttattataagccgcgcgcagactacaaaacgctcaaagagcacagcgaagggcttatctgcctttccgcgtgtcttgcggggcgtctgccgaaactgctccttcgcggcgattacgaaaaggcgagagccttcgcgctggaaatgaaagagatcttcggggaagatttctatatcgagatccaggaccacggcatcgaagagcagcggcgcgtccttcccatgctcgttcagatcgcacgagaactggatattccgctggtcgcaaccaacgacgtgcattatatcaatcaggaagattgggaaatgcaggacgttctgatgtgtatccagaccaaaaagaccatagacgatcccaaacgcatgcgtttcgacagcaaggagttttatctgaaaacgcccgaagaaatggcggcactgttttcgaattttcccgaggccatcgaaaataccgtcaagatcgccgcgaaatgcacggagccgtgttttgatttaaaggacaacggcgatcccgtcaaggatatgtcgcttatccccgggtatcagccggacgacggttccgacccgaaggagtatctgacgcggctgacctgggacggcttgaaacggcgttacggcgagatcacagatgcagtcaaaaagagggcggattacgaactgaatatcgtcatcggcatgggctttgccgaatattacctgatcgtcatggactttatccgctgggcgaaagaccgcggtatccccgtaggtccggggcgaggcagcggcgcggcgagtatcgtggcgtacgcgatcgggatcaccgacatcgatcctttgaaatacgacttgttcttcgagcgctttttgaacccggaccgcgtcaccatgcccgatttcgatatcgacttctgtaacgaaagaagacccgaggtcatcgagtacgtgcgcgataagtatcatcccgaaaacgtggcgcagatcgttacgttcggaacgctcgcatccaaggctgcgatcaaggacgtggggcgcgtgctgcgcgtgccgtattcggaaacggacaaagtcaccaaactgatggacggaaaatccaccatcagcgaacttctgggctggaatattcccaaactgcaaacccaactgaaaaacagcgatctttccgaagataagcgcgtcgagatttccaaaaaactggaagaacaggaaaaaaagcgcaacgcggatttcattgaattgtatgaaacggacgaagcgctgcaccgcgtcatcgatatggcgctgaaactcgaaggcatgccgcggaatacctccatgcacgctgcgggcgtagtcatctgccgcaagccgatcgcggacaacgttccgctttcgcgcaacggcgaggatatcactacccaattcgacatgaaagaagtcgaatccatcggtatgctgaaaatggactttctggcgctcacgacgctgaccgatatcaaaaaggcgtgcgattacattctggaagacacgggccgcgccatcgatttcgacgagatcggctacgacaatcaggaagcgtacgaactcatttccgaaggcgatacggacgccgtgttccaactcgagcaaggcggcatgaagaaattcatgaaagagttgaaacccggctgtctggaagatatcatcgcaggcgtggcgctctaccgtccgggcccgatggcgtacattcccacctatatcgagaataaactcaacccgcagaaagtcaaatacgatacgccgcttttggagcatattttaaaagttacctacggcgtgatcgtctaccaggaacaggtcatgcagattttccaggacctggcgggtttttcgctgggacaagcggacctggtgcgccgcgcgatgggtaaaaagaacaaagccgaactgatggcgcaaaaggataagtttatcttcggcaataaggaccaaggcggcaacatcgagggcgcggtcaaccgcggcgtgccgcaagaggtcgccgcgaagatattcggcgatatggagagtttcgcgagttacgctttcaacaaggcgcacgccacctgttacggagtgctttcctaccgtaccgcctatttaaagcgtttttatcccaaagaatttctggcggcgatcctaaataaccgcattgaaaagatcgaagagatcaccaaatacattatctatctcaaagagaagaatatccccgttttacagcccgacgtcaacaagagcaagacgtatttctcggtgcagggcaacggcgtccgtttcgggctgagcgccttgaaaggcgtcggcgtcgccgcgacgcaggagatcatcaacgagcgcgatgcgaacggcgagtttaaaaatttccccgatttcgtgttccgctgtgcgccgtttgtaaacaaacgcatggtggaagggttgatttcggcgggcgcgttcgactgtttcgacgtgaagcgttcgcaacttctgtctgtttacgagagcgtgctcgaccgcgcgaataagatcgccaagcagaaacagagtatgcagatgagcctgttcggcgacattatcgaagaggacaattcggatatcgattaccccgatatccccgaactggacaccaacgaaaggctttccaaagagaaggccgtgctcggcgtctatatcagcggacatccctttgagggctacgcgcacgcctttgcggactgtaccttttcctgtgcgaaattgcaggtgtacgaggaggatgaggacggccatcgtacttatacggaactcaccgacggtacgcaggtgactatgggcgggatcatcggcaattataagaagatcaacacccgttcgggctcgtccatggcgtttatatccgtggaagatctgttcggcagtatcgaatgcgtggcgtttcccaatgtatttgaccgtatcaaaaccgttcttgcgcccgataagatcgtctatattacgggaaaaatgcagttggacagcgaaaagccgcccgtcatcatactcgataaaatgcaggaatacaacccggaaacgggtacgaccgtggcgcccgccgaggctgtcgtacagcgcgaaccgacgctgtggctgaacgcgtcgcttttatcggaagaggaattcgccgatttcgcggaactcttttcccattacacgccgggaaaaatgacggtaaaaatcaagcgcggcagtaaactttacaaactgacggagatcaattactgccgcggactcgtcgacgaactgctgctgtatcttcagaaaaacgatatcaagttggtcaaataaaatatttacggaaagttaccgaaaatgatttgcaatcctcgctgtttttgatataatgatagggcagttattttagtaagatcgcaccgaagaagagagggtgcgcagttggaggattgttatgaaaagaatcggtgttttgaccagcggcggcgacgctcccgggatgaacgcctgcatcagggcggttgtaagaacggcaaaatatttcggaatggaaatatacggcattcggcaaggttatgcggggcttatcaacgacgacatggtcgccatggaaatgcgcagcgtttccgatatcgtacagcgcggcggcacgatgctccgtacggcgcgctgcgtggaaatgtatacccccgaagggcagaagcaagcggcgaaaacgctcaatgaccgcggcatcgaaggtctcgtggtcatcggcggcgacggctcgttcaagggcgcgaagagcctgacggaaaatttcggcattcccaccatcgggatccccggtaccatcgacaacgatttggaatataccgattacactttgggattcgatacggcggtcaatacctgcctcgatatcatcaataaattgcgcgacacgatgacctcacacgaacgtatcagcgtggtggaggtcatgggcaggcactgcggcgacatcgccctgtattcgggtatcgccagcggcgcggagatcatcgtcgtgcccgagatccgctacgatatggacgatatcgtcatgcgcgtgaaccgcagccgcgccaacggcaaacattccaacatcatcgttctggcggaaggcgtcgccacggcggaagagttcacgaaaatgctgcagagcgaaaccacgtattctgtgcgcggcacgaccatcggccacgtgcagcgcggcggttcccccagtatggcggacagaatgctcgcggcacagttcggtaacaaggctgtgcgccttttaaaagacggtatcggcgaccgcgttgtcggtatccgtaaaaacgagatcatcgatctcgacattatcgaagcggtcagtatgaaaaagaaattcaattacgaactgtacgaaaccctgcaaatgatatccttgtaattacgaaagccgcctttttcggacggctttttaatttattgaaaaaattttacgttttagattgaaaaaacgctaaaaatatattataatactaagagaagtctttcccacccgtacgcgggcgggcgaatacgatttgcggagtacctttttatgatattgacggtttgtctgaatccttgcaccgacgtgaccatcgaagttgattccctgaacatcggaaaactgaaccacgtaaagaataagacccttagttttacgggaaaagcattgaacgtggcgatcggcgtcgcgcggctgaaaggggatagttacgccacgggttttatgtataacgaaaacggatccctcttcgagcaggcgctcgacagagagggcgtgcccagcgcattcgtctggaaccgtggtcgggtccgcgaaaactataagttcatcgataataagtctatgcttacggaagtgaacgatatcggcgaacccatcagcgcgaacaagcaggaagagttgttggcgctcgttgcgtccctttctaaaaagagcgacgtgatggtggtatcgggcagtttgccgcagggtgtggacagcggttattataccaaacttttcaacgtggccgcgccgggttctttgaagatcgccgatgcggaaggccccaggcttttatccgcgctgcaggcggggctggatctggtaaaacccaataaggacgaactgcaaaataccttgcaaaaagaactcaaaacccgcgaagatcttttgaaaggctgttatacgcttttggataaaggcgccaagcgcgtgctcttgtcgctcggaaagcgcggcgcgatcatcaccgacggcaccaaaaactttttctgcaagagcatcaacgtcgccatcaattcgacggtgggcgcgggggacggtatgctcgccgccgcaacgatgcggctgacggaaggcgcgccgctcgacgagatcctgcgcgcgggagtcgccgcgggcaccgcgacggtcacgactttcggacaaatttcgttcacgaagaataaatttgacgaaatctatgcaaatttaacggtagaggagatcgtaaattagttgttaacaatcacggatatcaaaaacgacgaagaagtcaaagcgatcatgtacatgtccgaaaagcagatagaggctctgggatttaccgaacattccgtccgccattcgagcattgtcagcaaatggtcgggcgaattgctgcgcggcatcggcgcgagcgaccaccgcgtggcgctcacggagatcgcgggctttctgcacgatatgggcaacagcatcaaccgcgacaatcatgcccagagcggcgcgattctcgcctataagatcttaacgcgcatgggtatgccctataaggacgccgccgagatcatgatggcgatcggcaatcacgacgaaacggaaggtttgcccgtcagcgacatcaccgccgcgctcattctggcggataaggcggacgtgcacaagagccgcgtccgcaagaatatcaccaacgtgagcatggaaaacatgaatattcacgacagagtaaacctcgccgcggagcgttcggtcatctatgtggacgaggggaatcgggagatcgttctcaatatcgtcatcgatacggaaaaatgtcccgtcatggactacttcgagatctacttcaaacgcatgcaactttgccgccgcgcggcggattttctggaacgcaaattcgtactcatcatcaatgacgtaagatttttataatgaaaaagcctttcccgtcgggaaaggcttttttttatttttcttcttccgtacttttctcgtcggaaattttcgtaactttgacctgctgtatttttttaagagtggaactcgtaacttcgaacgatagccctgaaaattcaaacgtggcgcccgctgcgggaatttcgcccaactgttcgatgatccagccgctcacggtatacgcctcgaaattatcgtcgtcctcgtccagttcgtaataggcaaacagatcgcagaggggggcgttcgcgtccacgagcgtcgtcgtatcgtccagtttcttgaaatagttgatctcttcgtcgtgttcgtcccagatctcgcccaccagttcttccagaatgtcttcgagcgtgacgatgcccgccgtaccgccgtattcgtcgagaacgaccgccatatgcgtctttctcttttgcagttgtttcaatagcgaggaaattttaaggtgttcggtcgtataaacgggcgcattcaaaatcgcgcgcagatcgtgcttctgcccgaaataattgaggaaaaaatccttttcgtgcacgacgccgacgatggtgtcgatggtattttcatagacggggatcctcgaatatccgcaggaagtgaagattttttttacctcgtcgggcgaggcttttacatccacggcggtaatattcacgcgggggatgagaatgtcgcccacttccagatcgtcgaactcgatgaccgaacggatcagtttggtttcttcctggtgcaaagtgccgccttcccgagcctcttcgacgatggtcatgatctcgtcttccgtgacgacttcctcgttctttaatttgaaaatcttggagagcacgaatttatagcccgtgaatacgatattgatgggaaacagtatatagtagaacagcatgatcagcggatatccgaccatcgagaatttctcggggtaaactttcgccatcattttcggggtgatctcaccgaagatgagcacggcgacggtcgtgaccacggtcgaaacggtaacgctgttcgcactgttggtcatcagactcgcgaaaaacagtgtcgcgagcgacgaagtggtgatattgacgatattgttcccgaccaaaatggtggaaatcagtttatcgtaattctccgccagtttcagcgtctttgcggcgcgggcgtttccgttcgcgctcattgttcgcagtttaactttgttggcgcaggaatacgccgtttccatcgatgaaaaaaagcccgataaaagcaataaaatgattatcgcgatcaataatggggctgcgccgtcaggcataaaaaacaaaacctcccgatcgtagcggatttgcggccagaaataccgcagtatgctacctgaaaaaaataattacctatattatatcatatattttatagaatagtattatttttcgcaatttatttgaaaaaacatcgtttttttcaaatcattctgcgcgtttcgatatagtaggaccaacgttgcgcggaaatttcctcgatgactgcgtaatcggtcgccgtgtgcaggatataattgcccccgagatacagcgcaacgtgcccgatccgctccacgcccgttttattgtaacgggtggagttggtaaagaaaataaggtcgccgcgcgaaagttcgcttctgggtacgtgtgtgccctgcgatacctgtgtgcgtgtcgtcaattcgagattgacgcccgcgccgtaataaaacatatactgcatcagcgacgagcagtcgtatttcgtcttgtcgaatcccgaaaggaactttccgtttccgttgtgcaggcgcgtcgcgccgtacacgtaggggaagccgagcagattatatccttcgccgatcaccgcctctacgcggctgtcaggcgaggtttccaattcgaacagttcggtgtacgaacttcccgcgctcacatatgcgggtttgttcttgtaaacggtctcgtaccagttgccttcttttcctttcagcaagaccatatcgcccttatctatgtagccgagagaggaagcggacgtgctgggggcggaacggatattcaggccgttcaccttggaacgcacatattggtctttgggaatggtgacgacgggaacgtcggtttctggctcctggggcggcagaggcttttcgtccggcgcttcgggttcgggagcgggagggagcgttccgccgtcttcgtcgggcagtaaagcaccgttctcgttatcggcagagggcctttgcgtcaggtgaaaggaagcaaaagtagcgccgagaaggatcgcgacggagatcgccgccgctgcgattgtaacgtaagcttttttcatatattttttctcctttttttggagaaattatatcaaaaatcctaccattttacaaggaataaatttttcctgttttggaaaaaccgccgcctttctatccaactatacctttttttcgtccgattggtaaatatttgacatttgtcaagcgaatgattataatgcttgattatggagatctattggattttgttgatctgccttgcggcggtcgtattgtttatactcgtcttttttgcaatcgtttccgtgctgatccagaaaacgcgattcggggtacgctcggacggaaatcccgcgctgcgctattttcaggcaaaagatttcgaaaacctgcaagcggaagatatatctttcgtttcggacaaagggcagacgctgcgcggctgtatttattcggatatgcgcgtgaaggagccgaaagggctcgtcatttgggtgcacggattcggcgcgggacacaacgcttatacgacggagatcgcctatctggctgcgcagggatatctcgttttggggtatgataatacgggctgcgtgctgagcgacgggaagggcgtcggcggactgatacaaggggcgatcgacgcgtcctacgccgttcgttacgtgcagaacgagccgcgcctcaaacaatacaagcgcgttttggtagggcacagttggggagcctattccgcgatgaatatattttctttcggcgagcacgtcgacggtgtcgtcgccatgtgcggattcgataccgcgcagggcgtcgtgacggatatgagccgccgctatttcggagggttcagcggtttgatccgcttttacagcaagatcttgcaccgcctgcgcttcgggaggctcgcgtccgtttcttctcggaaatctctgttgaagagcgacgttcccgtcctgcttttatacggagaagacgacaaagtcgtaccgttccgtacgaacggcagaaagatcatccgcgccgtacgggataaaaagaatatacgcgcgatcacttatcccgacaagggacacagcgtttatctcacgataaaagcggaaaaatatattaaggaagttttcgcaaaactcgcttcttccaaaaagatgccctccgaagagttcgagcggtatcgttcttccattgattatgcgatgttgacggaagaagacgcggcggtgatgggagagatccgcgattttctggaaaatattttttgctgaacggacttttgtgttcaaatgattaaaagtgtaaaaggtgggtaaaatctttttgtttcgccgtctgtgccgttgaccgcgcggtatttaagtgttacaatacgcaaggtacggagggtagacgatgaaacataaaatgctcgcgctcgtcggcctgtttgtgtcgctgggctttcttttacaaatattatacggctgcgaatccaaggatacggggacgtatccggttacgcagatcaaattttatgtggacgattcgctgtatgatgcggtcatcgtgcgaagcgaccgtttcgttatgccgcccgcgcccaaaaaagaaggataccgttttgaaggttggttttgcgatgcggaattgtccgaggcgttcaagcccgaacggtatgtatgcgaccgcgcgcgtttcgatattgaagtttatgccaaattcgtgagcacgaaatcggaagaaacgtttcctgacctgtttcagaatttcggacaaacgattatgtaactcttgacattacatcctgttgggagtataatagacgggaattcaccaagggaggggggacgccgtgcagatttccagccgtctgaccgtggcggtgcacacactgctcgccatcgaatattttcatctcgaatataaagtcacttcggaatttatcgcgtcgagcgtatgcgtgaatcccgtcgttatccgccgtattttattgcaattgaaagatgccggtcttgtcgacgtggcgcgcggcagcggcggtgcgaccttgaaaaagccgccgcagtctatcactttattggatgtataccgcgcggtcgattgtatggaaaaagacagtatgtttcattttcacgaaaatcccaacgcgaactgccccgtaggcagccgcatccacgccgctctcgatgacaaactcgccgcggcacaatgtgctttcgaacagtcgctcgcggaaacttcgatcgccgatctgatgaaatttatgcaataaaaacccgtctccgaaaatggagacgttttttttgatttttttgatgtaacgcttgacattacaataatcgtttgctataatgtagttgtaatcaaaaagattacaacaaatttcaggaggttctattatgaaaaaaattgcgatcgtcggcgcggcgggcagacaggggacgtgtcttgtgaacgaggctgtagcgcgcgggtatgaagtgacgggtttcgttcgcaacgcgcacaaaattgcaaattccaaagcaaagacagttgtgaaagatttgtttgatattacggcggatgatttaaaagaatttgacgtagtgatcgacgcgttcggcgcctggacggagaaaacattgcccttgcatattacttcccttcagcacctttgcgatcttttgagcaatacgaagattcgattgctggtcgtcggcggggcaggcagtctctatgttgatcccgcgcataccgtgcaggtgatggatctggacaatttccccgaagcctttaagcctttggcaaaaaatatgggcgcggcgctaacggaacttcgtacacggaacgacgtactgtggacatatctttcccccgctgcggattttcaggcggacggtgcgcgaacgggaaatattctgctcggcggcgaagaatatttcgtcaatgagaagggtgtcagtgcgatcagttacgcggattatgcgatcgccatgatagatgagatcgaaaaagccgaccacattcaaaaacggttttccgtgatcggcgcatagtttgtattgaaggaggaaagaaaaattgaacgattttgagcgggcgaaaaccgttttgaagggcgcggaatatatccttgtcggaggcggcagcggtctttccgccgccgcgggcctgacttactcgggcgctcgctttaaaaaatttttttcagactttatcgagcgctatcgaatgacggatatgtactcggcgggtttttatccgttttccgcgcaggaggaaaagtgggcgtattggtcgaaacatattttcgtcaatcgttatcttcctcccgcgctcccgctgtaccgcgatcttttttcctttcttgaaaataaaaattattttgtgattacgacgaacgtcgatcatcagttctataaagcgggctttcaaacagagaaaattttcgcagtgcaaggggattacggaaaattccagtgcgcaaatggatgtcattcctctttatacgacaacgaggcggccgtgcgggaaatggtacgcagtcaaaaagattgccgcattcccgcatcgctcgtgcccgtttgtcccgtctgcggcgcagatatggaagtgcatatccgtaaggacgcccgtttcgtgcaggatgatgcatggtacgagacggcttcgcgctatgacgcgtttgtcaataaggcacggcaaggcaagaccgtgcttttggaattgggcgtcggtttcaatacgccggcgatcatccgatttcctttcgaacggtttgtctgtcaaaatcgccgcgcgcaccttatccgtgccaatctcgacgactgcgacgctatccccgaaattaccgaccgcacgatttccctctgcggctcgctgagcgatactttgaaattgctgttttgctgacggaatttgtttgaaataaaatccgaaaaacatttgacaaaatttgcattatgacttataatatctaagcaagttttttgtacggcaatttcgctgttatggctcagcaggtagagcacgtccttggtaaaacgcgcaagccataaaatcgggatgccgaaaaccctgtaaaaatcggcgaaaaacttcatttgctgttatggctcagtaggtagagcacgtccttggtaaaacgcgcaagccataaaatcgggatgccgaaaaccctgtaaaaatcggcgaaaaacttcatttgctgttatggctcagtaggtagagcacgtccttggtaaaacgcgcaagccataaaatcgggatgccgaaaaccctgtaaaaatcggcgaaaaacttcatttgctgttatggctcagtaggtagagcacgtccttggtaaggacgaggtcgcgggttcaaatcccgctaacagctccacataaaaatacacaaatcgttgcgatttgtgtatttttttctattgttttattcatttttaagaatatttatgcagacgcaaaaaagccctaaaattaaatggtagtaaaaatttgcaaaatggtggtaaatttgcagacgaatttttcgtctcattcgtgaaaaaatgttccttccgaaaaaactgcccgaatcgcccgaaaactgcctgtttctgccccaatggtagtaaaatggtagtaaatcagttgcgccattttagttaactctttacaaaaaatcggttgcatttttcgaacttcctatccaaatgttcaaagtgttgcttcgcataagccttgaaagaaagttaaaatcttacgaagttatgctttttcgacaaaattttgaaaagtgtgattttatgtgcgcaattatatttgaaaagtgtaaatttaggcacgtataaatacttgaaaagtgtgaaaaaggcggatatgttttatcaaacgaacgcatcgtttctcaaaaagataaaataatttatctgcccgtctattatattatgttcattcaaaatgctccccaaaaagataatttgattttttaagtgataaaaagtaaggcggctgccgtatgtcagccgccgtgatattctttggaaaagttgtgcctaaaagtattataatttcaggtataacttttttgctttgttacatctccatatctccgccgaacatggcgtcgattttctttgtcgcctgtttgaaataacttctgtccacgctgttgtaggtgcggatggtcgtcgttacgtctttgtggccgagcagttgctgaatgactttcggattctctccgctctcgaacagcatactcgaataggtgtgccgcagtgtgtgaaaatgaaagccgtattccgcaaaccccgtcttgcgcatcaatttatcgaacatcgcgcgcgtgccgtagtaagtgcgcaagtcgccttcttcggtgctgaacacaaaatcatcgtcgtccgtaaaggagatacccgtttcgtattccattttccgccgtcggttgcggtgttctttcaagcattctacaagtatttggggcatgggtacgctgcgcacgcttgccgccgtcttggtgtccgaaatcaccgtttcgtagtcggaaacgcgccacgcatcgtcgtagtgcgggataacggttacagcgttgtccacccaaatcgtcttgtcggtaaaatccacgtcgcgccagcggagcgcaagcacctctccgatgcgcaaccccgcaaagagcgacgtatagcatatcggtttcagaatcggacttgtgtccaaagccttcacaaagtctttgcgcagttcgggtggaatcgccttgtattcttccgtcgtctgcaccttgcgttcgcgcgatgcaagtctggtctttgccacgggattgcttttgaggaagtcgttgtccacgcaatattcgaaaaactgtccgagcaaaaacttcgatttcttgacggtcgccaatgcatacccgtccgatatcatcttgttgaacagacgttgcagcataggggcggtgatctcgtcgattttcatctcgccgaacacagggtataacgtatttctcgcggtgctcaaacaccgctcgaacgttcggggcgaaacggacgggcgtttgaacgtcatcagccattcctgcatcaacgtccgaaaggtctcgttcttgatcgcgctgcacccgattgtgggattgtctgctttgacggcaagcattttcatcgtcacttccgatttggtttttccgtaaacgctcttgcggatgcgtttgccgttttcgtcggtgccgagcgtgaccacgcccacccaattgccgtctttgcgcttactgatacagccttcgttattgcctctgcgtgtgggtttctttgccatcagactacctccgacagactgcctacctgccacgccacgaacgccagaatgctgactacctgacggttgccgactttggtcacggggaacgccttgctgtgcatgagagcacgcacgttgtcccgacccaagcccgtaagttcgataagattttcgcaatcgagaaaacttttgccgtatttgcgggtaagccgcaagacctcgtcggcgatcagttgctcgcggttcaaagtcgtttcggtttccttgttgtaatttttataaatcattttactccttatgcaagctcgtgcggctcgcgaattttttatgaatattcagttgtcaatgttcaaaataagcggcaatagccgccgtaaatggcttattcggtaagcgctttgatttccgcgcgtattgatataagtttgtcttcaagttccgacatttcccgtttaatgcgtattagcgcattttctttcatcaagagttcctgaacaatcgagtcggcttccaattcaagccgaaaactttttgatatagtactgaatgtatttttgtgctccacagataaaatcctcctttttttgttatttgtgttgaattcgaacggggtatccccgttgcgaaaagcggaaagaaactgaaagtcagttactttccttatcctgtttctaaaaaacctacagttccatttgttccagctgccgttcggtttcggcaagttcgagtttttcccgaaactcccgaaagcattccgcagcttccgcgtccgctcttgcggcaatttccatcgaagtcagaatacagtccgtcagactttcccgatatactttctgccgcgctttggcgtggcggagttcgcacgctttcagcagttcgttgcggcgctttttgagtatctctttgatgacgatattgcccatgcgacgatacaggtcgcgctgaaatttttccgcatagagatagcggtcggggttgcggattttgttgcgctcgcacagccgcagaatttcaccgtcgcgcgcagcaagttcggcggtcagcttttcatacgcaattttgccccgcccgtttttcaaaatgcaacttgtgatcgcatctacggtctcgcggcaatggcgcatattttcgctctcgtagccgattttaccttcgtaggggattttcccgtaaagcgattttacaagccttttaagcgtaaaagaatatgccgtatagggttgtgaaatgacggcttgcgctttgtccgtcaacaacttgcgcatgcgcctgacaccctcggcgggttgcataaaatgcttgacgatttcggctttgaacgtatccagcgcttccgaccgtattttgccgtgccgatagcggagcgttctcgttttacgatgaaagcgctgcggctcgttctcaaaaaaacagatgtgaatgtggcggttatccgtattcgtgtgcagtccggcgaaccacgtcatattatcgggattcagtcctgtcgcgcggaatagtttcggcaaggttttcagtaaaagagcccttgccgccgtagcgtccgtcaggttggatttgccgtagctttcttcaaaactcacgaccatatcccaaatgcaactctgcgttctacgcaatttttcgcgcaactctttcttttgggatttagtcaacaatccttccgctccgaacgctcccgaactcttctcgccgtcatccgtatagtcgaggtagtcgatcgctttcgtagattgcacgcccttgtcgatgtagccaagataatcgtccttctgcgcactgccgtaaaaatctctttttggcgcgcttacatcatagtagcgaacccgtgcaataacgtcaggcggcacggcggaaagcctccttcaatcgtttcaactgttcaaccaaacgcggcggcaatacgtcgtataaacccgcttccagacattcgccgttaaatgcctctccgtacacaagactgtcaagcagatagtaaacgttgcacagcaacattcgatacgtcgcttgttccgtctgatcgagcgcgacagaggactgcagggcggaaatttgctgttcgagtgcggacagcctgtccgaaaattcttccgcgtttacggcagaaataggggacgctctctgtcttgccgcaagtcccgccgcaatcaggtcggcaagatacttggatttgcttcgctcgccgctctttgcaaagtcttcggcaagcgcatcggcgagtaccttgtcatagatgtacaacgtcgaatagtaaaagtctttttgtttcaatttccctccttttaacaacgaaaaagacagcccgtaaagggctgccgcaaagttagaaatatttaatttgtaactatgccgcaatcagacaaaattctctgatacaatcaataggcatcacctccgtataaaagtaggggacatttattcccagcatcttatatactaattttcacccatagaaaaacagggatatgcggcttaaatttcaaaaaatgactcaaaatcagtttcaggacggcaaaaacaggtctaaacaggcaaaaaatttttctgaattttcacaaaaaatagtccgatagccccgaacatgcaaaaaagcagaaaacaatcagtcgattgatttctactttttcggtttttgtttctgattttgataatgtttcgttcgatttttgtgcgcctgtaaatcttgaaactgatatctcgctatctcttttgtaaagtcttcggtgtaaactccgggaataaacttgtaatcgtcccaatgccagtcgcggacaccgcaaggattatccggatcgtagagatttttcaatgtgagatcggtcgggtacaatgttttccgttttccaagaaaggtcaagatatatccttgatgttttctttcgcccggtggaggcggagttcgcttaatcaagcctttgttttcgagattttttaacgctgtttgtatcgtgcgttcagataccgcgagttgctcggcgaagaaactgaccttgacagattttccgctgttgacgcggacatagttcagaataatttcttccctttccaacggcgtaggcttgcgaatttccggttcaatctcgtcgtcccacccgtcatgtttcagcttccgcttatctataaactctatgtatccgtatttagactttttacgcatatgttataatttctccctgttgatttttattatatcataaattgactataaaaacaagtttcttgcaggcatagatgttttggattatataacataatcgccattatgagaaggtcgggaatgaaatcaaagatattactgacgatttacccttcgagataccggatagttgggtatttgtacgtttatctacggtatgctggttaggtgatattgccaaaagcacaggggaaagattaccctatttagatgctaaaaccttaagagggaaagcagataaaacttatcttgtcgacggcaaaattgttgatgtcggaaaaaaggttattttagttgatggtgaaaattctggcgaagtatttgatataccatttcgtggatatatggggagcactttcaaaacgctggagacggtatctcatttcaactttggataccttaatgttgtgttggattattatcgggacacattccgcgggaataaaattggagcagcaattcctcacctaaacaaaaatctattcaaatcgcttcttgttggtatccctccgatcccagaacaagcccgcattgtagcggaaatagaaaaatatgaaccgctgattgccgagtacgataaacttgaacaacacgcaaccaggttagacaatgagatttacgataaactcaaaaagtccattttacaatacgccattcaagggaagctcgttccgcaggatccgaatgacgaaccggcaagcgaattgttaaagcgaatccgtgctgaaaagaaagctcaactcggcaagaaatacgttgatagttacatctacaaaggtgacgataactgctattatgagaaggttggaaataatgagcctgttttgcttgaaaatctaccatttgaaatactcgattcttggtgctgggcaagactaaaagatattacatataaccatggacaaaaaattccaaatgctgagttttcgtacattgatataggctcaatcgataacgttaatcaaaaattaagtacaaaagaaaatattattgaacctgagaaagccccttcacgagcacgcaagatagtagaacgtggtgatgtgctatacgcgaccgttagaccttatcttcacaatatgtgtatagtagataaagatttttcgcacgaaccgatagcgagcaccggttttgctgtattaacggttgagagaggaattaaaaatattttcttgttttactatatgctttcacctatattcgatcaatatgcaaataattccgaaaattcaaagggagttgcttatcctgctattaacgatgaaaagttatataaagcacttataccaatttctccgcaaaatgaacaacaaaatatttgcaagctgatagataaatgcttcaacgttttaataaaagacgagagttaaccctcgtcttttaatttggcttctaacgcaaagaacatggaaaaaatttgtgttgttccatagctggcggaagcggaatcaaataagattggataacttttgtcgccagttcgatttgatttgtgctgcccgaacattttgcctctatatccgtttgtataataggcgacttcaaaaacaaataaatatattggctgtcaatgtattccagaggacgcacgactgttacatgcgaatctgcgacaaatttaggatattctttgaaaagtgtatcgtcaacataacccgttcgccctacagttcctgtgcccgttgaatttattattatatctccgacacaaagatattgttcctcggtgtatttttcaatagttgcgcagtcagcaaacagacatttttgcgtttgtatgcctgcccattgattgcatttttgagctattataggcagaattttctctgtaccgtatgtcggagatttgccgcgatgaatatatgaacaaattgtttgcaagcggcaccacacccaattttcaggcaaatcaaaaggtatttcatcgttgatatttgtgataatttcgccaaccttctcataatagcagatttatactcttataagcacatcaaacactcgaagaaaatcgcctaaaatagtaaaattgaagtatcattattttaggaggtttaacgatatgttagacgaattcgagaagcatttgcaacgggaaaacctgtcgcaaaacactatttcggcgtatttattgtccgtgcgtatgtacgagcaattaggcggcgaaatcaccaagcgcaaccttttggcgttcaagggttaccttatggaaacctacaagcccaagacggtaaacttgcgcattcaggcgataaacaagtatttggattttataaagaaaactaatttcaaattgtcgcccgtaaagattcagcaaaagaactttttggaaaacgtgatcagcgacgccgattataaatttttgaagaactcgctcaaaaaggaaggcaattgggaatggtattttgtcgtgcgctatttggctgcaacgggcgcacgtgtaagcgagcttattcaaattaaggttgaacacgttttaactggctatttcgacttatattccaaaggcggcaaacttcggcggctttatatacccaaaaagttaaagacggaaaccgaaacgtggttgcaagagaaaggtatcacaagcggatacctttttttgaaccgattcggagagcgtatcactgtgcgtggtatagctcaacagcttaaaaattatgctgtaaaatatggtttaaatccgaaagtcgtatatccacactcttttcgacataggtttgctaaaaactttttggaaaagtacaacgacatatcattgcttgccgaccttatgggacacgagagcatagaaacaacgcgaatatacttgcgcaaaactgcaagcgaacagcaagaaatcgtagataaagtcgtaacatggtaaaacttaaacccctcaaattcgaggggtttaagcttacaattttgcaaatatttcgttgattttatttacgatccgttgttgttcggcaagtggcggtatagctaatattgttttttcaatatcggataaaacccaatttttattccctacgccacgagtattttcaactgcttgcatttgaactaatggactttttaataggtatataaagtaatcgggcaatatataattatgattaaatttaattagcgcaacactgacgaataaactaaattctatatccacattgattagaacaggtatacctgttgtgccaactttggtaagtaatatatcgcctctttgtgggttgcatcttttcgataattctttatgctctttaatggaaatatatttcgtatcatttaattttaattcaccagaacttatatctttaaccgaaacaaaaggtatgccattttgcgtatattttggtgttgagtgcgttccatctgtgattgacttgattatgtttgtaagtttgcaccacgcccaatcatcgggcaaatcaaatggcacttctattgcttcgtctttatctttgccgtcgatgtgttcgtaatagcagttatcatcacctttgtagatgtaactatcaacgtatttcttgccgagttgagctttcttttca

SEQ ID NO: 744 - DNA, 5230 bp, Unknown
  16S sequences of unknown bacteria
cacgccgtcatttctgatttaagcctcgttcttccgatactttgtcaatgctctgagctccccttacgcaggggagccttttgggaagtgctacatcataagaaacagcatcaactaaacatatctacataaaacgaaatgcatatggcacgaattattgactgaaacagataaaaaatctttggacagtgtgcctctgtgcggcgcggcagcgtccaaaaggctccccttggaatcaaggggagctggcagcgaagctgactgaggggttaccttgcgcattgcttttgaagatggaaaccgggtttggcgatgatcagagaggttgcgaaagaacttttgctgttttttcacagccccttccgttcacagatcatccggcatttcgtatgtaccgttgttcatccgctcgacgatgccgccgaggtcgttcggatcctgcttgatttccgccatgggatcgtcgctgagcatggcttgcagctttgcgtccgtatcgtgctcccacggcctgtcgttcgccttcatggcgttgtgcacggcaacgcgctccagcgcccggttgcccttggccgcgttgggaatcacgctgcgatagaggttcctgaagtggtcaaacactcccatacgttttccctcccaaacaattgtttccctaagtgcgaagcccgttaggccagcttttccatttcatcgatcatcttttccaccacagagagggacttgcgccagaagttcacatccgtaacgtcgatgcccacgcgcgcggccacatccttcacgtcgcccaatcccgtggcagcgagcagcgcgtcgtattccggcaggaatgcctctcccttttccagataccgctcgtacacgcccaagccaaacagcagaccgaacgcataggggaaattgtaaaaatgcagacttgcggaataataatgcgttttgcaggcccacatatagggatgcagcgcgttttcatccaggccgtcgccataggtctgcttctgcgcgtcgagcatgatttccttgagctcatcgggcagcatggtgtgatcctttctgcgctcgatcacttcggattcgaacaggaagcggctcaaaatgtccaccaccacttgcgccgcgttgccaatctgctggtcgagcagcatcaagcgctcctgaggattcgcaccctcttgcaatttggcgaccagcatcgtctcattgaagatggacgcggtttccgccagcgtcatcggataatcggcgttgaggatggacaaatgcttcacacaatcgccatggtacgcgtgccccagttcatgcgccagcgtgctgacggaatccaggctgccctcgaaattcgccagcacatagctaatgcccagcggatgcacgcccgcgcagaacgcgccgccctgcttgccctcgtaggggaacgcgtcgatccaatgttcctcaaacgcgcggtcgatgaatcggctcattttttcactgaactggccgaatacctgcaccaaaagctggcgcgcttcttccagcgtgtaggtcttgcccgccgcgccaatgggcgcgaacaaatcataaaacggcaatccgccctcgtgccccaaatggcgcgccttggcgcggaaatagcgccggaacgcgggcagggattcgcgcatggcggtgagcatggcgtcgagcgtctgccggtcgatcttcgcggcgtcgagcgcggtatcgagcacggtatcgtaatgctgcaattcgcacagggtcagcgcttcgcccttgatgccgttcaggcaggcggccatggccaactcgatgcgcggataggaagccagttcggcttcataggcccggcggcgcaccgtcgcctctggcgaagtcgccatgccgcgcaccgtggacaatggcagggattgcttttccccatcgatttccatctccaccatgtgcgtggccattatctggtcggaaagctggctccacgcctcgccgccggtcatctgcatcttgagcaccgggccctcgatggctggatccatcacgtgcgccgcgtccttcaccatggtcttgagcatgtattcgtgttctttgagcagcggctcgcgcacgatcagcgcgtccaaaccttcgaccttgctcacatagcgcgtgaaggcggaagaggtttgctgcatttccacctgcgcgcgcatcagcttatccatccaggcgagcgcttgctcgtttttcgcgttggtcgccaaattgagaaaaatgaattcccccaccagcgccattttttccgaccgcttttgcgcggtgcgcaccgcctgcacgagcagcgcgcccacgtccgccggtttttcctgcaggagcaccgccagttcctggttgagcgcctgcgcctgcgcaaagtccgccgccagtttcgcatcgtcaaagccgctatacatcttcgtcaaatcccagtgcaacgtttttccctccgattttctaaaaatccccgttcaaaattccttccagcgcatccaaaatctgccccaccgcctgcggcaaggtttctggattttcttctgcctctaccgccaagggttccaggcaatacgtctcttccaaatattgccgccatcgcgcgcaaagcgcctcatagtcgccgcccgcgatttcctcgaaccgttccggctcccgcatggcgcgaagcgcctcttctaaggaagtttcccgcacgaggtaagcaaacagagagcccgcgcccgcgtaggtaagctccgctccgtcaaacgaaaacaaagcgctgtacacatcgcggaggctgggtgcctccatttcataccatatgaccccttccaaatcgccaaaatagcccagggacaagatggcccgcgcgtctagatacgccgtagcgtccaattctgacaacgtgccgccgccccgctgatagagccgcaagagcgtcgccagatattcggtataaaacggatcgccgctatacatatgcgctttcccgcgcgaggccgcgtccagccaggcaaggcgcacatcgcacccatcgtccaaaaactgatactcaaaggcgacggcgttctccacccacgtggcaaagccctcttccatccacgcgctgccatcctgcgtgatggtatacgcatgggcgatttcgtgttccaggcaatccttgggccaataattgacatagatcgcgccatccagataggtgtaggacgcgatttcccagcggctttcatccacataaaattcgattgcccgatcgatatccgccaagccctgggccgcatacggcgcaagatacgccgcgatttgcgccatggcccgctccgcacgccacacaaattcgcgcagcgaagcttcgtccaaaatggtatactggtggctatcctggagggcgatgtcgtactctgcccgctgcgtgcgaatgtgcacgtcgtaagtttcctccgccgtggcgtaggcgctgtaatccggcagaagttcggcgtccggcacaaattcacaggccgcgccgatggcgtccagccacgcgttgcgatccggcgcttccgctccgccccgcagccaccaattcgccgccgtcatgcgggacaatacgatcatctcctccgcgcgcagcgagggaagaaaacacaaatcatccatgcccaacgcggccatgttgccggcatcggaatattcccgcgccaaagtttcttcctccggcgcgccatgttccaccaaataggcgacgccttcccccacccaacgttcttcttctcgcaggcaggcgttcgccagcgcgggcaagcaggtttcttccagagaagccgtcaaaatcaacgcgttttcctggaagatgggctccgccaggcggtcggccaccatggtcgcgtcgcgcaaaacatacacgtcgatgggctccgtttcgccaacctgcgcttcaatttgctgaattcgccgatccatgcgctgcacaaacgccatatcgcccatcgcttcaaaccaataggttgcttcttgcgttgtcctgcgttccgcgtaaaaggtttgcccattgagcgaacaaaacgcatgggaaaaaccgcgatccgcctgcgcgggaaacgccacaagaagcagaaacagaaccaacgcgcctgccgccttccgtcgcacactcacccctcctccacgcttgttctgaaagatggaataagggcttgtgccaagcgtatgcccgcgcaagcccttatcatgccatgcaaattacttgccggccagtttcttatacatcgccagacgttcggacgcgtcttcctccgccttttcaaacagcttttcagccgtgtcggggaactggcgcatcaacgaagcgtaccggttctcgcccttgatgaaatcctgatagctctcggtgggatccttggaatccacggtgagcgtctcggtttccggattgaagcggtacagcggccaataaccggcggcaaccgccttcttgatctcgagctgcgccttgtccatcttgatgccgtggttgatgcacggagcgtaggcgatgatcagcgacgggccatggtaagcttccgcctcgttcacggccttgatcagctggttcatgtccgcgcccatggcgacggtcgccacgtacacatagccatagctcatggccatcaggccgaggtccttcttcttggtgcgcttgcccgccgcggcgaacttcgcgaccgcgccagtcggcgaggacttgctggcctggccgccggtgttggaatacacctcggtgtcgagcacgagcacgttcacatcctggccctgcgccagcacatggtcgagtccgccgtagccaatgtcgtaggcccagccgtcgccgccgaaaatccacatagagggacggggcagcaggtcggcgttcttgacaacgaactgcgcgtcctcgttctccggatagaccttgcacagctccaccagggactcgcccagatggttggcctcggcggtgtttcgattcttcagccaggcgttggcaatgccgccgaaggcgggattctttgccagacgctccaccacggtcttgatgccctcccggcgggtccgcatgctcacggacatgccgtagccgaactctgcgttgtcctcaaacagggagttggcccaggcggggccacggcccttctcatccactacataaggcatgctgggcacggaggcgccccagatggaggaacagccggtggcgttggcgatgatggcgtggtctccgaagagctgggtgaccatcttggcatagggggtctcgccgcagccg

SEQ ID NO: 745 - DNA, 23530 bp, Unknown
  16S sequences of unknown bacteria
acaccccacttgttattcagtataccatactgtctaacaaatggggtgctgttcagacttctttggaagcctcgatttttttataatgagggccatgaagggagcgtgaaaggcgttgaagggaagggcgatcctcgcatccgcgctctgtctggccctgagcctgaccgggtgcggcgccgggggagcggacagcgcgcagaccgcacagcaggaacccgcgcagcaggaacccgcgcagcaggaacccgcacagcgggaacccgcaggcccgtttacggcggacacgccggtcgaggcggtcctgcaggacgaggtctttggggacgatggccgcctgctctttccggtggacaccggctattggagcggcgacacgctgggtgaactgcagctgacctggtacaacaacatcgacccggaggagacggtggagatcgtcaacaccctctggcagcgcgccgaggcgggcgagacggtgttctacgacatctataccgaggaggagaaggcgcaggacccggacaaggcggacaccggcctgttcttcttcaaaggggaggcgggcgcgccctttgccgtctgcaacgcgggcggcggctttgcctacgtcggggccatgcaggacagcttcccccacgcgctggggctctccaagcgcggctacaacgccttcgccctgatctaccgccccggcgcgcagaccgcctgcgaggacctggcccgcgccatcgcctggatctttgcccacgccggggagctggaggtggacacggagggctattccctctggggcggatcggccggcgcgcgcatggccgcatggctcggctcctacggccccggcgcctttggcgaggaggacctgccccggcccgcggccgtggtcctgcagtacacggggcatgcggagtacacgccggaggacccgcccacctttgcctgcgtgggcgagagcgactggatcgcgaactggcgcaccatggagcgcaggctccaggccctgcaggacctgggcatccccacggagttccaccactatcccggcctgccccacggctttggcctgggcaccggcacgatcgccgagggctggctggacgaggccgtcgccttctgggaggcgcagagagcgccgcaatcctgacgaaatcaaatggatattttggtggaaaggaagcgcttttccatgaataacttcatctttcagaacgcaacgaaggtctactttgggcggggctgcgtgaaggagtacctggcctgcctgaccaagggcgcaaacaccatccttctggcctatggcggcgggtccattcggcgcaacggaatctacgacgaggtcacgggcatcctgcgcggcgcgggcaagacggtcgtggagttccccggcatcctggccaaccccacctatgccaaggtgctccagggcgcaaagctcgcccgggaggcccaggcggacatgatcctggccgtcggcggcggcagcgtcatggactgctgcaaggcggtctccctcgccgcccgctgcgacggcgacatctgggaggagttctgggcgcggcccggggtcatcgactttgcgcccctgcccctgggcgtgatcgtgacggtcgcgggcacgggcagcgagtgcaacggcggcgcggtcatcaccaacgaggaaaaaaaggtcaagaccggccgcgactacccccagctgaacccggcctttgccctgctggaccccacctatacctacagcgtgcccaagggccagatgatctccggcagcttcgacatcctgagccacatcctggagacctacttcagcgagcccgacgaggacaacgtctccgacgacatcatggaggccctgatgcgcagcgtcatccgcaacctgcgcgccgcgatccggaaccccgaggactacaccgcccgctccaacctcatgtgggacgcgaccatggccgagaaccgcatcatcaagatgggcaagaagtgcgacttcgagtgccacaacatggagcaccagctcggcgcgtacacggactgcaaccacggctgcggcctggcggtgctgcaccccgcctactaccgccacatctaccgcgaggggctgcaaaagttcgtccgctttgccgagaacgtctggggcatcgcccgccagggccggagcgacgaggcgctcgcccaggccggcatcgacgccctggccgccttcattcgggaggtcggcctgcccaccaccctcaaggagctgggcgtcccaagggaacagctccgggagatcgccaattcctgcggcatctcgcagggcagctacaagcgcatgacgcacgaggaaatcctcgcgatcttttacgaatgctacgacaaggaggcatagagcgatgaaaaaattctctgtttggattctgagcctggtcctgatcctgagcctggccggctgcagcgcgcaggcgcccgccgcaaccgccgcgcccaccgcggaggcggccgcagagccggagccgaccgctgcgccgacccccacggcgacgccccaggagacggccgcccccgacccctctcccgaggcgagcaccgcgccggaggcgtcggatgcgccgtcgggcggaaagacgctggtggtctactactccgcgaccggcaacacgcaggaggccgccagcctcattgcggagctgacgggcggcgatctcttcgagctggagcccgcggacccctatacggacgaggacctgaactacagcgacgaaaacagccgcgtggtctatgagcacgacaaccccgacgcccgcgacgtggcccttgtgcaggacacggtcgacaactgggacgagtacgacacggtgtttctcggctacccgatctggtggggcatcgcggcctggcccgtgaacgactttgtcacggccaacgacttcaccggcaagaccgtgatccccttctgcacctccgccagctccggcctgggcgagagcggcgagctcctggccgagatggccgggaccggcgattggctcgaggggcagcgcttcccctcccgcgtgagccaggaggatgtgcagacctggctggacggcctcggcctgtaaacggagaaaacgaagcaaaaaaaggaggaatttgcgatgaaaacgatgcagaagcggctcgccctggcgcttgtcgcggtcctgacgatggcgctgctggccggctgcgccagcggcgcgcccgccgcctccccgacggccacggccgagcccacggcccagcccaccgccgaggcgaccccggaggcgacggaggcgcccgaggccgcgctcgacccggactggatcgtcctggcggaccagggcatgttctccgccggcggcacgaccatcaccgccgagggcacctttgaccccgaggaccagtgggaggccaccggcgccggccagaccgcgcacgtggaccacgccaacgtcctctaccagatccccgcggaggagacgggcctgcccatggtcttcctgcacggctacggccagtcccgcatgggctggatgaccacgccggacggccgcgagggctggtcggacatgttcctgcgcatgggccacagcgtgttcctgatcgaccagccgcgccgcggcgaggcgggcgcgacgtccgtcagcggcaccatcagcaccacgcccctggaccagcgctggtacacccagttccgcatcggccggtgggagaacggggagtccgtcgtcaacgagggctcgcagttccccaacgacccggaatccctcgaccagtttttccgccagatgaccccggacaccggcatgcgcagcgacatgggcgcggactttgacagcgacgtcgtggcgcgcgcggtcgccgcgaccatcgacgaggtctatgcgcgcacgggcaaggactccatcctcgtcacgcactcccagggcggcctcccgggctggacggctgcgcagtacacggaccacatcgccgccatcatcgccatcgagcccggcggagcgcccgcagccggcagcgcggagttccagacgctcgcggagaagaacatccccatcaccatgtactttggcgactacatcgacaacggcgacccggccctggccgcgaccatggcctggcaggccatgcgccagacctgctacgactttgagacggcctacaacgagcagggcggcaactgcaccgtcgtcgacctgccggaggagggcatcacgggcaacgaccacttcatgttccaggacctgaacaacgacgtcatcgcccagcacatcgagaattggatcgaggagaccctcgcctaagaaccctgcgccccgtcccccgcgccgcgggaggcggggctgcacctgcagacagaaaggagacgcgcaccatgaaacggattctgcccgcattcctggccgtgatcttggccctggccctgaccggctgcgccggcggcgcgcccgccgcatcccccgccccttccgccgccgacacggccccgacgcaggcagcgcccaccccgacgcagaccgcccagcccaccgatgcgcccgccgagggcgcggaggcggcgggctcctccatcctcatcgcctacttcaccatgccggaggacgtggaccccgcgggcgcggacgccgtcgccggcgcgagcatcgtggtgcgcgacggcgagatcctgggcaatgtcgagtacatggcccagaccatccagcaggcggtgggcggggacctgctgcgcatcgagacggtggaggaatatcccctggagcacgaggccctggtcgactttgccgccgaggagcaggaggccggcgcccgcccggcgctcgccacgcagatcgagaacctcgagcagtacgacacgatcttcctcggctatcccaactggtggggcgacatgccccaggcgctctataccttcctggagtcgtatgacctttcgggcaagaccatcattcccttctgcccgcacggcggcagcgggttctcccgcacgcagagcacgatcgcggagctgcagcccaacgccaccgtgcgcgaggacggcctgaccctctcccggaacgacgtggcggacagcgcggagcaggtcacggcctgggcccagggccttgggctgtgagccggcccggaaggaggcagatgcgatgcgaaagaccatagcggccctgctgctgctcgccgtgctggccggcagcctcacggcgtgcgccagcggggagaactcggagccgacgcttggcgcgggggaggaggccgatccggcggagagcggcatcctggtcgcctacctgccggaggagagcggcgccgtggcgcaggcggcggaggcgatcgccggctccgtgggcggaacgctcgccgacctgtccgcgggcggcgactggaacctgaacgcgtatgcgttcgtgctgctggggtttgcggcgcagaacagcgccctgcccgagggcgtgcagacctttttgcgggaaaacgacctgggcgcgcgcacgatctatccctttgtcctcggccagggcaatgcggaggacgcggtctttgccgcgatctccgacctggagcctggcgcgctgctgggcagcagcgccctgctcctgacggaaggggcggacgcggaatccgccgccgcctgggccgagggcctgtccctggcggcgggcgcggccgcgccgcaggccggcgggaacaacaccgtgcgcaccgccgcggtgacgcccgggcagcgccagacgctctacctctgggaggagggaaacgcgcccgccgccaccgtctacaccgaaaacaacggcggatactttgacgacccggacttccggccgtacctgacctattccccggcacccgcgggcacggcggtcaagggcgcggtgctcatctgcccgggcggcgccttccagttccgcagcgaccagcccgagggcgtggacgtggccgaggccctgtccgccctgggcgaccagagctttgtcgtggactaccgcctgcggccctatacgcagcaggagggcgcgctggacctggcgcgcgcggtgcgctttgtccgcgcgcacgcgcaggcgtatggaatcgcccccaacgacatcgccgcgatgggtttttccgccggcggaatcctcagcggcgagatgctgctccactacgacggcgcggtggaccccacggccctggacgcgtcgtacgcgccggacgagctggaccgcgtctccgcggacgcggcggcctgcgggatgatctactccttttacggtcggctgagcgtgggcacgacggacgtggagctcctgcgctccggggatctcccgccgaccttctattgctacggcacgcgggacccgttctacgaccagttcctggccaacgccgacgcggcggaggcggcgggcgtcgcggtggagcggctccagatcgacggcatgccccacggcttcggcgcgagcggcggctggattccgacctacgacgcctggctgacggaggtctttgcagccaacgactgagcagcgcggtcccttccgcccggcggcggaggggaccgcatggatttttttgtggaaagaggcgcatgtttcgtggaaaagccgtcggacacctacttgtttgcggagctgcccgtccccaccatcatcagccaggtggtcacgatgatctacaacctggccgacacgttcttcatcgggcagctcggcgacccggcgatggtcgcggccgtgtccctggtctccccgtggttcaacctgctcacagccctgggcaacctgttcggcctgggcggcagcagcctcatctcccgcatgatgggcgcgcaaaaccgcggggagatcaagttcgtctccgcgttcagcatctggggcggcgcggcggcgacgctgctgttctccctggggacctatcttgcgcgcaggccgctgctggggttcctcggcgcgagcccggatacctatgcctacgcggaggactacctgctctgggtcgtggtgctgggcggcgtgcccacgatggcgagccttgccctgggccacctgctgcgcagcgagggccacgcccggcaggccagcgcgggcatgatgttcggcggcctgctgaacgtggcgctggcccccctgctgatcttcggcttccacctggaggtcgcgggcgccgcgatcgccaccgccgcctccaacgccgcctccgtggcgtttttcgccgcgcagtacgcccgcctgggggagaggaccagcgtctccctgcatccgcgcgacatctccttccgattcgtgcggccgatcttctccgtgggcctggcctcggcgctggccacggccctgggcaatgcctccaacatggggatggtgcacctggcctccggctacggggacatcccggtggcggcctacggcatcgtcaagcgcatcgaccagttccccctgaacgtgtccatgggtctgtgccagggattcatgccgctcgtgggctataccttcgccgcgaagaactacaagcggatgcgcagcgtgtccgtgttctcctgggcggtcgccctggcgctctcggcctgctttgtcgcctgctttgcggcctttgcgccgcagatcctgcacctgttcatcccggaggcggagacgagcgccctgggggcgcgcttcctgcgcattgcctgcctggcggtgccgctgacgtcggtcaatttcctcatcagctatacgctgcaggccatgggcaagggcgtgcagtccgcggcgctgaccttcagccgcctccggagcgccccgccggacaacgccccttcgcccacggcgtgaatcgacggaaaaacggcgcagctgcgtcttgcggggacgaaaaaactgtgctatactcttcctcaggaagatgtcgaaaaaccagaagaaacttgatgcgtaaaaacggaaaacaaaccatcctccccgaaattttgcgggggggggtacttttttcacaaaccgtgagggaaaaattcctgcgcgtcgcaaagggatgccgggaaattcccttggaagaggaggaggcgaagcggtgaaccaagtcgcgctgtattctttgaccctgtggtatgggctcaagtccaaactgacctaccggctcagctccgtattcgagcttctgggcaagttcctggaggtcttcgcgcagatcctgatctgggtggcgctgctgggcagcggggcgcgctttgacaccacgctttcccagatggtgacgtatctcatcctcacccgcgtggtctccacgctctttgccacgcaggcgggcaacgagatcagcgacaagatcaacgacggctccatcgccaacgatttcgtccgcccgctgaacttcaagctctacctgctctgcaacgacctgggcaacaacttcttcaaggtcctggtcgtgttcctgcccatcggtgtcatcgcgggcctgcgctatgggttcctgctgccgcagaccgcggcgcagggagccgcgtttcttgtctcgctcgcgttcggcgcgctgctgacgttctactacagctatatcctgggccttctgtccttctggctcatcaagaacccctttctgcgctggcatttccgcaacgtggagcagatcttttccggccagttcttccccatctggctctaccccgcgtggctgagcgccatcaccgagtttctgcccttccgctacttcacctatgagccgctggcgatctacctgggcaagacgcccgtgagcgagatcccgcgcgtgctgctgatccaggcgttttggctcgtcgcgctctacgcggtggagcgcatcctgtggcgccgggcctgcaaaaaagttctggtacaggggggctgagcatgaaaaagacgctggctgtgctgtttctctacatgcgcgtcaaggccaagggcaagtacgaataccgcgccgccttctggctggacgcgctgagcttcctcttcggctacggcgcgcagacgctgctgatggtcctgctcacgcagaagttcgacaccatcaacggctggacgccctttgaggtcatgctgctctacgcctacacgctggcctcctacaccctggccaacgcgctgctgagcgacgtcatgtggagcctttcccggcgcatccgcaccggggactttgaccagacgctgacaaagccgatgaagccgctcacctacgagatcgtgaccgggttttcgccgtactactttctgcacttcttcctggccctggggatggtcgccatcggcgtgacgcagctgcacgtgccggtgacgccactgacggtcctgcaaatcgcctgtggcatcctgggcggcgcctgcgtgcagggcggggtgctgctgctctttgcctccgcctcgttcttctggatcaacaacccgctgacgggaaacttctacaccaacatccggcccctgatcgagtatcccatctccgtctatcccaagtttttccaggtcctgctcacgaccctgatccccctggcgtttgtgagcttctatccggtgcagcagatcagcggccggcaggatttcggtctgttcccgccggtggtgcggcatctgtcgctgccggtcgggatcgcgtttctgctcatcgcctacgcggtctttgccgcggcgtccaagcactacaagagcaccggatcgtaaggaggtcttttcgatgatcgaagttgcgcacgtctccaagtcgtttaagatctacaagaacacgaaggattccaagcacaagctgcgctcgctctttgcgcgggaatacgagatcaagcgggcggtggacgacgtcagcttcaccgtcggcgacggcgaactcgtgggctacgtgggccccaacggcgcaggaaagtccaccaccatcaagatgctctccggaatcctgacgcccacggcggggaagatcctggtggacggccgcatcccctacgagcagcgccaggagaacgccaagcacatcggcgtcgtgttcggccagcgctcgcagctctactgggacctgcccatgaccgacaccttccgcctgcaccggcgcatgtacgagatcccggaggagacgtacaagcgcaacgtcgacctgttcatcgaggttctgcagatgggcagctttctgaaccagcccgtgcgccagctctccctcgggcagaagatgcgcgcaaacatcgccatcgccctgctgcacgatcccgagatcgtcttcctggacgagccgacgatcggcctggacatcgtggccaagagccgcatccgcgactttgtcaaggagattaaccggcgcaagggcacgaccttcctgctcaccacgcacgacatggacgacatcgagcagatctgcagccgattgatgcttatcaaccatggtcgcctgggctacgacgggagccttgcggaatttcaggcgcgctacggcgatccataccggctgtatgtcacattgcagccgggggagcggccccagcacccgcatttgcagctcctgggcgctcaggaggggcgcttcaccctcgggggcagtaaggcggagctgcccatcggcgaggcagtttcctacctgtccacgcactacagcgtccgcgacctgcgcatcgaggagagcagcctggagagcatcctcaaggccatgtactgagagtccggcttcgccccgtgccgcccttcggcggcccggggtttcggccggcttattttcgccctccgggctcaaaacgctcggccttcaggagcttcgctcccttcggcttcgccccgtgccgcccttcggcggcccggggtttcggccggcttattttcgccctccgggctcaaaacgctcggccttcaggagcttcgctcccttcggcttcgccccgtgccgcccttcggcggcccggggtttcggccggcttattttcgccctccgggctcaaaacgctcggccttcaggagcttcgctcccttcggcttcgccccgtgctgcccacggcggggaggttttctgcaagccgcgccgcccttcccaagacctgggaagggcggtttttttgcgccgaaggggggagaaaacctggaggttaacacaccataaccaatggagacttccctccccggcggaatcggggtacaatccagaaaaaggagatgaggcagatggagacgaggaccctgggcggcgggctgaccgtttccgcggtggggctggggtgcatgggattttcccacgcatacggcgcgcccatggagcggggcgaggccgtgcaccgcatccgcgaggcggtggagatgggctataccttctttgacacggcggaggtctacggcacgccggaggacccgcacgcaaacgaggcgctcgtgggcgaggccctggcgcccttccgcgggagggtggtcatcgccacgaagttcggcctccggttcgactttgccagcggaaaggtgccgctgccgctgctccccgattcccgtccggcgtccatccgccaggcggtggaggggtcgctgcggcgcctgcgcgcggagcgcatcgacttgtattttcagcaccgcatcgacccggccgtgccgcccgaggaggtcgccgggacgatggcggacctcatccgcgaggggaaggtcgcgcgctggggcatttccgaggcggacgaggcgtacctgcgccgcgcgcacgcggtctgcccggtgacggcggtgcagaaccggtactccatgatggcccggggggtggagtccctcttcccggtgctggaggagctgggcgtggggctggtggccttctcgcccatggcgaacggctttttgaccggccgctacggaaagggcgaggccttcgaccccaagaccgactaccgcgccgccatgccgcagtttgcggacggggccgtggagcagaaccaggcgctgctggacctgctgcgccgcctggccgcggaaaagggcgcgacgcccgcgcagatcagcctggcctggatgctctgcaaaaagccctggatcgtgcccatccccggcacgcgcagggcggaccgcatgcgggagaacgccggggccgcgggcgtgcgcctctcccccgaagcggtgcaggccctggacgccgcgctggggaacctgccgatgtccgcggtatttggcgtggagagcgggaagaggagctgagaaaatgcgtcatctaagaggcgccgtcatcacgggaaggaacgccatggccgttcgggacgattgccccgtgccggaggagccctgcgccacgggcgcgctgatccggccgctgatctggtcgccctgcacgagcgacgcgcacctgtgcgccacgggctgcgcttcgctgccctatctgctgggcaaggccgttgggcacgagatgtgcggcgagatcacgaaggtcggccccgaggtgaaggacttccgcgtcggggaccgggtcatcgtctgctcggggatgcccgtttggcgcagcctggaggcccaggacggcatggccaagcagcaccaggacaatctctacacgggcgtggggcggctcctttgtggaggaatcctacatccgcgacgcggacatgaacctggcgcgcatccccgagggcgtcagcctggagcaggcggtgatggtgccggacatgatgtgtaccgcttttgagggcgtgcgccagctcggcctggagttcggcgcctctgtcgtggtactgggcatcgggccggtggggctgatgggggttcgggccgcggtgctccacggcgcgggcaacgtctttgccgtgggttcgcgcaggccctgctttgcggtggcgcaggaatttggcgccacgcaccggatggattcccatgcggcgggggatctggaccgaatcgtccgggagaacggcggcccggtggacggcgtcctcctgtgcggcggcggggaggacgcgctgaattccggcctgtccatcctgaaaaagggcggaacgctcgtgaacctgagcgcctattttggcggcgcgcccctggagaacgacccggccctctggggctttggctatggggacaagacgatcaagggcgtgggctgccgcggcggccggctctggatgacccgcatggcgcagctcatcgcctgcggccgggtcgcgccggagaaatggatcacccaccggttccacggcctggacagcgtgcccgcagccatggacctgtttttgcagcgcgaccgcaccctcatcaagcccgtgatctacaacgactgaagaaaggaagcgcagacaatggaatacgcaaagctgaacaatggaatcgagatgcccatggcgggcatcggcaccttcctgctgacgccggacgaggcgcaggcctccgtggagagcgcgctgtcctgcggctaccgcctgatcgacacggcaaacgcctacatgaacgaaaaggccgtcggccgcgccatgaaggcttccggccttgcgcgcggggagatcttcctggagacgaagctctggcccgccttctacgagcaggcggacgccgtggagcggacgctcgcgcgcctggacaccgactacatcgacctgctgctcatccaccagcccgcgggcaatttcatcgccggctacaagctcatggaaaaggcctacaaggcgggcaaggtccgggccatcggcctgtccaacttcaccccggcgcagatccgggagatcctggacgtctgcgaggtcaagcccgcggtgctgcagaccgaggtccatccctattcccaggaaaaggcgctcaagcagttcctaaacggggaggggatcgtggtccaggcctggtatcccctcggccacggggacaaggcgctcctggaggagccgctctttgcgcagctcggcgagaagtacggcaagtcccccgcgcagatcattttgcgctggcacatccaggacggcaacgtcgtcatccccgggtccaagaacccggcgcacatccgcgacaacttcgccctgttcgactttgccctgacggacgaggagatggcccgcatcgccgcgatggatgcgcagaagcgctactacaccgccacgccggagaccctcgccgggtacgcggccatggttccccccgtggacgaacaaaaataagaaaggaagagtccctatgcgcaagaactttggaagcaagtcctggttttaccccctgccggtgctgatcctgggcacctacaaccccgacggcacgcccgacgccatgaacgccgcctggggcgggctctatgacgcggacaaggtcgtgctctgcctgagcgcaggccaccgcaccaccaagaacatccaggcgcgcggcgccttcaccgtgagctttgccgacgctgcgcacgtcgtgccggcggactacgtgggcgtggtctccggaaacgccgagccggacaaggtgaagaaggccggcttccacccggtcaggagcgagttcgtggacgcgcccctgttcgaggagctgcccgtggccatggagtgcacgctcctgaaggtcaacgaggacggcaacatcatcggccagatccagaacgtcagcgtggacgagagcgtcctggacgccgggggcaacctcagcatggacgccttccggcccatcgcgttcgagccggcgggcagcgggtaccacgtgctgggcggcaaggtgggcagcgccttccgggacggcctgcggctgaagtgagcggacgagaaaaaatggatggagaggaagaaaatggatcgcccctttgtcgtgtgccacatgctggcttccctggatgggaagattgacggcgcgttcttcggcgcgccggagacggcgcccgcgctgcgggcctacgcggatctgcgcggcttttacgcctgccaggccacgctctacggcaccaccacgatgcgcggcgggtatgccgacggggacgcgcccgccctgcccgcggcgcgcggggaggttcccgcggaatggatcaacccggagggccggaagatggggaacttcctcatttcgctggaccccaggggagagctgggcttttccagccacgtgttggagaagaagggccgccccgccgcgcacgtcgtggaggcgctgaccgggcaggccgcccccgcgtaccgggcgtatcttcgggacgtgggcgtctcctacctcaccgcggggcgggagagcctggactgcgccgcgctgctgcaagcgctccgggagaagttcgggatcgcgcgcctgatggctgcgggcggcggcgtgacgaactggtcccttctgcgggagggcctggtggacgagctgagcctggtgatcgcgcccgtggcggacgggagcaccaccgccgcctcgatctttgcgcaggcgcccttcctgccgccgcacgggccggtgccctttgctctgaaggaggcaaagcccctggagggcggcgccctctggctccgctacggaatcgcgtgatcccccaaggcttctgcagggcaaaaggccgcgctgtacggggcgccatcgacgtgggtgaccggtccatcgacacggcccaggcctatggcaacggggccggggccggcgcggcggggaggaagagcggcgcaaagcacggcaagacccggcgggcatgacgcgcgtggggagcagaggccctgcaaaagagactctgctccccgctttttttcaaaaaaaggaggacgtaagatgaaatcgctacgaaatcgggccctggcgctgctgcttgcggcgatgctgcccctgtccctgaccgcctgcgcgagcggcagcccggcggcgaccgccgcgcccacgcaggcgccgcagagcgcggcccccgcggccacggacgcgcccgccgagacaccggaaaccggcgagccggagaccgaccagccagaggcggcggacgcgggcggcatcctcatcgcctacttcaccgccgcggagaacagcggcgtggacgccgtggcctcggccagctacaccaccctggacggggaggccgtgggccgcgtgcaggccctggccgagaggatccagcagaacgtgggcggcgacctgttctccatccgcacgtcggtcgtctacccggcggacggcggggagctcatcgactatgcggcgcaggaacaggaggagaacgcccgcccggagctgacgacccacatcgagaacctggacggctacgacacgatcttcatcgggtatccgaactggtgggcggacctgcccatggcggtctacagcttcttagacgaatacgacttttccggcaagacgatcattcccttcaacgtccacaacggcagccgcttctcccgcaccatccagaccatccaggagctggagccggatgccacggtcgtggaggacggcttcaccgtcagcgagcagaccgtggccgatgcggcggaggacgtcgcggcctggctggagggcctgggctactaaggggggcgcgcagatgaaaatgccaagatttgcgctctgcctggcgctgggggccgtgctggtcagcctgtccgcctgcgcgcaggcggcctcgcccgcctcgcaggcgacggccgccccgcaggcaacggttgccccgcaggcgacggtcgccccgtccggccagccggcccccgtgcagacgggcctgatccgcgagcagatcctcgaaggggagacggggaccattcactacagctactacctgccggaaggatacgatggggagacgccgttcccgatggtcgtggtcatgccgggctatgaccggatgtggtttggggaggagtcctcggggtcgaatctggactggagcggcttcctgtgctggacggagctgccgcaggagagcatcgtggtctccgcgcagctcaccgactggggcgagacctcggcgcggcaggcgatcgagctgacggagcacttcctcaggaactttgcggtggatgcggaccgcgtctatgcggcgggatactcggccggcggggagaccctgtcccaggccgtggccctgcggccggacctgtacgcggcgtatctgcacgccgcctcccagtgggacggcgcgtttgcgccggtcgcggagagcggcgtcgcggtctacatcttcatggcggagggcgacgaatactacgggccggagtgcgcccgcgaggcctacgacgggctgcgcagcgcctacctggacgcgggatggacccaggaggagatcgacaccgtcctgcagatccagaccccggacgcggagtggttcgcgcagcggggcgtcgccgggaactaccacggcgggggcaacgttgtatttgacgagaccgccatcctggaatggattctttcccacagcaaacgttgagaacgggaggccggcgacgtgaagccaaaggcgatcggaaggattttcgtggacgcggggatgagcgtcctgttgctgctgctcatggcgtatgagctggtcggcagcgctgcgcacgagtggatcggggtggggatactcgccctgttcccggtccaccacgccctgaacgggaagtggacccgcaacctgttccgggggaaggttacgcccctgcgcgccctgcaaacggcgctggcggcgctcgcgctggtgaccatgctgggctcgtttgtcagcgccctgctcgtgtcgcgcacggtgtttgccttcctgccggtgcgcggcgggcggagtttggggcggatgctgcacatgctctcggcctactgggggtttgtgttcctgtccctgcacctggggctgcactgggggacgatgctggccctggcgggccggctctgcaagggaccttcccgggcacggcgcatcctgctgcgcgccctgggcggcgccatcgcgctctacggcgcgtgggcgtttttccgcaggggcatcccggactacctctttttgcggacgcagttcgcgttctttgacttttcggagccgcggattttcttcttcctggactacgttgcggcgatggggacctttgtctggatcggacactacctggcaaagggcgtgcggcgtctgaaggggggaagaaacggatgaaacgagcgctctgcgcgctgctctgcgccctgcttctggcgctgtgcgcctgcgccgcgcccgaacctgaggaggcgcaggcgagcttttttgccatgaacacctacatgaccatgaccgcccatggcgcagacgcgcaggcggcggtcgaccgggcgcaggcgcggatcgaggcgctggaatccctctggtccgtcacacaggagggcagcgacatctacgccgtcaaccacgcgcaggggcagccggtcgccgtgcacgaggagacggccgcgctgctctcctttgcgctggacatggcggaggagacgggcggcgcgctggaacccacgctctatccggtgctcacggcctgggggttcacggcggacgcgcaccgcgtgccggaggaggcggagctcgccgcgctcctggagaacgtggactgcgcgcgcgtccgggtgcagggggagaacgtgcagctggacccgggcatgatgctggacctgggcgccgtgggaaagggctatgcgggcgacctggcggcccaggcgctgcgggagggcggcgtcgagtccgcgctgctgaacctcgggggcaacgtgcaggccatcggcgcgcggccggacggctcgccctggcggctggagctgcgcaacccctttggcgaagggggcctggggctcctcctcgcgcaggactgcgcggtcatcacgtccgggaactacgaaaactactttgtcgcagaggatggaacggtctacgggcacatcctcgaccccgaaacgggccgcccggcggacagcggcttggcctccgtcacgatcgtggcgcaggaggggcggctgggcgacgcgctctccacgtcgctgttcgtcatgggcgagcagcgggcggaggcgttctggcgggagcgaggcgacttcgagatgattctcgtgacgcaggcgggggagatcctcgtgaccgagggcatcgcggacgccttcaccccctacgaggaccgggccgccgtccgcgtgctgacgcgcgaagtgcgcgcggacgctggacatttttcccaagagaacctagaatagaagcgagaatttgcagaaacgaggtggaacccgcatgaaagtgctcatgatcaacggaagcccccgcaaggaggggaatacctccatcgccctacaggagatggaaaagatcttccaggcggagggaatcgaggtggagaccgtcgccatcggcggcaaggacatccgcggctgcatcgcctgcggccaatgtcatgcgaaaggcaagtgcgtctttgacgacctggtcaacgagacggcgcccaagtttgaagcctgcgacggcctggtcgtggccagccccgtctactacgcctccgcaaacgggacgctcatctccttcctggaccggctgttctacagcacgccctttgacaagacgatgaaggtgggcgcgagcgtcgtggtggcgcgccggggcggactttccgccacgttcgacgaactcaacaagtacttcaccatctgcggcatgcccgtggcctccagccagtactggaacggcgtccacggccaggagaagggcgaggccgcgcaggatgccgagggcctgcagaccatgcgcacgctcgcgcggaacatgaccttcctgctcaagagcatcgcgctgggcaaggcgcagtacggcctgcccgagcaggaacccttccagcggacgaacttcatccgctaaatccccaaaagccgaggctgtgcagaggcacggcctcggcttttttgcctggcgaaactctttgcggtgccgcggcgtctggcgcgttgtgcgcgcggggtggaggctgcgcagatgcacagcctcggctttttgtctggcgaaactctttgcggtgccgcggcggcgcgtgcgctgtgcgggggcgggccgaaggcccgcccccgtggtgtctggcgcgttgtgcgcgcggggtggaggctgcgcagatgtgctgcttggcctcactttttgtctggcgaaattctttgcgatgccgcggcggcgcgtgcgcggccgcgctgctcattgccagccgcggtcggcggggtcctcggcgtggacggcggcgtacaggagcgcgttgcagatggcgacggccacgctgctgccgcccttgcgccccatggcgaggatcgccgggacgccaaagcgcgagcagacgtcgagcgcgcgctccttgctctccacgacgttgacgaaccccacgggcacgccgaccaccagggaggggcgcagccccgcctcgatgcggtccgccagctccagcagggcggtcggcgcgttccccacggcgaagaccgcctgcggatagagctgcgccgcgcgccgggcggcggcgaccgcgcgcgtggtcccctcggcccgggcctgccgggccacggcctcctccgccatgaggcagtgcgccgcggagcccaggcgcgcaaggctcggctggctcacgccggcaagcgccatgttcgtatccagcacgagcggcgcgccggcgcgcagcgcggaaatccccgcctccaccgcgccgggcgtgaagtgcagcgcgcgggcaaagtcgaagtccgccgtggcgtggatgacccggcggatcaccggggcgcaggggccggagaggcggacgccctgcgcctccaattccgcgttgaggatggaaaggctcgtgcgctcgatgtccccgggcaggtggtgtgcgggcagatgcgcatccatcagaactccaccccctcccgcgccaggacgccccgcgcgtacgggtggcggtggcagcgcatttccgtggaatagtcggccgcctcccgcatccagggcgcgggatcgcggccggtcagcaccacctcgcgcccggcgggccgctccagcaccgcccggcgcaggaggtccgggtccgccatgccgagctgccaggcggcgcaggcctcgtccagaagcagcaggtcgcagggcgcctccagcgcccgggcgaggcaggcgtcctggttggcgcgctcctgcgcgcgctcctcgggcgtcatctgggaggcgaacttcgtgccggtcttgcccgcgtagacggccgcgcccagcgcgcgcagcggagccagctcgccgctggacccgttcttcaaaaattgtaccacggtgaccttgcggccgtggcccagcgcgcgcagcgcaaggcccatggccgccgtcgtcttccccttgccttcgccccagtagaggtgcacaaggcccagatccctagtttccatcgtattcctccatcgcgcggcagatcgccgccatgtccaggctcctgcgcacggcgtccgccaaaatgtcgtattgtgcgccggcaaacgacgcgcggtccgggatggacgcgcgctgcggcgggagacccttgcgcgtcagcagccagtcggccagcttctccgtcaggcgtccgctgtcgaagaggccgtgcaggtaggtgccaaaggcgttgcccgcgcaggcgccctcctcgcggccgtccatcaggcggcagaagggcgcgccgcccaggcggtccgtgcggcccatgtggatctcatacccttcgacttcggccccggcaaagggcgccgccgcgacggcgccgcgcacctgcgtgcgcgacttctccgcgacaaaggccgtgtggcaggggaggagccccagccccgcccgctcgccgccgccctcgacgctgagcgggtccgagagcgccagccccagcatctggtagccgccgcagatgcccaggaccgggacgtcctgctgcgccaggcgcagtatggcgtccgcaaggcccgtgcgccggagccagtccaggtccgcgagcgtgctcttcgtgcccggaaggaccacgagatccggcttgcccaggcgctccgggcggtccacataccgcacccccagggccgggtgccgctccagggcggtcaggtccgtgaagttggagattcggggcaggcggatggccgcgatgtccacggcgcggcgggcggacgcagcctgaagccggggcgaaaggctgtcctcgtcgtcgatctccacctgcgtatagggaacgacgcccagcaccggcacgcccgtgagcgattccagcgtctccagccccggctgcagcagggagacgtccccgcggaacttgttgatgaccgtgcccacgacgcgtgcgcgctcctgcggctcgagcagcgccaccgtgccgtagagctgcgcgaacacgccgccccggtcgatgtccccgacgaggagcaccggcgcgttcaccagctccgcaaggcccatgttgacgatgtcgtccttcttgaggttgatctccaccgggctgcccgcgccctccaggacgatgacgtcgttttccgcggcaaggctctcgtaggcctcgcggatcaccgggatcaggctgcgcttttggcggaaatagtcgcgcgccgcgtattgcccgcgcacctcgcccaggacgatgacctggctgcccgtgtcgctggagggcttgagcaggatcgggttcatgcgcacgtccggctccaggcccgcggcctccgcctgcgccgcctgggcgcggcccatctccaggccgtcgcgcgtgacaaagctgttcagcgccatgttctggctcttgaacggcgcaacgcgcagcccgtcctggcgaaagatgcggcaaagcgcggtcacgagcaggctcttgcccgcgccggacatggtgccctgcaccatgatgcatcgcgccacgttacaacacctccttgagtttttgcaaaaagatctcgttctccggcggcgtccgcacggccgcgcggtaccaccccgggcaaagcccggcaaagttccggcaatcgcgcaggagcacgcccgttttgcggagctttgggacgagcgcctcgtccgggtggaagaagagcaggtagttcgcctgccccgggagcacgcggcaggcgagcgcgcgcagctgcgcggcaaggcgcgggcgctcttccccgatgaggcggcggagcctgcgcgcgtagtccgtctcgcgtagggccgcaagccccgccgcctgcgccggggaggagaccgcccagggcggcccgcactcggccatgcgcgcggcgagcgcctcgtccccgcagagcgcgtagcccaggcgcaggcccgccatggcgtagaacttggtgaaggcgcgcagcaccaccaggcggggatggtccgcgaggagcgggatcagggactgctgcgcctccggggcgagaaaatcgtgaaagcactcgtccaccgcgagcatcgcgccgcattcctcgcactgcgcgaggattcggtgcagcagcggctgcggggtcaggagcccggtggggttgttcggctcgcagaggaagacgaggtccacgcccggcacgatgcgggcgaggaagtcctcctgcaggacaaagcccgcgccctcccgcagcgcggcgcgctccacggcgcagcccgcgagcgccagcgcgcggccgtactccgcaaacgtcggcgcggggagcagggcgcgccgcggccgcacggccagcgccaggcgatagatcaggtctgcagcgcccgcgccgcagagcacctgcgccggccggaccgcgtggtgcgcggccagcgccctgcgcagctcgcggcaggccgggtccgggtagcggtccgcggcctccagcgccgc

SEQ ID NO: 746 - DNA, 4012 bp, Unknown
  16S sequences of unknown bacteria
ggcctcctccacattgtcgatttccagcccctcgcgctcggcgagaatatcaatgatcgtctggctggtgaaggcgcggcgcacttcataatcaggataggccgcggcaatggcgtcctccactgcgccgatggttttatcacggctgtcgttgtagctggtgccaaagctgaccaccaaaatcacatttttttctgcgccgccaggttcatctgaggacgacagcgtattctgtcctgttccgcagcccgccaggatcgccaggcacagggccgcagcagcagccagggccagaatttttttgttctttttcatgatgctttcctcctgtttttttcgtatgaaatattcttccaaggatccggccctccggccgaaaacaaggatatggtatcgaatccatcaaagcgcgccggaggtaaaatacgcccggtacagctccgcaggcagatcaaacaattcttcaatcagcgcttcggtcagaatctcctctggagcgcctgctttcaaaatgcggccctccttgatacaggccatctcatcagagatctttcggacaaattccagctcgtgcatggacagcaccaccgcaatgccccgctctgtggccagacggcgcagaatctccagaaaacggatcttatgatgcacatcaagaaaggacgtcggctcatccagcagcagcacattcggctcctgacaaatggcccgggccagcagcacccgctggcgctggccatcgctcagcgtcaaaaacgcccggttccgcagcggtgcgatttccaccagatgcaaagcctcgtcgatcttctcccggtcttcggcgcgtaaaagtcccatatacccggtgtagggatagcggcccatggccacgacatcctcgcaggtcatccgctccgggcgggcgcggtcggtcagcagcaccgacagttcccgggccagctcactgcgggaataagattccatctttttcccatccagcagcactgtaccgcccagctgatgaaggtggccggaaagggtcttcaaaattgtggatttaccggagccgttgggtccgatcaatgttaaaacacggccggcgccgacgcgcagcgcaatgtccccgatcagcactgtgccgccgtagcccaccgccaaagcctcagtagacaaacgcatctgcgtgctcacagcccatccctccttcggcgcaccatcataacaagcacgatcggcgcaccaaagatcgccgtcaccgtgctgatgctcagctctgtgggcgcaaacaccgtgcgggcaatcatatcgcatacctggcagcacagggcgccgccgagaaaacaagccgggataagcacaatgggcgcgttggtctggaacagggcgcgcatgagataaggcaccgcaatgcccacaaaagacaccggcccggcaaaggccgccacacaggccgacagcagactggaaagcagcaccagaagataccgcagcgctttgagaggaacccccacgctttgagcatagtcttcgcccatttgaaacgccccaatgggcttggccagcaaaaaggagcctacccccgccgctgccaccaccgccgtcattacacgcacattgtcccagctcatgcccgaaaaactgcccatagaccagttgtgcaggttcacaatatcggcatcgctggcaaatgtcaccacaaaatcggtgatggccgagcagatatagccgatcatcatgccgctgatgacaagcatgctcataccccgaacccggcgcgccataagcagcacaaaggccatggacagcatagcccctgcaaaggccgccagaatcaggaacgccgcagaggccatgcgatgctggcgcagcacaaaaatcagggccagcgccaccgtcagcttggccccggaggaaatgcctagcacaaaggggccggcaatgggattgtgaaaaaacacctgtaaaagatagccggacaacgccagcgccccgcccaaaaccatgcccgcgagcagccgaggcagccgaattttccagatgacgtctgccgccaggtcgctcccgccgccgctgagcaccgccgaaagcacttcgccggcccgcagcgccacgctgccgctcatcaggctccacacaaaaaacagcgccagtgccagcagcagcaaggcaaaacctaaggcccaccggaggcggcgcgctgcggtaaaacttttttctcccacggctcaggactccctcaggcggtgcaggaaagaaaggtcaccgctctccggctccgtcagaatcgtatgcatttcagagatcatttctcccagacgcatggtttcctgataaaaattgtggccggtacaccacacgtcaccactgcgcactgccttgaaatccgccagcagtgcatttttacccagcagctcttccagcgtttgcacatcgccgcccagcgtgctgttgtaaatgaccacatccgcatcccgggcctcttcataaaatttctccatctccatggttacggtagagcgggcactgccgtcattctccaggctccggaacacactctctcccccggccagggcgatcattttggaaacatagtcgctgctgctgcggcacaccgcttgtccagcggagttgatgtagaaaaaagccgcagtctttcccgtctcctccatctctgccacagcgtcaagatactttttctgcgctgcaaacagagcctcggcttcctcactcttgcccagcagcgcgccatacaccttgatccattcacaccggcccagcgggtgggcttcgtagctcgaatagtcctccaaaacggcaatgcccaaatcctgaagcttttcgcgcacctctggcgcatgttcgatcatcgtgttctgtatcgacagagtacatccctgcgcaagcagcagttcgtaatccggaccgctgtacttgcctgcatacagcagctccccttgttccatggcggttcgggcctcttccacataccagtcttccgcccgcaggccgcacaagcacacggcgtcaaggctgtccaatgcagcaaaaaaatccatcgcagcactggctgccacatacaggttttccacgccctgccggatggtcacaatgtctttctccagcgacggcggcgcttcctgccccggcggaacaacaagaaaccggtcaccgttggaaatcgtgatcagcgcatagccgccttcatagcggtcgatggtaaactgatcagcatacgacagcggcaccgtttccacatacgtcagcccgtcgatctgcacagaggcggcctgttcctgcgcctgcatgccgcagcctgccagcgccaggcacagtagtgccgcagccagcgtcagcacggcagctgttccccgccggatccggcgtgccggggccgtcatgtccgacctcccagaggccggcgcagcgccagaagggcaatgaccgccagagccatgaccgccacaacggttcccatgccccaatccgccggggaaacaccctcccggcgcagcgtggcggaatcaaaccgcagtgtatactcaatggtatggggcacactcatggccacggtttccgcagacacagcaatctcttcatccaacgcaggcactgcaatgctgaacacggaattcccttcttcattgatcggagcatacccccggccgtccacttccatataatcatagtatggactggaccagacaatctgcgcctgcatctggccctggttaaccgtcagatgggccggtgaatccacatccgcccgaccgctgccccctgtaagggccacttcaatggtataggcaccgtcttccaatgtaatcataacgtctctcctttgttcttccggcgccgcaccagtgcctgcacccataaaaaaagcgggacagacgacctgtcccgcaaagttgcgcagtggaaaaatgggcgcactgctcccctttctcctgtgcagcatctctttcccaatggcccggaacgatggcatgttttctgtgcggcaggccttccggctggcggcccgcctgag

SEQ ID NO: 747 - DNA, 6308 bp, Unknown
  16S sequences of unknown bacteria
tgttgtcagtccacatctcacactggctaatgaccgtgctgattgccgtatcataatcttccggtggatacttatattttttcagcaagtgcttcaccatcttacgcatactcgcacgggcagtttcttttttctgccagtctattgtccgatttttgcgcagcatttccgtaagttctctggtcaagtcaatcaattcattattttgatagaagtcctttatgttttccggctttgtcagagcatcgtaaaaagccagttcttcctgcgtcaagcccagctttttaccgttgttatacagttctgtaatctcctgtgccgttttcagaagttccttgatgacctcctcgtttgtaatcaagccattgtagtaagagttcatcaactgtgtaatcttttctgaaaacttctgagactgcacaacatttgtccgtttatacagtgaaacttgctctgccataagttttttcaaaatttctacggcaatgttcttttctttcatttttgaaatttcatccaacaccgccgggtcaaacaggctgatattttcatctgccttcttgctgtcaaacaaactgataacaccttgactctggatacttgctttcagcagttcattgatttgagcattgatttctttcaaagaaagtgtcttgccgccactcccaccataggtgatcttcaccaccgtagaacggactgcttccatataggccgcttcatgtcgctcctgctccgtggtcatgctggaacacagcgaatgcgactgtttcagcaacagagcttctcgcaggaacagatctttgcgcttgggtgcttttgcgtccagaacaaagtttacgccgccagtgaccagctttgccatcatcaacggagaaccgccaataaattcgctgaaatcaaatccgtgcaacaaatctttgcacacctgaagcttttcctgaaactttggataagcaactttggcaatgttcatatcgccatatcgggactggtcacgcttggtatactccttcatagcggctttgagggcagatgcaatgccaacgtaatctacaatcaagccgccctctttgtccttaaacacgcggttgacacgcgcgatggcctgcatcagattgtatccgtgcattggcttgtaaacatacatcgtagccagtgaaggcacatcaaaacctgtcagccacatatccacaacaatggcaatcttcatcgggtcatcgttgtctttgaatttccgggcaagttcttctttgtgagattttgtgccgatgatttctttccagtcctccgggtcattgttgccacctgtcataactacgccgattttttcattccaagtcgggcgtaactctaaaagtttccgataaatcttcatcgcaattggacgcgaatatgccacgatcatcgccttgcctgtcaggagatttgcgcggtacttttcgtagtgggtgacaatatcctcgcacagcgattgaatggtagaatctgctcccagcacactctccatctgccccagcatctttttacttttttcaatcgttgctgcatccgattgctgttccagtgcatcgtaggtcgcgtcaatcagagccagtgtattctggtcgaggtggagtttgataacacggctctcatagtaaaccggacgcgttgcaccatcttccacagcctgtgtcatatcgtaaatatcgagataatcaccaaaaacttcgcgcgtatttctatcttttgccgaaatcggtgttccagtaaagcctatgtaggttgcatttggcaaggcatcatggatgatacgggcattgccaatgaccgtatgtgcttctttttcaccctgttcattttctttaatgactattttttcatcaaaaccatactgtccgcggtgggcttcatccgccatcaccacaatatttctccgttcggacagcggcttttcgccacgctcaaacttaaacatcgtggtgaagataatgccgtttgcttctcggccatccagcagcttgcttagattgtccttgctggttgcctgtacaggtgtctgacgcaggaaaggtgcgcacttggcaaactgcgtgtaaagctggtcatcaagatcaatgcggtcagtcatcacaacgatggtggggctatccaaagcctcttgcagcaaatgggcatagaataccatcgacagcgatttcccgctgccctgcgtatgccagaacacaccacccttgccatccgttttagtagcaatcttggccttttcgatagcttttcgcactgcaaaatactggtggtatccagccaaaattttaatcggcttctgcccatcgccggaaaacaggataaaatttttcagaatgtccagtaaccgttctttctggaacattccctcatagaaggtgtcaaactgtgcatacgcagtattttcgtaatcgccatctttcgttttccactccataaaacggtcaagtccagaagtgattgttcccgccttattggtcgaaaggtcgctgattacgcagactgcattatagtagaacatcgaaggaatgtccttcatgtaatttcgaatctgattgtatgcgttttctgcacccacttcgtccttggaaggactcttcagctccatcaaaaccagcggcaggccattgataaacagaataatatctgggcggcggttgtttccgttttccacaaaggtatattggtttaccacatagaaatcatttttgtctgcatctgcataatcaatcagctttactaccgaagaccgttcttcacccttgactgcgtatttgaccgtaataccgttttgcagatagtccataaaaataatattcttctgcaacaggcttcccgcatcaaaatcattcagtttcaggatggcttcatcaattgccacagccggaaggctgcgattcagccgcaccagacaatcccgcaaaacatcgtccagcagagggcggttgtaatctgttcggttcatatcaggagcataaatgtgggtgtaacccatattttcaaatagctctatgaccgcttgttcaaaggtatcttcggtaaatgaaagcatgatttttctcctcaactattatccgaagttgctgtattcgattcttgctcaatggcattcacaatctttgtaacgatagaatgcgccgctctttttgccaccgcgcgtcccatcggcgtaccattatccaatgtatccgttagtgccaatcgaactttactgagtccaatttccttacgataccaatccggcatcaaattcttttgaattgcaacgtaacaatcatcaaaaatttctggatgcacagcattatgcaatgcttctcgaataatctcgtccactttatcgtctgaaacatctaaattgcgcacttctttaatacttgttatcggaacttctgttttcacaaaccgatcaaccataggcttttgcgtgttcgcataattgcttttaatatatgccatctggtgctcaagttccgggaacagcgttccttcgttgatattgtaaaaactcagttcctctaaaatcgcgtcttttcttcccgctggtattctaaaactttgtagttcaaactcgtcttgaacatcgctatatgcccgtttaacaatgctctgtccgattttttctttaagctgaacattatattttccgcagattaaaaaagaaccgctttgccgcaccaatctttcattattcaaattggaaatcacaaaataatttctttgaataatcgaaagcaagcttttatactcacttaccctgcactcttctacttctttatctgtataaattccatacttattcaaatccgaaagcagcttttctaatgtataatcgcccgaaatctcatggctcgctaaatatgccagcactttaatctctatgtcgctataactttttccgtagtcgcgcttgtaatagattttcccatcggtcggcggcaataatgcagttttaccgtcagttatctttttctcttgattgttttggcaggcaaaatacagtgccaccagcggattctccgtcacatccaatagtcttgttggcaacccatagtgttgcaattttgcgagcttttcaaaatctgttgtcaactttctgaagtcgtcaggattccgtgtgtaagctgcgtttatcaattctgcttcatgtggcagcatcccaccacggaacactcccggcatgacattccattcgttgctggcctgtccacggaagaaatagtgttttgtgcttacttctgcgccttcttctttctttattgtttcctttatatcagaaatgtaggttaggtagctattaaggtttgtaacaacgcattccttcggatttcttgtcttagcattatcaaaatcttccatattatcccttcatttcttttataaacgataatttacaacagcaagcgcaagcgcttttcaagtcttggtttctcaattacgagccatgggatggtacggcaccaaattcttggcttcatggtaaattgggagactacgctaatattaagcgtggaggttcacccagaccaatacaggaatacttgtctgactcaggtttacgatggcttaagatttcagatgtaacgggcctacaaacaccatttattattgacatcaaggatcatataatcgaggagggattaaagaaaacagtttttcttaaagccggttcacttgtgctttccaacagtgcgacaccgggcattcccaaaatacttgatgttgatagctgtattcatgacggatggctttacttccctgaatcaagattttccaatgaatatctctatttatattttaagtatattcgtcagcagctggttaacctgagtaatggtagcgtttttaacaatctaaagacggatattctcaaaggctatccaactatattacctgatgaagaaacactacaacgcttcgatggaattataaagccaatgtttctacaaatgcagaatcttactcgtgaatcgcacgacctgatggatttacgagataccatcctgccccgtttgatgtcgggtgaactcgatgtctccggcatctaattttaagccactaaattatcgtttaccagatttttgataactctcaccagtggcgggagattctacggagaaactgccactgctgccgttctctgaaatcgtaataaggagatacggcgatgaaaaaacaaattatcaacgagatacagcgaaaaatgctgccgtatctcaataacgaacagttgctacatttgaaagcagtgctggaagcgtcatttcaaggtgtcataattgaaatgggtgaagagcagccaaaggttgatgaacaagattcggtagcagcgttcattacggcaaagcggatagaaggctgttccgagaaaacactgacctattattcaaaaactattgcagcgatgctgaatggcgttggaaaatcaccgcagcaaattacaacggacgatttgcgaaaatatctgacggattatcaggcacagcggcactcaagcaaagttacgattgacaatatccggcgtattctttccagtttcttctcgtggctggaagatgaagatttcattgtgaaaagccctgtccgcaggattcacaaagtgaaaaccgccaaaatcatcaaggaaacgtacaccgatgaagcactggaactgatgcgtgacaactgttcaacagtacgagatttggcgattattgatttgcttgcatcttctggaatgcgtgtcggggaattggtgacacttaatcgggaggatatcaatttcaacgagcgcgaatgtgttgtatttggtaagggcaacaaggaacgattggtatactttgacgcacggacgaagatccaccttcaaaattatctggatgaacggtcagacagcaatccagcactctttgtgacattgaaagagccacatgagcggttgatgatcggcggtgtggagacaatgctccgtgaattgggacggcgattgaagctaaataaggtgcatccgcacaagttccggcgaacattggcaacgtcagcgattgacaagggaatgccgattgaacaggtgcagcagcttttaggacaccagaaaatcgacacaactatgcactatgcaatggtaaaacaacaaaatgtgaaattggcacatagaaaatttattggataaggtgatatgaatgaaagaaaagtttttgagagaacttgcggacattcaaacaggaccgtttggaagtcaacttcataaagaagattatgttgcggatggaacacctattgctgtctcttatacacatctgacgctgccgacgaatagagag

SEQ ID NO: 748 - DNA, 14013 bp, Unknown
  16S sequences of unknown bacteria
atgatttcggtcaatccaaagcatacacgataaagcagtaagtagaactcgtgagagtctacattatctcgatgtaggtatatttaatcacattttgagtggcagaaatgaaatcgaatcaggaaaagaaaccgagcaactgcgaaacctgcacctattttacctacgatgaagattacgaagcatacgtctgtgaccgcgacatggacgaggatgagtacgtgcgcctgatgtccgatacccattacagctgtccgtattaccgctgcggggacgagtatcttgtcgtgcggcatcagatgtagagagggatctcgcgaaaatattgactgtgagttgaacgcagataagcattcccccgcttcaagtgcgcggagcactaagcggtgggtaagggggatgcttatgtcagtgggagttgaaagctcccactgacaggtcgcgaagcgactgcgttcatgagcaagtagcgaagcggattgcgaatgtccgctttacaaaaagggctgtaaaagaggctgctataagaatccctcttttatggccctgttttgactggttccgttcagggtcaacctccaaaacgcaggcgttttatgaaattttacctggctctgaatggaaaatttttcagaaacctctttacaaaatgaaaaatctggtttataatccaattaatctagtaaacaactaggaaatgtaggaaagcaaaaacgaacagaagaaatcgtttcacagccggggcattgtaaatcttcccacttaagtaaagcacggatttgcagccacgcagggagatggatccggcaaaacagaacatagaaaaatgaggaggacaatatcatggcaaagatttatggaagcgcactggagctgatcggaaacaccccgctggtcgaggtaaaaaatattgaaaaggcagagaatctggaagcgagagtactcgtaaagctggaatatttcaatccggccggaagcgtaaaggaccgtatcgcaaagagcatgatcgaggatgcggaagaaaagggtctcctcaaagaaggttccacgattattgagccgacctccggaaataccggaatcggtcttgcatcgatcgcagcgtccaagggataccgtatcattctgaccatgccggagacgatgagcgtagagcgccggaatattctgaaagcctacggcgcagaggtagttctgaccgatggcgcgaagggaatgaagggagcaatcgcacgtgcagatgagctggcaaaagagattccgaacagcttcattccaggacagtttgtgaatccggcaaacccgaaggctcacaaggcaacgaccggaccggagatctggaaggatacggatggagcagttgatattttcgtagcaggagtcggtaccggcggaaccttgagtggtaccggagagtacctgaaatctcagaagccggaagtgaaggttgtggcagtagagccggcgacttcaccggtactttccgagggaaaggcaggcccgcacaagattcagggaatcggagcaggctttgttccggatacgctcaacaccggtatctacgatgaaatcatcaggattgaaaatgaagatgcgtttgagacttccaaacttctcacaaagaaagagggaatcctgaccggtatttcatcaggagcagcacttctggcagcaatccagcttgcaaaacgcccggaaaataaaggaaaaacgatcgtggcactgcttccggacagcggagaccgttactattccacgccgctgttccagggcaaataaaaacaaaaaataagccgttcttaaaaaggggtgtctgacttgcgcaggcatccctttttcggcggatcaggcaagcctgcgcttttattgtgaatctccgctctgatcagaatcaggcaggtctgatgaggaaaataacgggaaacagcaggttacgcgttgcaaaatgaaaaaagatagaatagaataagaaaaattgaccgaaccggggatctgactcatgtcaaaacgagtattcatagtgtaattgtaactgttcagagccaagcaaaatttcataaaaaaggcggaaaatgcttgcatttttaagcctgtttttgaaattttatttggcggatacgccacaccgacgaaatgcgtagcattttggaggttggctctgaacagttacgtgtaattggatcagaggatttgccggattcggtgaaaagattgatttgcccagaaaaagcagaaagggagaacacgaatgacattacaacaattaaaatacgtaaccgctatcgctgactgcggttccatgaacgaggcggcaaagacgctgttcgtgtcccagccgagcctttccggtgcggtaaaagaactggaggaggaagccgggatcgagattttcaagcggacgaacaagggcgtgcttccaacaccggaaggggaagagtttcttggctacgcgaggcagctgctcaaccagtacgaactgttggaggatcgctttatccggagaacgcgggtaaagaaaaaattcagtgtgtcgatgcagcactattcgtttgcggtaaaagcgtttgtagagctggtcaagcagtatggcatggatgagtacgaatttgctgtatatgagacaaagaccggagaagttatctcaaatgtgcgcaatttccgcagcgaaatcggagtcctctatgaaaatgaatttaatgggcaggccatcagtaagatattaaaagagaataatctggaatttcatcggctttttccgtgcgggacgtacgcatatctgtggaaaggccatccgcttgcggaaaaagagcagatcagcatggaggagctttcggaatttccgtgtctggcctttgatcagggcgataatccgtcgttttttctggcagaagaagtgctcagcacttacgattacaagcgggtgatccgtgccaatgaccgcgcgacgatgctgaatttaatggtggggttgaatggatatactttatgttccggtattatctgcgaggaattaaatggaagcgattactgcgccgtgccgcttgcacagcaggaacggatggagattggctatattaagcggagcggcatgatgctgagcccgctggcagagcggtatctggaggaactgcggaagtatgaggattacgtgctgactatagcaatcctctaaaataatgcatcttaatccagcccatcagagtgtgaaatcctgcgtcagatatctttgccgtgcgtcagcacgcctgcagatatcttccttgtctttcgcactctgctaaactgccttaaatgcattatttacgaggatcgctataaatagaaagaaaccggtcatgtcggatgaacatgtccggtttactataaataagcgttttgcagacatctcccgctatagaaaaaactgatagcaagggagaagttttggatattggacagaaaacgatgtgcaggctataataacacctgtaaaccgataggaaatataaataacctcggaggggagattacgatatgagcaagaaaacacgcgcagagagaaattttaaatttgaaaccttacagcttcacgtaggacaggagcatccggatccggtgaccggcgcaagagccgttccgatctaccagacttcctcttacgtgtttgacaactgcgagcatgcagcagacagatttggactgcgtgatgcaggaaatatctacggaagactgaccaatccgacggaggatgtatttgagcagagaatcgcagcacttgagggtggcgttgcagcacttgccgttgcatccggagcagcagcgattacttatacatttgaaaatctggcgcaggcaggtgaccacatcgtatccgcaaagaatatttacggcggtacttacaacttcctggcacataccttcccacagttcggcgtaaagacaacatttgtagatgtattcaatcttgacgaggtaaaggcagccattcaggacaatacgaaggcaatctttattgagacgcttggcaacccgaattcagatgtagttgatattgaggcaatcgccaaaattgcacatgagcacaagattccgcttgtgatcgataatacctttgcgacaccgtatcttgtaagaccgatcgagtacggcgcagacattgtggtacattctgcaacgaagtttattggcggccacggcacgacgatcggcggcgtgatcgtagacggaggtaaatttgactgggaggcatccggaaaattcccgtcactgactgagccgaacccgagctaccacggcatcagctttacaaaggcagttggagcagcggcatttgtcacaaagatccgtgcgatcctgctgcgtgacacgggagcaacgatttctccgttccattccttcctgtttctgcagggacttgagacattatctcttcgcgttgagcgccacgtagaaaatgcactcaaggtagtagagtacctgaacagccatccgcaggtagaaaaagtacatcatccgtctgtttccgacgatccggtacagcaggagctgtataagaaatatttcccgaacggcggcggttccatcttcacctttgagattaagggcgacgctgagacggcgaaaaaatttatagacaatctggaactgttctctttacttgcaaacgtagcagacgtgaagtctctggtcatccatccggcgaccacgactcacagccagtgcactgatgaggagctggccgatcagggcatcaagccgaacacgatccgcctgtcgatcggtaccgagaatgtgacagatatcattgaagatctggacgaggcatttaaggcagtggcagagtaggaagctgctccaggtatcctgaaaaataaaatacggcagatgataacaggctgcaattccttcgaaacgaggaacctgcagcctgttttttgtgtgcggacagtcctgctaaaaaaagaaaaagctgcgggaataatttttcaaacaggggctgagaaagatttctgtaacaacatacaatccatattgaaataataggaaagatgttttataataaatacaaagcacggaggtactatcatgagaatatcaacaaaaggacgctatgcattgcgcctgatgctggatctcgcgacaaactgctgcggagatccgatcagactgaaggacgtcgcgaagcgtcagcaaatttctgaaaaatatctggaacagatcatatccgtattaaataaagcaggatttgtgcggagcatccgcggtccgcagggcggttatgtcctgacacgccgcccggaagaatacaccgtcggtatgatcctgcggctgacagaaggcagtctggcaccggtagagtgcgtggaaaatacagcgactccatgtgaccgcgaagaagactgtgtgaccaagatgatctggaaaaaattaaacgatgcgatcagtggcgtcgttgacaacatcacactggcggatctcctcgaatggcaggctgcccgcgtgaacgattatgtgatctgacagttttaagcggaaacgcttaaacatgaaaaggctccgggaaatgtagttcttcccgaagcctttttgcaaaagcagaagcttactgtccgatttttatttttactcagtctcacttgccgtccggcgtacagttccggcacctgcctgcgcaagcaccttgctgatacgtttatacaaaagcatggtcgggacggagatcagcacaccttttaagagattcagcggagcaacggcaaaaagcgcgagcgttgcgacacttgtaatggcaggattgatggcggttcccattccgacgattgtgtcaagcggcataccgtagagtgaagagaaagccgggatcagataaacggcattgaagatgcttccgaataccgccataaatacggtgccggtaagcagtgcaagctttgcggtctttttcgtctttttcagatgataaacaaccgcggccggaaccacgaatgcacatcccacgacaaagttggcaagatcgccgacaaaagcagtggaggtacctttgatgaccagctttaagagtactttgacaagttcgatgacaacaccgccgaccggtcctaaataaaatgcgccgatcatgacgggaatttcactgaagtcaagcttgtaaaaaccaggagcgagaaaagcaactgaaaagtcaaacagatacaaaatgccggcgagtgcgccaagcatgccacagatcgtgatcgtgtgcgttttgcccggatgtccgatattgtctttcaaaattgttcgctccataagctctgatacggcgaggatggcagcgatgaccaccgcacataccagcacaaactgcatgttgtccccgattgactgtaaaagattgtttcccataagttcattccccttttctgaaaaaatattggcaattgccttttcaagaaaagctcttcagatcgccgcagagaattcctgagcctgtatttttcacctgtataccaggcccgcagctgctcgtggagcacaaagcaaaaacgcccgaagaagaatatgtacggtacatatcttcttcgggcgatgaaatcgacaagctgaaattttctgccttcttctaccatccagactatactgtcggttccggaattcacgaatcgtgtcaccggatcagccgcctaagcgggtcgcggactataccgccggtggggaattacaccccgccccgaagaacaaatctcaaatacgcatacagtataatcgcttttgcagttctttgcaagcttttttttgcgtgtcggaatctctgtttgacagaatgccagaacatggtacaataagacaatgagtggaaaaagaaaggatggtttctttttatgggaagaataaaaaaggcagtacagctgaccgaaaatccgcatttgaatctgtacgagctggaaacgcaggatcggaaaggtcatccgggctgttattatgtggcttcccgtgcgaagcacacggaggatctggaactggtcagaaagcagcaaaagccggacggtgtaattatttacagcctttatggagaaaaaagggataaagtagtcctggtgcgccagtatcgctatccgatcgacggatacctttacgagtttccggcggggctggtagagcctggagaggattaccatgatgcggccgtacgggagatgaaggaggaaaccggtttggatctgcagccgattccggttgacaacttctatgcaaaaccgtattatacgaccattggaatgacagacgaatgctgtgcgacggtttatggtgtatccgatggcatggtcagcctcgatggcctggaggacaccgaagatctggaagtagtgatcgcagaccgggacgaggtacgccgaatcttaaaggaagaacgtgtggcgatcgtctgctcctatatgctgatgcattttctgcatgataaagaaccattcgaatttctgcatgaggaggcggaagcaaaaagcagatggaggaaaaaatgaaggcaaaatttgagatcaggatgacgaatcaggatatgtataattttctgatgtaccattcctaccatggctttaccggaattttcagtattgcggcgggaatcgcactgctggcatattttttctggtgcgcgggaacgggacgtgaaaattccttcctgtatccgttgtttggcgttctgtttctggtgtatcagccgtggacgctgtttatcagttcggcaaagcaggtgagttcgaatccggtttttcagaaaccaatcggatatgagctgtcggaaaacgggattacagtcagtcaggatggacagacaaatgagattggctgggacggtgtgcaccgtatccgggaggataaaagaagtatttttgtctatacgggagcaaaaaatgcgtgcatctggccgaaaaagcagctcggaagccaggccacagaggtaaggaaaattctggatgcctgtgcaccgtctgcgggcgggaaaaagaaatcctgctaaaagaagggctgttttacagtggcagaaaggaaattacatgacggacaaaattatagagacaaattcagagcaggaaacgcgtgcgctcggcatggagcttgcgggaaatgcgcgccctggccagatttatgcgctgatcggcgatcttggcgtcggaaaaacggttctgacccaggggattgcggaaggactcggcattacggagccggtgagcagtcctacctttacgattgtacaggtctatgaggaaggacggatgccgttttatcatttcgatgtctatcgcattggggacattgcggagatggatgagatcggttatgaggattactttttcggagagggaatctgcctggtggaatgggcaaatctgattgaggagctgatgccggagcagacggtctggattacgatcgaaaaagatctggagaagggatttgattaccggaagatcacattttccaggagaagttaaccgaatcagaaaagtcctctgcggggttgcggagagcaatcagcagcagaagacagcaaagcggatctgaaagatccgactggatcagaaaagaaaatggagtaacattatgaaaatactggcacttgacagttccggactggtggcatctgtagcagtgatgcaggatgatacacttcaggcggaatatacagtaaattataaaaaaacacattctcagacgctgcttccgatgctggatgaagtggctaaaatgacagagcttgatttaaatacgatcgatgcgatcgcaatttcgggtggaccgggatcatttaccgggctgcgtatcggttcggcaacagcaaaaggacttggacttgccctgaaaaagccgctgatccatattccgacggtggatgcactggcgttcaacctttacggcgtggaaaagctgatctgtccgatcatggacgcgagaagaaatcaggtttataccgggctgtatcgatttgaagatgacagattctgcgtagaaatggagcagacgccgatggcggtggaagagctggcaaagaagctgaacgggcgaaacgagccagtcatctttcttggggatggcgtaccggtttatcaaagtctgctggaacagcttctgacggtggcacatcagtatgcaccggctcattcaaacagacagcgcgcggccagtgtggctgctcttggaatgcgctgtgcggcagaaggaaaatttgagactgcagcagagcacaggccggattatctgcgtctttctcaggcagagcgcgagcgtgcccagaaacagattccgggtgatacaggatattctgcaaaatgaacaggacacaaatacgaatgcctgctttacatgagacatcagtgccggcagttacagtcaaatcagggagaaaatagaaatggaaagttcctgctgcaaatacaaaatagaacaaatgaacccggaggacgcggctgaggcagctgcaattgaagccgggatattttcgatgccgtggagtgaaaacggttttcggacttctgttttatccagggatacgctgtatctttgtgtgcgtgacggtgacagcatgatcgcgtactgcggatttttgcagtcctttgacgaggcagacattacgaatgtggcagtccgtgaggaatatcgcgctcagggagttggaagagccatgctggaagcactgatggaaggcggaaaagaacgcggcatcagccgctttacactggaagtgcgtgtaagcaacacatcggctctgcatctgtatgaaagtcttggattcgtatctgccggaattcggaaaaatttttatgacctgccgaaagaggatgcagtaatcatgtggaaagggtaaaaataaaatgctggtaactgttcagaaccaacctccaaaatgctgcgcatttcgtcgatgtggcgtatccgccaaataaaatttcaaaaacaggaatcaagcagatattcgcaatccgctttcgctacttgctcataaccgaataactgcctcgcagtttattcggttaaaatgcaagcattttccgcctgttttataaaattttgcttggctctgaacagttacaaatgctgaaattcaaagaaatgagagaagtaatcaattactgactgtgctgtatactgtataattgaagccagaggtgatttgacccatttctaaattcaggaaacagacgcagaaactcccggtaggcagccggcatgaaattcagtataatcgtcctggtagctatatcactgaaaaaaccaggaggagtcggaaatgtcagaaaaacacatgatacgctgtaatgcctgcggaaaagagcaggctgtttccgcagaagggatacaggaagagtttttgaaaatacagaagacgtgggggtatttctccgaaaaagacggggaagtgcaccgcttttcactttgtgaagcctgttatgacaggatacggaggcagtttaagcttccggttgaaatttttgaatatgagccgtagaagaaaaactggattgccagttttcttgacatggctttggaaatgaggagtaaaaatgctggatgtttgtttgcttggaagcggaggaatgatgccgcttccatatcggtggctgacttctttgatgacacgctttaatggaagttcgctgctgatcgactgcggagagggtacgcagattgcggtaaaagaaaaggggtggagcttcaagccgatcgatacgatctgtttcactcattatcatggagatcatatcagcgggcttccgggtctgctgcttacgatgggaaatgcggaccgaaaagagccacttaccctgattgggccaaaaggactggaacgggtggtgaatgcgctgcgtgtgatcgcgccggaacttccctttccgattatttttaaagagattcagggaccggagcagacatttgaagaaaaaggatacaggatccgtgcgtttcgcgttcaccataacgtgctttgctatgcttatacgatcgagatcgaccgcgctggccgttttgatgtggaccgtgcgagaaatgccgggattccgatgcagttctggaacagactgcagaaaggcgagcagatcgaggcagaggatggaacgctgtggcggccggaggatgttctcggaccggcaaggaaagggattaaagtgacgtactgcaccgatacgcgcccgaccaaagagattgcgcagcaggcggccggatcggatctgtttatctgcgagggcatgtatggtgagccggaaaaggcaaaaaaagcggtagaatataaacatatgacatttacagaggcggctgccctggcgaagcaggcacagccaaaagagatgtggctgacacattacagtccgtcactggtacggccggaagattatatggaagacgtgcgccgtatttttccgcgggcttatcctggaaaagacgggaaatctgtgacgctggactttgaagaagagtaaatttacggcagggatagtgcagaaaagcagagaacaggaaaaagttgtcggaatgaaagtagaggagttaccaaatgtgcaaagaagagatgaatgagcaaaaagatattttaatacttgcaatcgagagctcgtgtgatgagacggcggctgctgtcgtaaaaaatgggcgggaggtgctgtcaaatataatctcctcgcagattgcgctgcatacgctttacggcggcgtcgttccggagattgcctcaagaaaacatatcgaaaagattaatcaggtaatagaagaggcactgcagacggcagatgttacgttagatgatctcgacgcaatcgcggttacatacgggccgggactggtaggggcacttcttgtcggtgtggcagaggcaaaagcaatcagctatgcgaagcaccttccgttagttggagtgcatcatattgaagggcatatctctgcaaattatatcgaaaataaggatctggagccgccgtttatctgccttgtcgtttccggcgggcatacccatctggtaaaagtacaggattacggcgtttatgagattctcggacggacgcgtgatgacgcggcgggggaagcgtttgataaagtggcacgtgcgattgggctcggttatccgggcggtccgaagattgataagcttgcaaaagagggaaatccggatgcaatcgcttttccgaaagcaaaaattgcagattctccatatgatttcagcttcagcggcctgaaatcttccgtcttaaactatttaaacggagctaaaatgaaaggggaaactgtgaaccgcgcagatgtggcggcatctttccagaaagcagtctgcgatgtgctcgtaagtcatgcgattactgcggtaaaagaggcaggcatggataagcttgcaattgcgggcggagtggcatcgaacagtacgctgcgggcagcgatggaaacggcatgtgagaaaaatggcatccgctttttccggccatccccgattttttgtacagataatgcagcaatgattggagcagccggctattatgacttcaaaaaaggtgtgcgttccggactggatctgaatgcggttccgaatctgaaactgggagagagataagatgaaaacgacagcgatcgttcttgcgggcggaagcggaagcaggatgaaaacaaaaacgaagaaacagtatcttttagtggagggaaaacctgtgctctggtattctctgcatgcatttgaagagagccctctgattgatgcggtgattctggtgtgcggcgcaggcgaagaggcagcatgtcgggaacagtttgtcgaaaaatttggttttcgcaaggttgaggcgattgttgcaggcggaaaagagcgctatcattctgttcatgcgggactactggcggcacacgggtgcgatctggtgctgatccatgatggcgcacgtccgtttgttgacggaatgatgctgcagcgggtgatggattgccttgccacgcatcccgcctgtgtggttggtatgccggtaaaagatacgatcaagatgagtacggaggatggatatgtcgcacagacgctgcctcgtgaaaaactgtggacaattcagacaccgcaggcattttcttatccattgatcaaagacgcgtacgacaaaatgatccgcatggaagaagatggctgtcttgatgtaaaaataacagatgatgcaatggtggcggagtatatcagcaaaacaccagtccggttgattgaaggctcctataataacattaaaatcacgacgccggaggatcttgtttttgccggcgctgtcgtgcataaaatgatgtcagggtcaaacgatattttgtaaatggctttttgcccttttgcatcggatatcataaaatgatgtgagtgtcaaaagtaaattttgccactcacttgatgtaaccggattgctccattgctatgcaattcccgcaatcctcgaacaccgaaaacggaataaaatggcgtgttcacaccattttattccgttttcggtgttcggcatgtcaataagcataaattgcttatttgtgcgagcacaaacgcaatttatacttttgacacttacatcataaaatgtatcaataataggaaaatttgaaaaaatcaaaaaaatgaaaaaaatggcttgacagaaagaaacaaagatggtattattctacatgcgccaaggtgaggcgcttcgatagaaactggagaggtagcgaagtggtcataacgcggcggtcttgaaaaccgtttgtccgaaagggcgcatgggttcgaatcccatcctctccgttgaaaatttaaataaaacaatctgagcaatcaggcatttggagaagtacccaagcggctgaaggggctcccctggaaagggagtagatcgttaatagcggtgcgagggttcaaatccctccttctccgttctgtcaaaacaaagtaaaaaacttcttgacagatacgaaaagttgtgttaatatcaaacagctgatgcaaatcagcacacaacataaagaaccttgataactgaacagtgaaacaaccttgaaaattcttgaaaagtttta

SEQ ID NO: 749 - DNA, 4221 bp, Unknown
  16S sequences of unknown bacteria
attcctgtctattccccgtgcaaaaaatccatccccgaggaaaaagtgaagacccaaaaaaactatattccgccgcatgcgcgtgactgcataataaaagcgccgcaccttgattcggcgcggcgttttcttcgttgtttccgatatttagtattccaatcccaggccgtcggcgacgttgcacacgaagtcctgcacattggtgatgatgcccttggaggacaagcttccccggtccgccagcttgttcaccgtgaattcggagatatcacagatgtagaaataggtctggcgcacggttccgtccgccatcacgcggtacgacggtgtcatgttgcccactgcgatggaatgaagcatggtggccatggtgattaccgtggtggccttccgcacgcagttccgcatggcatcctgcgcttcgtagcagttgccgtatacttccggcagcggcccgtcatcccgaatggatccacccagcacaatcggaattcctttttttactgcggtgtaaatgattccgttatcgatgttgtatttctcgataaattccggaatggaaccggcctcccgcactttgttgatcagttccagatggttgtagtgaccgttcggtgcgttctgctgggtgtagatgttctgacccagcgccgtattcatgtaagcaccctccagatcgtgggtcgccagcgcgtttccggccagcaccgcatccgcatatcccgcgttaatcagcgcggaaagggcttttcgggccttcagatcgaaggaaaatgccggtcccagcacccagaccacgtttccgtgctccttctcgtgcttcagcagctccacgatttcgtccacgtccttggagaaagccgtctctctggagcgtccggttcggaatgcgaaggtgtcgccggtttcgcttttctcatcgaatccgttggcgtgcataaaaataccttcttcgcagttctcggtgcggccgcagatgacccggtctcccgccttcagtctgcgcgcttccaccgcctgaaccttctctccgtcaaacatcggaacggtgtccatccggctctcttccaccatgagccattttccgtcaatcttgaaatactccgggaaaatgctcagcgcatggaaattatccggtgcgatgccgtccctcggtgcctcgaccaaagtcgcgttgggagcgtttacgaatttctcttcggtaaaatcgggatgtgtatactttcttaattcaaatgccatgactgcctcctactataacaactaaaaggtgtctctgtccaaatcccctatgtatttctacccttctcgtttttattttaacacatctcactgacaattcatagcattttttatgttgtctttataccaaatatttcagcagccgcttcaccgcaatcggaagccgttcccgatctttcatgatgatgcccatctcccggatgaacggttcctccagggatttgatttcgatatcataggagcagcgcttcaaaatcagttccggaagcacgctgatgcccagtccgctttccaccatggacatgatggcatagtcgtcccacgtcgcaaaatccaccctcagattgattccgttcttcaggaaaaattcccggctgctggtattgttgtccttctcctgcaggataaaaggatatttctcgatttctgccagcggaatccgttcatactcgcacaacgggtgatccttcggcagtacgattttcatctcatccgtgccgtaggtaatcgtatcgaaactgtctttggtcggcatcagcacgaatccgatatccacgcgaccggattgcacccattcctcaatttcgttgtaatcgcccagaagcaactcgtatttcacgcccttataatcgttcttgaatttctgaattaccggcggcagcacgtgggtggccacactggaaatggttccgattcgaatcagaccggtttccaaaccctgcagctcctccacgtccgtggtgagtttctgaaactcattgcacaccgcccgaatctgcggaagcaggcgaacgccgtcggaagtgagttccacgccgtacttgttccgctccagaagtgacatctgccaatccttctccagatcgccaatcatccggctgattccggactgagaatagttcagaatctccgacgccccggtaatgctcccattgtccactgccgttatgaacgcaatatacttttgcaagttataatccattatatccctcactgtctacaatctgataatctggttgtcgctgtctacggaagccatcaagcccccggccatctcccattcgccgtacaccagcaccggtccgttgtatccgtacagccggcggagaattcggttaaaggtcaacgggttattcacaaaaatccgcgcatcgaaagtgcaggcgaactgccgcttctctgtgtacgggaacttaaagaaaataatatccgattccggatcgcagtcgtagtaccgcagttccatcattcggaacccttccccgtcgtacttgttggtgtagaattccgccgtttcccggccgcagtacatgtccttcaccttcaagttttccgtcagaaccgcatccgccggattctcccggcacacggccagcagctcatctaaagtgcccggcatctttttaccggcacaaatttccgcctcatccggccgcttctgcacttcctccaagaatcttctcggggtaaaatcagaccaatcgtagtccgaaaggtttccgctgcagattttcagttccggttctgcagtggtattgtcaatttccgaaaaattaaaatatgccatcttcgctccttactttacgctgatttcaccggccagaactttcttgtaatcctcataattccgcttcagcagttccggcgtatccagattgtacggacagcggcttacgcactggcggcattccacacagttctcaatctgcttcatgttctcctgccactcttccgtcagccagtcctcggatggcgcccgccgaatcatcagggacattctggcgcagttgttgatcttgattcccgccggacatggcaggcagtatccgcatccccggcaaaactcgccggacagttcttctttttccccgtggataaacacccggagttcctccgtcatcgctgcatcgccgctttcaaaaaatgccagccagtccgccagctccgattcccgctggatgccccagattggaaggacgttgtcaaactgctgcgtaaacgccatcgccgcatcggcccggttgatcagcccgccggccaatcccttcatggcaataaaacccacgttgtgctctttgcagctcttcaccagctccagctcctgttccgaactcagatagctgaaggggaactgcatggtctcgtacagaccggactccacgcattccatggccaccttgattttgtgggcggtcacgccaatatggcgaatcttcccctgggccttagcctcctgcatgcattcatacattccgcttccgtctcccggtctccagcactgatctaccatgtggaactgataaatatccacgtgatccgtcttcagatttgccagagaagtctccaaatccttccaaaaatcttccggcgtcttggccgcggtcttggtggcgatgtacacgtgattgcgaatggtatcgcctcccggaaggcttccttccccaaaagcagctcccaccttctcttcactgtccgagtatgcccgggcagtatcgaaaaatctcatgccgccgtgatacgcttcccgaagaagcttcaccgcttcctcctcggatacccgctgaatcggcagcgcaccaaaggcattctgtgggacggtgattcccgtatttcccagtgtcactgttttcatgatgtttctctccctttaaaaagttaaaaatcacttattgaaatatttttcatttaatcacttacaaatcatcatgtctactatatcatttctgtctaatactagcaacgatttttcaaatcttcatgtttaattcgaaaatagtggttccgtccgggtggtggatgggcctccggaggattgggaagggccgccggcggctgggacgtggtgcttcaccgcccgcaagcccttattccttcgtccggaggcaccacgtctagcgggccggatgggccttcggtggctgggacgtggtacttcaccacccgcaaacccttgttccttcgtccggaagcaccacgtct

SEQ ID NO: 750 - DNA, 32759 bp, Unknown
  16S sequences of unknown bacteria
aaaaatacagctgctatttcgatatttttccttttttcggtcttgcttgcacgcaaaaaacctgctctggcttaattgccacagcaggtttttcgacaagctgaggttccgaacccgatagggggttcggaacctctcttttttgcgcttacatcgagatcacgccgaatacgttcagcagcgagctgacgaggatgatgagcaggcagatgggcgcaaagtacttcatgaacacgccgtacatccgctttctgcggaacgcggaggagagctccatctcctgggcgatcgcgtttaggcccacggcccgcgtgatgaggaagcaggtggccagcgcgccgatgggcatcatcacggagttcgtcaggaagtcgaagaagtccagcatgtccatgcccaggacctgcaggaagtccagcgcgttgtaccccagcgcgcagagcgtgcccagccccagcaaaatcgccgcaaccagcgccgtgcacttcttccggctccagccgagctggtcctggaaggtggagacgcccgtctccgccagggagatggagctcgtcagcgctgcaaagagcaccagcaggaagaaggccacgcccgcaaagcgcccaaagcccatgctcgcaaagaccttgggcagggtgatgaacatcagcgagggcccggcctgcagcgcctgcgcgtcccagccggagaaggcgaagaccgccgggatcaccatgagcccggccagcaccgcgatggccgtgtcgaacagctcgacctggccggtggacttctcgatgtccacgtccttgggcaggtaggagccgtaggtgtagagcacgcccatggcgatggagagcgagtagaacatctgccccatggccgcgaccacggtcatgagcgagaagttcgaaaagttcgggatcagcaggtattttacgccctcgagcgcgcccggccgcgtgacggagtagatcgccacaaagaccgccagcacgaccagcatcggcatcatgatcttgctcatgcgctcaacgcccttctccacccccagcaggatgatcccgatcgtcagcgccgcaaagagcagaaaccacccctccacgcccccggccgagcccaggaaggtcgaaaagtacgcgtcctgcgccagctccatcgtgccgccgcgcaggtactcaaagaggtacttgcacacccagccgccgatgacgcagtaatagggcacgatcagcagcggcaccgccgcgttgatccagccgccgaagcggaacggcagccccttgccgaacttggcgaacgcgccgatggggctgcggcgcgtcatgcggcccagcgccgtctcggacacgatgagcgcgtatccgaacgtcacgaccagcaccaggtataccagcagaaagatcccgcccccgtacttggccgcaagatacggaaagcgccagatgttccccaggcccacggccgagcccgccacggccaggacatagcccagcctgccggagaagctgctccgcttcttctccgccttccggttctcctccatgctccattcctcccattccgcgcggagatctacgccttagaagcgcagcgacaggcaggaggggccgccgtcgatcttgcggtattccgaggtgtcgatccggatcgtctcatagcccatgtcgcgcacggccttctcggtcttggggaagcccgcgggcacgagcaccttgccgttgacaaagaggcagttgacggcgtaggcctcctccggggcgatgggcgtctcgtcaaactggctgaagaccggctggccgatgaactcgcccgcagccagcagccggttgtccgagaggtagtccacgccggtcttcaggtgcagcacgccgcgcaccgggaccgccgtggccgtcatgccgtacttctccaggatgcggcggaagttttcaaacccggcctcgttcgtgcggcgggagaggcccacgtagtagtggtcgcccaccatcatcacgtcgccgccctcgatggtgccctccgtgatgtactcgatgttctcctccgggtagaaggcgcgcagcgcctcgacgatgtaggccttctccccgttgcgggagggcgcgccggggttggtgatgatggcgcacttgggcgtgacgacggccacgtcctccacaaagcagctgtccgggtactcctccatggcggggaggaccgtgaccttggcgccgcaggcctccatggcctggatgtactggtcgtgctgccgcagggccaggtcgtagtccggcaggccgaggtctgcggtggtgatgccctcgatcatggaccgggagggacggcggacgatgacgttgcgaaacatggcattgcgctccttattctctgcattttttctcgttctgcggcgcgaagccgcgcacgttttcattatacaatacaagtgcgcaaattccaacgcgcgcgccgcatttcgccgttaaaattttcgcatgcgcccgggcatccgccttgtgcggaggcccaaaatggcgtatcatagagaaaaacacgccaaggaggtcgttcccatcatgagccgcatggaccgccgcgacgcgcagagggcgcgcagacggcgcaccgcgctcgcggtgctcgccgcagcgctggcgcttctccttctctattccctgtaccgcgtggggacgatcctgtggacctacggccagggcgaggcgcagtacgaccaggtcgcgcgcagcgtcgccacggcgctgcccacccccaccgccgcgccggatgcgtccgccccagcggcagaaaccgcgcccgccgcctcgcccgcggcccagccggagcgccttgcggtggacttctctgcactgcaggccatcaacccggacgcctgcgcctggctctacggccagggcgcgtccctccactacccggtcgtgcagggcgaggacaacgaatactacctcaaccacctgctggacggcacgcgctcggcctgcggctgcctgttcgtggacgccggcgcgagcgcaggcttctcggaccgggtgacgatcgtctacggccacaacatgaacgacggctccatgttcggcacgctggacgcctacaagtcccaggaggcctacgacgcccacccggagatgcagctgctgaccccggagggcagctaccgcgtggagctgctggcggggatggtgaccgatccctcggacgcggtctacggcggcctcacgaccgaggaggaggtcgccgcctacgtcgagtctgcgctcgcgcgctcgaccttccagagcagcgccgcctatgcgccgggggaccggctcctggcgctgtccacctgctcctacgagacggacgactccatcttcctggtgatcggccgcctctgccccctcgactgaggcgggcaagggaaactctcccttgcccgcctccgcctttctcagtcctcgcctatgcgcctgccgatgtgcatcgcctgccgccactgcggcgcaggcccgtcgtcgccccagtattcctccagcgctgcgatcctcccttcgcgcacctggaagaacgacaccgcgtgatgggaggacgtcttttgccggttccaaacgcgggtgaccgtgacgatctcccccggcagggagagaaccctctccgcctcgccctcccactgcccgggatactcgcagtttgcgtgaaggaactccgccacggtgaagcgctcgccggtgttcggccagtccacgcgcgcgtccggccagaagaaggcgcgcattccctccgcgtcctgccgcagcacggcgtcccaaaaggcccggatctccaatcgcggtccctccttttttctgtgtaaaaaaaaatccgccgcaatccttcgattgcggcgaaactctggcggagagttagggatttgaaccctaggtgcgctattaacgcacacacgatttccagtcgtgcgccttagaccactcagccaactctccaggactctgtccgtcagtaggtcgtcgtcccgctgacatttatagagtatagcacagcccgtcaaggattgcaagagtttttttcaaaaaaatcccggcggccggcggacggaccctggaattgacttttcctcgcggccgtgctatgctgggagcggaagccttgcaggggaactccgcccaaggagttgagaaggttaaaacctgaccctttgaacctgttggttaacaccagcgtagggagcatgatggcaatgacgggaatccttgctgcatgtcgccgcaggggttcccgcttttttcacgcgtcggattcccgagaaggaggaagtatgaagacggcattgaccatcgccggatcggactgcagcggcggcgcgggcgtccaggcggacctgaagaccatgtcggcgctcggggtgttcggcatgagcgtcatcgtctcggtcgtggcggagaacacggcccgcgtcctctccattgaggacatctcgcccaaggtcatcgcggaccagatcgacgcggtgtttgaggacatcccgccggacgcggtcaaggtgggcatgctctcgacccccgcgtgcatggaggccgttgccgcgggcctgaagaaataccggccgcgccacgtggtcatcgacccggtgatgtacgctaagaacggcagccccctcatgcaggagagcgccatctccgcgctgcggtcggccgtgctgcccctggccacgctgctgacccccaacatccccgaggcggaaaagctcgccggcatggagatctcttcggaggcggacatgcgcgaggccgcccgccgcatccaggccctcggcccgcagaacgtcctggtcaagggcggccacgcccagggcgaggcgcgggacgtcctgctgtgcggcgaggacttccacgtcttcgcctcccgccgcatcccgaccaagaacacccacggcacgggctgcacgctctccagcgccatcgccgcctacctcgcccgcggggaggtcctgcccgaggccgtgcgcaaggccaaggaatacgtcaccggcgccatcgagcacgcgctgcccctgggccacggctgcgggcccacgcaccacttcttcgccttctacgaggcggactgcgactaggagggaaacgccatgaccttttttgaggaggccgtcgccgcggccatgcccctgtggcgcgcggctgcggacgaggactttctgaccgggatgggcgagggcacgctggaccgccaagccttcctcgactacatcgtgcaggacagcctgtacctgcgcgactatctcaaggcctacgccatggcgctgttcaagagccaaaccctgcgccagatgcaggtcttctactccgtcctgggctacgtcaacgacggcgaaaacgccacgcgcctgcgctacctctccgaggcgggcctcaccgacgacgacgtggacaccatggaaaagaagcccgcctgcgccgcgtacacggacttcctgctgcgcgtcgcccgcgaggaggacgtgcccgagatcgtcatggccgtcatgccctgcatggtcggctaccgcttcgtcttcgaggaactgctgcgccgctgccccgccgtgctggaggggccctacgcgccccttgtgcgcgactacaccgcgcccgaatacgccgcggcctgcgcggagtggatggacttcaccaacgccctgtgcgcgcacctcccggccgagcgccgcgcgcacctgatcgacctgttcgtccaggccagcgcccacgagctctacttctggcagatggccggcggcaagccgcccaaggaccccgactgagcccgcgccccgtccccgcctccccggggacggggcgctttttcttgacagggcgcccgtcttccgctacaatacatacataccgtatgtatgtattttgaggaagggaccagcatggcgcgaaacaagcacccggagcggacggtggagcagattctctccgccgcccagcgcctctttctggaaaagggctatgaggagacgacgattcaggacatcgtggacgcgctgggtgggatgacgaagggcgcggtctaccaccatttcaagtccaaggaggagatcctggacgcggtcagcgaccggatgttcctggcgaacaacccgtttgaggctgtgcgcgggcggacggacctgaacgccctgcaaaagatgcgcgaggcgatccgcctgaaccaggcggacgaggaccgcgcgcgcatgacggcctccgccgtgcccctggcgcggaatccgcgcctgctcctggagatgatcgagtccaaccggcgcatcctgacgccctactatcgggcgctgctggaggagggcaaccgggacggctcggtgtgcacgccctacgcgcgggagatcgcggagctgctgccgctgctgacgagcctgtggctgctgccgtcggtcttcccggcgaccaaggcggagatgcggcgcaagttcgacttcctgggcgacatgctcgagcgcatgggcgtgccgctgatggacgcgccgacgcgggagctggtggacgccttcttctcccgcctgtccgagtcgggccccgcggaaaaggagggctgaagcgtggcaaactccgctctgcgctcgcgcaacttcgtcctgctcgtgctggggcaggtgacctcgctcctgggcaacctgtcgctgcgctttgcgctgtccatgtacatcctggaggcgacggggtctgcgacgctgttctcggggctgctggccctgtcgatggtgccgacgatcctcctctccccctttggcgggatgctggcggaccgcgcggaccggcgcaaggtcatggtcgcgctggacgcgctctcgggcctgctggtgctgttggcggggctggcgctccccctggggagcgggattccggccattgcggtgctgctgttcgcgctgtcgatcctcgcggcgttcgaatcgcccacggtgcaggcgtgcgtgccgcagatgctcgcaggcgaggcgctgctgcgcggcaatgcgatcgtctcgcaggtgcaggcggtggcctcgctcatgacgccgttcctggggggcctcttttacgcggcgttcggcctgcggccggtgtttgcggcggcggttctgtgcttcctcctcacggcgctgctggagtgcttcctgcgcctcgccccgccggaggcagcggaggggccgcgcggcctgcgcgcgatcgtccgggaggatctgcaggcgagcttccgcttcctcgtgcgcgaggagccggacatcctgcgtctcctgcttctggcggcgctggcgagtctctttgtgacggggaccgcggtggtgggcctcccctatctggtgcggacggtgctggggctttcggcggagctctacggccttgccgagagcgcgctgggcgttgcggccgtgctggggggcgcgctggtggcggcgctggccaagcgcctgcgcgcgcggcacctggcctgggtgctcacgggggtggggctctgcctggcgccgtgcggcctggtcttcctcgtcccggcgagcgcccttgcgcgctatgccgtgctcgtgctcctgttctgcgcctgccagatcggcggcagcgtcttttccacgtatgcggtcacggccatccagcggcgcacgcccgcggcgctgatgggcaaggtcgtggcctgcgtctcgacgctggccatgtgcgcgcagccgctggggcagatcgcctatggcgcgctgttcgacgccttttctgcgcgcgtggcgctggtctttttgccgagcgcgctgctcgtggtctgcatcggccttgcgtcgggccgcttcttccgccggctggatcgggccaacttctagccaagccccaaaatgcacaaaaacgccgcatcttacgcataagatgcggcgtttcccttcctggtgcgagaaacaggacttgaacctgcatgaaggaatcttcactagtacctgaaactagcgcgtctgccaattccgccattctcgcagaacggatacacatagagtatacacgatcgcgcgcaaaactgcaaggggttttttcatcaaaatcgaaaaaaagaatgaggcgatgcattgcatcgcctcaccttggtgcgagaaacaggacttgaacctgcatgaaggaaccttcactagtacctgaaactagcgcgtctgccaattccgccattctcgctggtggaagggggtggattcgaaccaccgaagtctgcgacggcagatttacagtctgctccctttggccactcgggaacccttccatagatatttggttgttcttctttcttcccaagaaattggagctggcgatgggacttgaacccgcaaccttctgattacaaatcagatgctctgccaattgagctacaccagcatcgtcaaagcgtctcgcgctggccgtcccgaatcgatcctaccccatccataaggaagaaaatggcgacgcggaaggggctcgaaccctcgacctccagcgtgacaggctggcattctaaccaactgaactaccgcgccataacccatgtgatggtgggccttcagggacttgaaccccggaccgatcggttatgagccgactgctctgaccaactgagctaaaggcccaagtgtaaaggctcaaaagaaagaatgtggtgactccgaggggaatcgaacccctgttaccaccgtgaaagggtggtgtcttgaccgcttgaccacggagccatatttggattggtcggggtgaagggattcgaacccccggccccatgctcccaaagcacgtacgctaccaagctgcgctacaccccggttgctttcaccgccgccggtcgttcccgacgacgttgtatataatactacaccggcgcgcgtttgtcaacaccttttttgcagattctttggagttttttccatcccgcgttttgccccgcgtttcagggaagaacgcgcctctcccccacccgttatgtcaccgcttggttttgtgccaacagcgtctctctgctgggtgcgtcatccccaaacccttgtggccaatgcggaatttggagtgctatcataaaagttgagaccccaaatgcaaggaagggtgataaaataataacaccagggagggactacaaatggaaaaacggtatacaaacgaatttccagctgactaaacaatacggcgttacgccttccatgtcaagacggggaaacccgtatgacaatgccatggccgaaaatttcttctccatcctgaaaacagagtgtatttcccgacataagccaaccactttctctgaggccaacgagatgattgaccgatatatccacttttacaattacgagcgcatccagtttaagactggagaggcgccgctggcgcgacgcctctcctactaaaactcaatatttcctaccaggggctttttctactgtccgcacaatctggggctgttcaggtttttttgcggagggggcgttgctgtggaagttattcgtcggcggggctgtcggagaggcgggcgcccagatggagcatgccctgtgcaaagcgttccgacgctgaccatgatatatggagcgggtcgccctcgcggatgcgcagcgtgcgccggatctccttgggaatgaccacgcggccgagttcgtcgatgcgtcgaacgatacctgttgctttcaagagccaagcctcctctttcgccatttcctttcgcaaacttagattttacagcactacctttttctatgcgaggggcgcaaattctgccgcaggcggcagcgccttcttatcccctgtcattgacaagccgctgtctgcgaatataataaaaaatgagagaattttgaagcagggggaaggcacttggagaggaatttgacccagctttcggcgcaggagcacacgcggctcggctccggacagatgagcaccgccctggtggcgcagtatctgcaggacggcgggttcgcgctgcgcacgtttccggagttgctccacagcctgtgccccggccaggacctgcaggcgcatctgacggacgcccttgccgcggacgagccggaggcaagccccgccaccctggccaaggtcgtgcgcaactggctcacgggaaaggctaagcccacgcgccgggaggagatcttccacatcgcttttgcgctcggcttctccgaaccgcaggcagatcttttgctggggcactgcacggactacggcatccactaccgcgaggggcgggacgtcgtctacgcctggttcctgcgcaacgggggatcgtacctgcaggcgcggacctttttcgcgtcgctgccgcccgttccgcggccggaccagccgccaaagagcgcgggcgcgcagatcacccacgagatgcagagcgcgttcctcctggcgcacacacaggaggacctgcgcgcctgttatcttgccaacctcaaaaacttcggcgcgctgcacacgcgcgcctacgcctatttttcgcggtatctggaccgcctgatccaccccgtgcccgagtggacgggccttgcggagccggactactccatggaggcggtgatggacctctacctgcgcatgaagatgccctccagccgcagccggacggacatgggcgtcatccagcggctcatcaagagcaactggcccaacaccacggcgctcaagaacatccgaaaccgcaaggccgacgtgccgcgcaagctgctgctcctcttctatatcatcacggaaaacgctgctgacgaggagtacagggagacggacgaggactacctcaccccgcagcagcgcctggacgaccactggtacgccatcaacgccatgctcaccgactgcggcatgcccccgctcgacccgaggaacgccttcgattggctggttctctacgccgtcacggcggacgaggaatccatgagcgagcgcatggaggcggtgatcgagcagctcttctccggcctgtccgaatgaaaagcgccccggcgcggaagaatttccgcgccggggcgctgcgttttggcaggcttattcggcctcccggccctgcagatccacccggccgctgacctgctgcggctcctcacccaggagcgcgccgcccgcctccacggcgatgcggcagccggacaggtagagctgcccggcgttgtccagcgtgccgatgagcgtcacatcttggtagaacgccgcttctccggcgttgcgcagtgcgccggagaggtccatgggcacttcgaccgtcagaaccccggcgttgtccacctcgccctccacgaccgcgcggcggagggacgtgttcgcgccccattcgagggcgccgtcgttttccacgcgcgtctcggaatccaggaaaatctccgcgttgcgcagcgtgcacgtgccgccctccgcgatctccaggcgcgcaccgctcgcctccagcgcgttgcgcgcgcgcagaacggcgtccgcctcgacggagacctggctcccctccagccacagtcggttcagggcgatgcagccgccgccctcgcccagccggaccgcgcagccgcccagttcgggattccagagcaccgccagcgcggaaccctccacggtgagcgaagcgcagttgtgcaggccgagcatggccgcaacggcgccctgttcgacgcgcagcgcgccgccgtccagatccgccgtcccgaagaagagcgccgcctcgcccgagagcgtcagggtcccgccgtgcaggcgcaggttgcccgcgttgaggaccttgttcacggtgaggtccccctgcacgtccagttcgccgtttacctggacttgctcgcaggcggggtcctccagggcctcgcgcagctccgcctcggtggcgacgaggcgcgcgccctcgttttcattccagcggaaggtgcgcaaaaagccggtgtagaccgcgtccccttcggcgggcagggagagcgcgttgtcgctcccgacgaggagcagcccgtcgttgtgcagctgcgccccctcctccacggcaaagcgggccgcggcgttggcggtctcgatgcagcccgtgttcgccagggttccgccgctgtccacgaggaagtcgccggcgttgagcacctgcgcgtccagctcgattgtgccgcccgcggacgcggagatcgtcccctcgttgccgaagcggtcgcagcagacggtcaggcggcagtcctgcggaatctcgatggtgccggcgttggacgccgggccgcccagcaggtccagcgcggtctgcccgcccgagtcgcttagccggatctcgccgaggttgtagaaacccccgtggacctgctgcgcgctgcccgccagttcgattgcgccgaagttgaccagcgcgccgggcgccatgagggagaacccgccgcgcagcgttccgtagttgaccacggcgctcgcgcgcgggccgtccaccgtgtgcacgacgcactggacctcgccgcggttgagcagcagtccgccctccagggcgaggaccgccggttgcacgccctgcgccgtggtcagactcgacccttccggcacgagcaggggcacgccgacggtcagcgcttcgcccccgcgcagcaggatgtcgccctcgaccgcgatggccccggcgcctgcctcgagcgcgtcgcgcagctcggcatagctcgtcacgcgctcggcctgggcaaagtccagcccgacctcgaggaagtgcgcgccgctgccctcggcgccgtagagggcgccgcccatctcggccgtgccgctcggctcgaccgtgaagccgtccgtcccttcgagcaccacggccgtgccgcccgcgaggatgccgccctccccgacggagatctcgccgcccgcgcacacgcggacgatgccgatatccgtcgtcaggctgccctccacgcggaggctgccgcccgcctcgaccgtgagcgtctgcagcgggtagaggtgcgcgcccgcctcgatgcgcacgggcttgtcgatcgaaagcggcccttccgtgacgccgaagtcgcagccggcgctgagcacgacggcgggcacgctctcgtccgcgagcgcggcgcgaagctccgcctcccccgtctgcgcgccgagcctctgcgcgctcgcaaagggatcgcccgcatcctgggccgcatcggtcggctggaccgcagcggtcggctggaccgccgcagtcggctgagccgcatccgtcggcgattggtcgggcgcggacgtctctccgcccggcagcaggagcgcggccaggatcgtcagggcgacgacggcggcgcccgcgccggcgaggggcgcccatctgcgccagccgggctgcggcccgggcagggggaccggatccgggtccggcgggtccgggtccggcgggtccggttccggtttcggcgggtccggaattggcgttggcccgggcgggaccggctcgggcccgggctcgggctcgggcacatagagcgcggcgtgcagctcctccatggagcggaagcgctggtgctggcgcaggctcatgccgcgcagcaaggcccgctcctgctgcgcggtgatgcggacgccgagcttgcggggcgagatgagctcgtcctcgaccatgcggtccagcgcctgcggcggcaccttgccggtcaggcagtagtagatggtggccgagagggcgtagacgtccgtccagggtccctgacccttgcgctgatactgctcgatcggcgcatagccgtgcttgagggtgatggtcatggtctcgttgccggccagggactcccgcgcgcagccgaagtccagcaggcgcaccgcgccgtgctcgagcatgaggttatccgggctgatgtcgcggtggatgaggcccttttcgtgcatggcgctcagcgcgccaaagagcggttcgatcaggcgcagcagctcctcggcctcgatgcggccgcccttttggcgcaccagctccttgaaggtggtgccgtccaggtattccatgacgatgtaggcggtgttgttctcctcaaagaagtcgcggacgctgacgatctcgggcgtcttgtccatcttggccatggcccgggcctcggtgaggaagcggagcctgcccttttcgaagctcccctccatgccggcataggggcgcacgcagaggctctcctccgcccggcgggaaacgagcgtcgcggggtaatactccttgatggcgacccgaagctccagccgcaggtcgcagccgatgtaggtgatgccgaatcccccttcgcccaggacgcggccgatcaggtagcggtccatcagcgccgtttgcggcggcaggtggtgcggcgcgggcgtgtaggttccagcggtcaggccgcactgggagcagctctccccgggattcacctgcgccatgcagtatgggcagtatgccttctcctccacggccatccccctttcccaaatgcgctttttttcattataccggctcctttgcagtccgacaagcggaagattcgcgtgtcaatcgggcacatggcctacaaaatacatgtagtacatgccatcctccgcggtgtacaggcccacgccgatcgtttcgatatagcccgcctccgtgggagcgctccgctcgtctaccgtttcgcggagccgttcggccagctccgtgtcgttctccgctttggcggcagtggcagcgcccatgccgctgtcgatgccgagctccctgagggccgtggtccactcggagccgtccgggcgggtcccgacgtcgtagagttccgagagctcctgcgcgcggatgcacgcggcctgcacgagttcacgcctgggcaggacttcgggcgcgtcggcctcgcgctggtcgtcgaggttgatgagttgggccatggcgcaggacaggtaccagttgcaggagaagatcgtctccccatcttcctgcaggaagtcccattccgcgtcaaagagcatctcgtaggggaaacccgcctcgtccgcgagatgaatgacaaccccctcctccgcgtcctccagggcctcggtgctgacccaggtcacggtggagccgaggacctcgtcgggcatgacgacctcctccaggcccgcggggacgtgcagcagcagggcctcctcctggctggtgacgccgtagatcacgccgtcgtcgtcgacgtcgatgaagcgcaggctgccgatgcccgtctccatgttttcgtcgaagatcacgcagtcctcgggcagcgcccagtcgccggggttggccgcgtcctccatgcgcaccacgccgcgcaggtcctcacagccggcaaaggcgctcttaggcgcgtccagctccgtgtagacgtacaggtcgcgcagcgcgctgtcggcaaaggcgctctccccgagcgtctccaagcccgtgggcaggtagacggactgcaccgcgctgccgcggaaggcctcctccgcgatggcggtgacgggctggccctcgatctccgcgggcagctccaggatcttcgcgttgcccgcatagcccgtgatcatcacgccctcgtcccggatttcatactgcacgccctcctccgtctcgcccgttacggccggctcggccgtggggctggcggaggggacggcggacgggctggcggcggggctggcggacgggacgcctgcggacggggccggggtcgggctgcccgtcagcaggcccacaccggccggggccgccggctggggcgcggccgtcggggcgccgcccaggctctgcagcgcgcgggtggcggcggagatgcccgccgccgccaggcacacgaccagcaccagccctgcggccaccgcgcacacgacggccacgcgccccgccggtctgctggccgtcttgtccgtggagaccgtcttgtccgaggtcttccccgtcgtattgttcggctggggcgcgggctcgccgatggcgatcgtcgtgccgccgttgaaggaaacggtctccatctttcccccatgaccccagtctgcgtcgttgtagagcttgctggcgaactgctccatgctggcgggccgggccttgggctgcaccgccagtccccagagcagggcttcctcctcccagggcgcaaggtctgcgcccagcgccgtgggcggctggagcgcgtcctcctccaggcgctccacggaggcgggcggcatggttgccgtcaggcagaaatagatcgtggccgagagggcgtagatatccgtctccggcccctgcccgcgcgtctggtactgctcgacgggggcaaagccgtgcttgagcagcacgctcatggaccggccgtcctccatggaccgggcgcagccgaagtccaggagcttcagggtgttgtcgggcatccacatcaggttgtcggggctgatgtcccggtggatcacgccggattcgtgcagcttgcccaggtcccgcagaagggggcgcagcatgggcagcaggagcttggccgagaggcggccgccggcctgccggcgcttctgctccagcgtgacgccgtccaggaactccatgacgaggtaggcggtgttgttcgcgcggaagaagtcgatcacgtgcacgatggcgggcagggcgtcctggcaggccaggagcttggcctcctccaggaagctgttctgcgcgcgggcaaacacctggtccgcgccgggcttggcctcggcgcgcacgcggtccgccccgcgctgggcgcactgcgcggggaagcactccttgatcgccacgcgctggctcgtccggacctcccgggcgatgtaggtgatgccaaatcccccctggccgagcaccgcgcccgtggcgtaggcgcgcaggccgccgctgccggtcagccgcgtgcccaggggaagctgctgcccttgcgcctgccaggcgacgggcttgccgcagtgcggacaggtcggcccggtggccgggcgcatgcaatgcgggcaaaaatccatcttagacgcctcccttccgagtgatcacaaagcgctcgcggtctgagcccagggagaagccgtcgcccacctgcagctccaccgcctggccgggcgcgacccgccttccgtcgcgcaggaaggtgccgtacgtggagccgaggtccttcagctgcacatgcccatcctgcacggccaccacgcagtgcacgccgctgatgccctgcgtcccctccgggaagatcaggtcgttgcgcgcggggtcgcggcccatgcgcacctggccgctcagttcaaagcgccggcccgcgaagatcccgctctcgcactgtatgcgcagctcctcctgcggcgcgggcgcgggcgcgcgcttgcgtccgccccagcggggatagatcacgagcgcaaagacgagtgccgcggcgaggaccaccgccgcgcagacggccacgatcagcaggaccggcgcgccgccggtgtagacgtcgtaggcgatccccagggaatccagcgcgttcttggcgtactggacgcggatggcgtaataggaagtcgtcacggacggatccgtcgaggcagctgtccaggtgttgatgcccaccaccgcgccgttttcatccacgagggggcctccggagttgccgccgttgatgacgcagctcatctggatcacgcggccggtgcccgtgtcggccagcacgtcctgcgcttcataaaagcgcatggcgtagccgggggagacggtcatgtcgtcgatcgtcgcgagcaggtagccctcgttcgtcgcctcgtccgagaggaacggatagcccagcgccgtgaccgggtcctcctcgcgcagggagctctcctccgcctgcagggccagggcgacgcggccgggaaccggctccgacgcgcgcagcacggcgacgtcctcttcctcctcgttgccggcatagatcacggtgcagggcacggtccggctggtatccagctccttcgtgctcaggttgtaagcgaagttgtccagcacgaggtagacgccggtcgtctcgtacaccgccaagaccagctccccgctctccagttgcataatccccggctcactcgtgacgacgtggcggttggtgacaaagacgtccgtctcctcgcccgcgtcgcccacgccaaaggcgctgcccacaccgggagtcacattcctggtctccaaatactcccccgttggggaatacagatcggcgcgtcttgtcaccagcacgcgcacaacgccgttgcgcgcctcccgggcggtgatcgcgccgtccgtgcagccgctcagcagcaggcagagcgccagcaccagagcaacaaacagcttctttttcatgatcgtctctcctctcctcgactatttctggcgcagccagaccgctgcggcggtgttgttgtcgttgtcggccggaacgcgggcgcgcagccgcgcgcgcatgcgcgcgatccagtccgcgggatcggcggcggcggcgaggtcctgccccatctcctcctccagcacgtactcccagaatccatccgagcacagcaggaaggcgtgccgcccggggaagagcggctcgccgcgcgcctcgacccgcacgtctccctcctggccgagcgcgcgcagcacgcggttgcggtcggggtgaaagcggatctgctccggcgcgatgtcccccagcaggacggccacctgcgacacgctgtggtcccgcgtctggaaggcgagccgcccgttgtagaagtggtacaggcgcgtgtcgcccacgtgggcccaggccgcgcgcccgtcctccagcaggagggccgcggccgtggtcttcatggggcagtccggcgtctgcagggagaggacctgcgcgtgcgcctcctgaaagagcgcctgcagcgcctcgggctcgacgcgcccgtcccagtgcgcgcagaggatctccgccgcgcgcgcggaggcctgcgcgccgccgccgtgcccgcccagtccgtcggcgaccacgaggcagagctttccctccctctcccgcacggccgtgcagtcctcgttgcaggggcggccgcccgggtccgtgtagcttgccgtttgaaacatccgctctcctcctcgctctaggcctgcccgctcgggcgcatctccagcaaaatggccgtgtaattgtcctgcgtgggatagtttttctcctgaatgcggcggcggagcgcctctgcggcctgctccgccggcaggccgagcgcgctgcagagctcctcctcggtcagggcgttgtagacgccgtcgctcatgaggatcaggcggtcgccgctctgcagccgcagggactgcgcgggcaggtccagatgcctgagccggcccatgcccaggaagctcgtcagtcccccggccttttggtgcgtcagggcctcctggatcgtgccggcgccgttgaccgcgttcagcgccagctcgctgcggtaggcgtgctcccggttgagcggcaccagcgcgccgccgcgcagcagggccacgcggctgtcccccacggagaggaaggtgaagcgcccctcctggatcaggccggcgaccagcgtcgtcccgctgcggcccaggccctccggcccgagcagccggttgaccgccgcgttcgcccgggccaggcactgcagcagcacctgcgccggctcgcccccggcgcgggagaactcctccagcgccgcggccacggcggtttggctgacccggtcgcccccggacaggccgcccatgccgtcggccacgatcgccagcgcgccgcgctccgcccagagcccctggggcgagagcgcatagctgtcctgctggctaccgcgcgcgccctgctcgtgcaggcaggcggtctgcagcgtccaggcgccgccctcctgcgccgcgggctcgagctcgaccgtgcgcaggcgcggcttccgccagcgcacccgcttgagcagggccgccgcgcccaccgcaagaagcgtcatggccagcatcgcccctgcgcccgcgccaaaggccgcaagcgcatccaccgggacgacctggaccaccgttcccgtctccgtctcgagcgcttcccaggcttcctcgctctccccgacctttgtctgctcgatttcgcccgtctggcccggcggcgaggccgaggcgctcggggcgggcgtggcaggcgtggcgctgggagcgggcgtggcgctcggcgcgggcgtggcgctgggagcggccgaggcgctcggcgggaccgaggcgctcggcgggaccgagacactcgggtcaggggaaacgatgggctgggctgtggtttcaaactctgtcacacgctcttgcacggtcctcacttcccctcccagcggaacttctccccgcacaggccgatgaacaggagctttgtgctgccgatggagatcacgtcatagctgtggagctccatggcgttgagcacggtcttgccgttgaccttgatgaggttgcggcctgcggaggggccgacgtagtagctctgctcctccgcgtcaaaggcgaccatggcatggttctggcgcgagatctgcatgtcgccggcgatgtggatgtcgccgacctcgcggccgatgtagttatagcccgcgtggatgcggtaatccaggccgcgcatgggcccctcgacgcagacgagccagccgacgacgggctcgagttggtccgggccgtggagatcgccgccgatgacggtatagccgaagggatcgccctccgccccgccgtccacgggcacggtgccggggaacgggccgcccggcgcctcggtgggcgtaaagtttccggagcccggcgccgcgccgcgggccgcgtttcccgatgcggcggcgttgcgcgcgcactccggacaggacgcgtgcagcgccgcattgtaatagtgaccgaacgggcattgaaccatcttgacctccatgtggcatcctcctcttggcagttcgtgggaacctgcgctctccccgagggaagcacgcgtgttggtttgcttgtgctcccactataccacgggcgcgcgcgggatcgtccaattcgattccgttcgcgtccttccgcgcgcgggtccggtcttgacagggcggccacgcgcggcctatacttcaggtagaaaagaaaaaggctgtgctggagactgcaaaacataggagagatgcacaatgaaaacggaatttctggacctgctgctgacccgcaggagcgtgcgcgcctacaagccggacccggttcccacagcgctgctggaggaagtgctgcgcgcgggaacctacgcgcccacgggcggcgggcggcagtccccggtgctcgtcgccgtcacggacaaggcggcgcgcgacgagatctcccgcctgaatgcggccgtgatgggcaaggacacggacccctattacggcgcgcccgtgctcgtcctggcgctggccgatccggcgagcagcacctgggtggaggatgccagctgcgcgctggagaacatgatgctcgcggcgcatgcgctgggcctcggctccgtctgggttcaccgcgagcgcgagatcttcgacagcgaagcgggcaaggcgctgctgcgcgcctggggtctgccggagacgctgcgcggcgtggggtccatcgccctgggctatgcctccgagcccgcgcctgcgcccgcgccccgcaaggatggctacatcgtccgcgtctagttccgccgcgcgcagcgcgccggccgcagagccttcccctgcagccggcgcgcttttaccgggtgtcccagcctgcaaaaaaacctgctccggcaatcaagccagagcaggttttgcaacgtaagcgcgccaaataaacacgtagagacatagagggatgcggatggtacaataacagaagctagcgaaacatgatgccgtaaaaaacatgagagcatggaggcttctgaactgcgcaggaaacgcacaagtccgcaggaatagctccggctgatccaagcgtgccgccaaagcgggctgaaagacttcgactggtttcaggagcacgggattccgcccgccaccttctgcagctggatccatcgtctgaaacaaaagggcgaaatggaggtccctaccggcgttccaacgatcctgcgaaaagaggcggagccactggatatcgtaaaaattgagatcgaagcagaagggaagatcgcaccgaacagggaagggagacccttccgcgtgtaagtccggtatgccagaagattttccagtccccctgccttgattccaactgtccggcattgacatcgaacagcctatggcgatccgcaaaaaagatccgtgagtcggcaagatcaccgggatgaaaaagcttggaaaacaacctcaaatctgctgattttcgtaagatccgccccggaaaccctgtccgaatttttcaaataagccccctcttcccaaagggatttagaaatagctgttcggaacgtcgagtgaaaagcattcccttaccgtcgaaggccagctcgacctgttcgacgaggtggagagcgaggcggcgaaggagactgcgccggaaccggatgtggaggaagaatattgtacggaaatatgtgggcattcgtgaactgacgcccaccatcgtcaatgagtttgtaaagaaaatcatcggccatgcgccggacaaatccagctgccaccgcaggcaaaagattgaactagtctggaacttcatcaaggaagtcaatctgccgggtgacgatcagaccgtggaacggcaaagaaacggcaggacggcatgacctttcagccatgccgccctgcgacaatcaaatcacttccttatgagggcgcgcctttggtgacgccctcttttttcggttgtggaaggatttttttaagttatgatcgtctagcataacgtgcacaatgggggaccgcagtccccccctcgcccccgtcccccgcgcagggtcgggctgtgcccgatcctgcgtgggggacaatgggccgccgtcttacagcgtcaggtagcggatcggcgcgccgcagggcagcgcctgcgcgagctgttccgccgcgtccagcagagcgtcctcctgccccagcgcggtcacgagcgcgaactcgtccgcaaaggcctcgccctcgatctgcacaaggcgcgccccggggaaggcggcgaggacctgtgcctcgctctcgggcgtgcgggccgtgcgcacgcgcacgaagagccgcagctgccgcgtaaaggagggcagcgcgggcagcgccgcgccgtcgggccgctcgccgcgcttgtgcgggcagcggacgatgtccagcacgtccccgcagacggcgctggccgtgggcgccgtgcccgcgccgcggccgtagaacatgacgtcgtccaccttgtcgccgtggacgagcacggcgttgaacacgtcgctcacgcatgccagggggtggctgtccggcagcatcgccggggtcacgcaggcgcgccagccaaagcccgtgcgctcggcctcggccagcagcttgaccgagcggcccagctcccgcgcgtagagcatgtcctcgcgcgtcaggcggtcgatgccctcggtgcggatcgcgctgtcggccagcggcgtgccaaaggccacgtgcgccaggatgcagatcttgcgccgggcgtcccagcccagcacgtccgcggaggggtccgcctcggcgtagcccttctgctgcgcctccttcagcgccgcgtcaaaggagacgccgccctcgcgcatgcgggtgaggatgtagttcgtcgtgccgttgaggatgcctgcaacgcgcgtgatgcggttggcggccaggtcctcctcgatgggcttgatgaccgggattccgccgccgcaggaggcctcgtagcgcaggcaaacgcccttttcccgggcgatgcgctccagctcctcgccgcagtcggcgatcagctccttgttcgaggtcacgacgtgcttgcctctctccagcgcagccttgacaaagcggtaggccgcgcccttgccgcccatgcactcgaccacgatgtcgatgtcgtcggcggcatagatctgctcggcgtccttggtcatgcggtcggcgtagggcgcggccggaaagtcccgcaggtcgcacacgcgctggagctcgatcgtttcgcccgcgcggcgcgcaagcacctcccggctgttccaaaggatgtccgcaacgccgctgcccacgacgccgtgcccgatgattcccacattcgccatgtttccgtcctccgttttctgtgtttcttccttctgttcttctatacttcccgaatttccacgcgcgggagcatctcctcatacgtcttgcgcgtgagcagctgcgtgccctcggtcgtcaccgccgccgttcccgcggcgacgccccggcggaacacgcccgcaaggtcctcccccaggtgcagcccgtgcaggaagcccgcgaccatgctgtcgcccgcgccgaccgtcgagcggacgcgcacgtccaccgccggcgcgtacaggcaggtcttcccgtccgtcaggaacgcgccgtccccgcccatggacacggccaccagctcgatcccccgcccgcagcagtcgagcgcggcctgcttgacgtccgcaaggccctccacgggccggcccgcgcacaggccgatctcgtactcgttgggcttgatgaggaagggctttgcctccatgccgcgggcgagcttttcgccctccgcgtccagcacgcagcggcagcgcccggccgtggcctcgatcagcgtccggtagaagtccgccggcacccccgggggcagcgacccggtgaagaccatcgtgtcgcagatctcggcgtactcccggaccttttggaccatgcgctccagcgcctcctcggggatctgctcccccggctcgttgatctccgtgatgcgcgcggtgctgcggtcgaacaccttgaggttcgtgcgcacggcgccgggcagccagatgcagtcctcccccgcgcccgcgctctccaggcgctcggcaatgcaccgcccgttttcctcgaacaggaagccgatgacgctggcctccatgcccatttcccgcgcgacgagcgcgacgttcacgcccttgccgcacccgtccgagcgcgaggcgcggatgcggttgaggcccccataggcaaaggcgtcgatctcaaccgtccgatcgatgcagggattcaggcaaacgctgcaaatcatgggttttccctcttccttctcatgcaaaattcttgtagcggtagcggttctcgatggcgatggaggcgtccggcgtggtcaggtccgcgctgaatccgcagggataccagggcgaaaggtccgcgttccccgggttctccacgatgtggagctgctgcgcgggcgcgccgccctgcaccaggagcatgagcttttcgcccgtctcgtcgctctggcagatgtcggccaccatcagggcggtcttcttgccgtccgcggtcgtgcccaggaagatgtcgcccacgcggatctcgtccccgtccacgtcctccacctgctccaggtcctcctggaaggtgctcatggagatgtagacaaagagcgtggccaggtacgagcggaagttctcctcgccgttgctgtcctcgccgccgctcgcccagctgacggagctgccgtcgaccgcgatcgtctgcccctggcgccaggtgtcaaacgtgaagtcaaagtccgaccccagggtgaaggagatgtccgcatagttctgctggctgtagaggtattccgcgatcaggcgcgccatggcgccggccgggccctcgtggttgcgggagccaaggctgatgtccagcacggccgcagcctgcgcgtcctcgcggatctcgccattgtagtagagcacctgcgcgccgtccgcgcgcacggcgtagttgcgcagaaaggtcccgagcgaatcctccgccgcgtagacgcgcgtgtagccctcgggcgggttgatgcgcgttgcgaccgtcatgcccgcggcgtcgatgcgcgcagcggacggcgacacatccgtgggctcgggcgtggcaaagggctgggcgctgaataggttggccgccgtcttttccgggctcagggattcgatggggacgatctccaccccctgtgcgcagcccgtgagcgcgaggctgagcgcgaggcaaaggagagcgactcgtttcatgccgtacacctccatccgggggaacaattccctccccctaatcatagcacgggagcgcgcctgtacgcaaccgcggcttgggcctggcgtccgccattcctgtaacaaagttgtgaaaagtggggccttgcgcgcggccggcaaaaccgccggggctggggcccgattttttttatccattctctgcgggcgcccgcccttgcaagtccctgtgcttcctgctatacttttcctgtcgcattggcttttgcccatagaaataatttcagacaatgcatgggatggtgcagaacatgaaaaagacctacacaggagacgaacggaactacgtcggatttcccttgggcggcctcggcgcagggtccttctgcgtggagggcaccggcgctttctcggccttctccctcaagaatgagccggatctcaacctggagccgccgctgttcgccgcggtgaccgtaaagggcgagacccccgtcagccgcgtcatcgagggccaggtgcccaagtacaaaatctttggcggggcccggggcgacctgaagcggaaccccccgaagcccgctccctccaaggggacgggcctgtacggcacgacctacggcctgccccgcttccgggaggcggcgttttccgccgcgttccccttcgcgcaggtggactttgccgacagccgcttccccctgcaggtaaagctgcgggcgtggagcccctttacgcccccggaggcggacgattccagctacccggcggccttcctggagtacagcttccgcaacgataccgccagccggcaggacgcggtgttctactacgccgccatgaactttctggatacgggctgcgggcagccctccgtatccaaatacaagaccggcttcgttctgcgccagagcggcacgcaggaggccccctgggaaaagagcgactactgcgccctgatcgacgacagcgccgcccgggtgaacaccgccctgttccggggcgggtggttcgactccctgaccatgctgtggaacgatatccaggccggaaaatccgaggaaaagcagcgggaacagcagaaagacttccccaaccccggcggctgcctctccctggagttctccctgatgcccggggaggagaagaccatccccgtgatctgctgctggtacgtgccggaatccagtctgagaatcgccagggcggaggacgatggcgccgaagaggaggtcccgctgtggaaaaaggagcgctattccccctggtacgcgggaagattcgcctccattgaggagctgtgcgagtacatggtccagaaccgggcgcgcctcctggaggcctcccggaagttctcccaggccttcttttcctccacgctgccgccggaggtcctggaggcggtgagcgccaacctctccattttgaaatcccccacgatcctgcgccagcgggacggccggctgtggtgctgggagggctgcgatgacgcctggggcagctgccacggaagctgcacccatgtgtggaactacgcccaggccatctgccacctcttccccgccctggagcgcgggctgcggcagacggagttcttcgactcccaggcggagaacgggcaccagaacttccgctccgccctgcccatcggccagaccacccaccgcttccacgccgcggcagacggccagctgggcggcatcatgaaggtctaccgggatttccggatctgcggcgatgtccagtggctgcgcggcctctggggccaggtcaaggcctccatggacttctgcatccagcagtgggacaaaaagcgcgagggcgttctgaaggagccccaccataacacgtacgacatcgagttctggggcgcagacggcatgtgcagctccttctacctgggcgccctgaaggccatgacggagctctgcgccgtgctgggggaggatggctccctgtaccgggagcttctgcagaagggcctggcctatttggaggaaaggctctattccggcgaatacttcttccagcaggtggagtggcaggatctggaggccaagctccccgagcccaaccaggccgcgctcaacgacaagatctctccggaggccgcggagctgatgcgggaatacgggccgaagtaccagtacggcacgggctgcctttccgacggcgtgctgggcttctggctggccaggatgtccggcctgggggacgtgggcgacagcgggaagatcaggagccacctgcgcagcgtctaccgctacaacctgcgggaaagcctgctggagcacgctaacccccagcggcccggctacgccctgggcgacgaggccggcctgctgctgtgcacctggccccacgggggcaagcccgccctccccttcgtctacagcgacgaggtgtggacggggatcgaataccaggtggcctcccatctgatcgccatgggcgaggtggaaatgggcctggacatcgtccggaaatgccggagccggtacacgggccgggtgcgcaatccctttgacgagtacgagtgcggtcactggtatgcccgggccctggcctcctacgccctgctggaagccctgaccggcctccgctacgatgcgtttgagaagaccctgtacctctcccccaagatcgacggcgacttctcctccttcctggccacggataccggctacggcctggccgggattcgggatggagagcccttcctggaggtgctgcacggcagcatcgacgtgcagcagatccgcaggctgtgattctctcgggcgccctgtgccgcttcggggcgcccttcgcattccggccggatgtttttgcatcagcgcgaaaaaacgcctcccgccgggaggccgaagcgcaaaggaggattcccccatgaaagaaaaacacctgatcgtcatgtccgtagacgccatggtctttgaggacctggaatatctggacaccctgccccatttccgccagctgctgcaggagggctcgcagatcgagcgggtgcgcagcatctaccccagcctgacccaccccgtccacgccaccctcctcaccggttgtttccccgagcacaccggcatctgcaacaacgtgcggccggaacctggaaatcccgacgccccctggtacaacgacctggcggacatccaggtcgagaccatttttcacgccgccaaggccgccggcctgcgcagctgcgcctgccgctggccggtgaccagccgggcgggcggggtgatcgactacctggtgccggaaatcctggaggacggcccttgggaggacccggccctgccctatcagcgccagggcagctccccgcagctcctggaggaggtcctccgccctctgctgcgcctgcaggaccccgccgcgccccggcacccggcctacgacagctttgagatcgactgcgccgcggagatcctccggcgctaccggccccacctgctgttcacccacccgggccatgtggacagcgcccgccacgagaacggcctgttcaacccgcgggtgacggaagccctggcgctcacggaccgctacctgggccagctgatggacgcggcccggcaggccggcatttccgacagctgcaatttcgtggtgctctccgaccacggccatctggagatccagcggacggtctgccccaatgtccttctggcccgggaggggctgctccgcctggacgggcagggaaaccttctggactgggacgcctatgtccagtccgccgggctttccgcccacgtgttcctgcgggatcctgccgacgccccgctgcgggagcgcgtctcccggctgctgcatcgcctggccggcgagggcatatacggcatcagccgggtgttcaccgccgccgaggccagggagcagtaccagctcgccggcgggttctccttcgtgctggagggagacggcttctccgcctttggcgaggattggcgcgcgcccttcgcccggccctttgcggtcacagactaccgctgcggccactccagccacggccatctgccggaaaagggcccccagccccccttcctctgcatggggccggatttccgccccggcgtggcgctgcccgagggccgcatcgtggatgaggctcccaccctggccgccgccatggggctctccctcccccaggcggatggccggcccattgccgagctgttgtactgagcccccgcgccggcccccggcaagtccgctcgggggaaacggcagaggaaagagcaggcgcgccctggcggcgcgcctgctctttgcgatttgggatgggggctgccttagaagcggacctctccgatgggcctgcgcagcgagaagcgcaccgtctgcagcgggtccaccacctggcagaccgaaaggtccccaatcagggacagcagcaggatcagctcctccttgggcagcgcgacgcgcggggcgaggaagttcagcagcgcatagcgcgcgccgcgcgcggcctcgtccagcgtctctgcggagtacatcgccgcccagcgcccgcccttctcccagatggggcagccctcctgccggcccgggatcacgcgcacgcgcacgtccacggtcgcggccatctccaggccgcagatgcagacctcgccgtcgcccatcaggccgtggacgtcgcccaggccgaagtacgcgccctgcgcgcccacggggaagtagaccgtgcaccccttgccaatgcagcggttgtccatgttgccgccgtgctggtggggcgtgtccgtgtcgtaggcgcctgcccgcggcgcgacgccgatgacgccgatcatgggctcgagcgcgaggcgcaggccgtcaaagtcgatcgtgccgtccgccccgatggggaagatgcgcacgtgctcgcgctcgacggcgtccgccaggccgcccacgcccggcgtcaggcgcatggcgccgcgcgcgccgggcacgatgtccaggatctcgacggcgagcgtgtcgccggggtttgcgccctcgatgtagacggggccggtcgtggggttgaacttgggcgcgcggtcgccgatgtccgcgcggcggatgtcctcgcgcgtgagcaaatcgccgtagcagtcctgcgtgtggaagcggaggacgtcgccgtcgcgcgcggtgcagcaggcctgcatgccctcgtgggcaaagccgtagaactggttttctcttccgatctcgatcatggtcatttctccttgaaaggcgggaacgcctgtgatacactgaaccaaaacaagtataaaggagtttgtatggaacctcaagagcaagttttcacgtttttgcgggatctgggcatcccgtttgacctcgtgcgccatgcgcccgtggacaccatggaggactgcgccgcgctgggcctctccgcgccgcactgcaagaacctcttcctctgcaaccgggcaaagacgcagttctaccttcttctcctgcgcgcagacaagccctttgtgacccgggaggtcagcaagaccctgggcgtgtcgcgcctgtccttcggggaggcggacgcgctcgcgcgcctgctgcacacgcacccgggcgcggtctcgcccctggggctgctcttcccggagagcgcgggcgtgcgcctgctctgcgacgaggacctgcgcccgctccccgccctggccttccacccgctgacgaacgaggcctcgctgacgatgtccacggtggacttcttcgggaagttcctgcccgcggcgcgccacgacgtcaccttcctgcccgtctccgggccggaagcataaaaaacatcccccgctttcgggggatgttttgcgcttgctacggatagacgatctccgcctcggccatggcctgcgcgacaaacgcctcccagatgtcttcctgcgcgtccgcactctgtgccgcctctgcgatcacccggtcgtacagtttttcgcgcaggagcgcatcccgccacgtcggcacgaggatctcctccgtgtattcctcgtaggtcatgtccatgccggccgcataggcctccaggctgtcgagcatatattgcgcggaagcatccccttcggcctccatcgcttccagcgtttcgttgatgttgtccgcgtattcccgcgcctcttcctccgtcacggagagcccccgctcctcggccaggcccgtaagcagcgcctcgcgcagcaggcgctgttccacctcctcctgcgtgggcggcgggtaggcggcctcgtattccgccatctcctcctccgtcaagtacccgccgatctcgatgagctgcagcgatgactcgtacataagctgttcggtctgcatggcgcgctcgacctgcccctggtagacgggcctgccgttgacggttgcatagacgtcgccgtccgcggtgcctgccgccgtctccccggcctgctggaatgtgcggttggggaggatcaccgccaccgctcccaagcagacgaccgcaaagactcctatggccagtgcgatccatcctctcctcttcattttcccgctcctttcctgtgactgcacgcgttttgcagttttctattgatgcgttcgtccatcctctggatacttccatcatacagatttgggcggggcttgtaaatccccttttctggcttttctccccgcgggacaagaaaatccccccgcgcaagaggtctgcgcggagggattgttcattttggggattagatctcctcgtcggagggcaggtcgcccaggcccatgtcgtcgccctcgggcagctccgtgctgtcgccgtagtcggcggcgtcgcggatggagagggagatgcgcttggcctcggggttgacgtccaggatgcgcacgcggacgatgtcgcccacggtcagcacgtcctcgaccttgttgatgcgggtcg

SEQ ID NO: 751 - DNA, 1553 bp, Unknown
  16S sequences of unknown bacteria
cccatgtgccgcacagcgctgtacagcggatacaaatccggatcggccggatttctaacaaacgaggggccttcgcgatacagccggcagaccaggcggtagatccgcagttcccggtttggaaggcaggtgagatgggcgcgccggatcagctttgccgttgccgcagagcgggcgcatacgctgttccaaatgcgctttgcatggcctttgtccgtttccacagtgtgaacggcgtacagcgaaatctgttcccggccggtttccagaatggaaaccggccgttctttgcgggtataactgtcaaagatacagcacagaagtccggaaaaagaaccgtcgtattcgtagatgcattcgctccatgtcacggcgccaacttcctttctgtctctgctggaaatagacttagctgttcgcctgcctcgccgggcagctcttttgcctccagcatggtcagcgtgcggcgcacgctctcttcccggaatcgtatgccggcggccatttttccattgcaggtgatgaagtactgtgcacgtttgaggacgacccgcagttttttgagcacgtcgaaatccaggcggcaggtgcggcgcgctgagagaatacgcctggcgcatacagtaccgatacccggcacgcgcagaagcatttcataatcggcggtggaaacctctatcgggaactgctccagatgatgaagcgcccagctgcattttggatccaatgcgggatcaaaattgggacaggcttcatccagcagttcttcggcagtgaagccgtaaaaacgcagcagccagtcggcctggtacaggcgatgctcccgcaggaggggcggcttgctgcctttagccggcagcagagcatgttctgttaccggaatataagcggagtaaaagacgcgcttgagatgatattttcggtacaaactctggctgagatgcaggatatgccggtcgtcttccggcgtggcgccgatgatcatctgagtgctctgcccagctggggcaaaccggggcgtatgacggtaacgggtcagatcgtatcggttttcctgcagggtatcggcaatgcggcccatgggcttgaaaatggaggctttgcttttttccggacacaacatttttagagcctgctctgagggaagctcgatattcacactcaatcggtcggccaaaagccctaattgctgcaccagttccggcgctgctccggggatggccttggcgtggatatagccgttgaaccggtattctccgcgtagcagagacaggcattggatcattcgttccatggtgtagtctgcatttttcagcacaccggaggaaagaaacaacccttcaatgtagtttcggcggtaaaagccgatcgtcagctctgccaattcccggggcgtaaaggctgtgcggcgtacttcgctgctgcggcggttgatgcagtatttgcagtcataaatacagtagttgctcatcagcactttgagcagggtgatgcaccgcccatcggcggaaaagctgtggcagcatccgttgattgcggacgtggtattgcct

SEQ ID NO: 752 - DNA, 13267 bp, Unknown
  16S sequences of unknown bacteria
aaaagaatataaaatagaaaacagtacaaagtctcttttttttcggcgtgcatatttacaaatgaaatagaatgtgatattataacgtcataggataacccttgaggttatagggtatccagaggccgaagcgattcttcggtagcacgatttcaaagaccgtgtgaagcaaacaatttgaaggaggaaattttaatgacttgttgtccgaaatccatcattgctgacattctcaaggcccgtgaagacaagggcggtattgtcaacgtttattacgttgcctgcggtggttcttacgctggcctgcatccgggtaaatactttctgcagagcgaagcaaagaaagtaacggtagaccattatactgccaacgagttctgccatgcgacgccgaaggctcttggccctaattctatcgtcattactcagtctcattccggtaccactcctgagaccgtaaaagctgctgagattgcacagaaagccggcgctgcttctgttgtcattacctttgatgaccagagccctctggcgaaaaacggcgattatgttctgaaatatgaagccaaagctaccgcagatatgactggtatggcttttggcctgaaactggctgttgaaatcctcaaccagattgagggttatgagaactacgatgagatgatgaacggctttgaccgcatcgacggcattgtaaaacatgcaaaagaatttttgacccccagagctaaagtttttgcggaagaatacaaagatgagaagctcatttacatgatgggttccggcgcaaactacgatgttgcctactcttttgccatttgtctgctgatggagatgcagtgggtcaactcttctgcaatccattctggcgagtatttccacggtccgtttgagattaccgaccgcgaaactccttttatcatcttgatgagcgaaggccgtacccgtccgctggatcagagagcgttggatttcctcaatagatttgcggagaaagtaatcattctcgatgcaaaagagctgggcttagagaccatcgacgataaagtttccgaattctttaacccgcttttgatgggcgctgctttgggttgctactcctacgagctgtccatcgccagaaaacatcctctgtcttgcagaagatatatgtggaaactgcagtactaatttggctgccgatttattacataaagaatattctgctgtgcagacaaaaagagatccggttgctgccttttcgcaagaggtggcaccgggttttttatataagatatgaatcggaagggggtatatcaacgagaagaaaggaccgggaagtgacgcagatagaagagcagctggcaattctggatcaatgtaaggtgtgccgtgttgctttgcaggataagcaggggttatatcttgttccattgaattttggctatcaatatgaagatggacacctgatattatattttcacagcgccaaatccggacgaaaaattgacgcattgcaggaaaacagtgcagtggcgtttgaaatggactgtgctcaccgattgatcgaagcggaaaatccctgtcagtacggttatgcttttgccagtatcattggaaatggcgatgctttgttggttgagaacagggaagaaaagaaaaaagcactttcgttattgatgaagcatcaaacgggaaaagattttacttttgacaatcagatggcagatgcggttgccgtttttcggattgatgtttccgagttctgcacaaaacgacatgagtaaaataaatccttctgaaaaatcggacaacagaaataggagcaaacagaaaacccgcagcaacttttaatgctgcggatttttatcgatgttgggagattttatccgattaccatatttacaaataggaaagcagaagaactggctttattctgatcgatattacgatttgtgcttacaaaaggaatgaaaaaagcttctttcaggatgaggcaatcaaaactattggaaatgataatctcatttttggcattgcgccatgatatgctcggaatcttcccgatgataggcgccagaccaacggcagatactttgcagaatcggcactacggaccggcccttttcagtcagagaatactctacccgcggtggtatttcattgttacaacccctaaccctgacaataaaaaagaactataaaaagaaaaaggctttgctttgaatagcaaagcctttttcggcgtagaagcaaaacgaggtttaaccgtgctttttcaaagtaaaaccgcgtccttttacttcattgacttgggtaacagtcataaaggccatcgggtcaatttgagagatcagacggttgagattgggaagctcccgtggggagaggatacttaaaacaatcaattgttctttctgaaggtgaccagtaatggactgcaaaaaagtagatcctcggtccaacgaagtttgaataacgtcattgatttcctgatacttttcactgataatcatcacctgtacctgactttttccgatgagcatgaccttgttaataatcaaagaggtcagcagtgtgacgagaatgctataaagaattttttcgagatcggagaaaaaagcctgtgacagcaaaatgactgtgtcaaacgcataaagaaaaacagaaacagaaatgccggtacgcttattaagcaccaacgggggaatatccatgccgccggaagaagctcccattcgcagaacaaggccaacgcccgcaccaacaaaaagcccggcgaacaaggcggacagcagcgtatcatcagtcaagcggaatccattcagaagtcgctgaaagaaatccagaaacaatgggtaacatacagaactaagaatagtggtgaatacaaaatttttccccaaaacaaaccagcccaacagcaacatggaaaggttgattacccacacagttatcacaacaggcagtccgcagagatgctgtataaacaaagcaatccctgtggtgccgccagacagcagcccacagggaaggataaatgcagcaatgccaaaagcgaatacagcatttcccagtaaaatcaacggaattttaaaccatttatttctcatttgaaagctctccctttctgaatacagtctaatgactattataaggggagaagatgtgaaaaacaagaaatttcataaattaccttacgaaagtgaaagcgcgatatgtaacagcaagacgtcttagattgacttttggactgcttcgtgttaaattggtaataaatcaaagataaaaatatgctgggaatgagcgcgaaaggggaaaaaagatgaaatacgattttgaaacattgatcccgcgtaaaaatatgggctctcgaaaatggaatgtgatggcgcagcataatcccaatgcggcggaggatgtcattccattatcagtggccgatatggagtttcgaaacccgccggaactggcacagggcctaaaagattatatcgaccgttctattttaggttatacactgccgaatgatgcattttatcaatcggtagctcgttggatgaaaaatcggcatcaatgggatatcaagcctgaatggctggtgcaagcccctggggtggtcaatgcactgtttggcatcgtaaagacctttacggagccaggggacgggatcatcatcatgcagccggtttattatccgttttctgccgctatcacccaaaatggcagggaattggtcaacaacgcgctgatttatgaagattatgcctatcggattgattttgatgatttggaaaagaaagcgaaagatcctaaaaataaaatgctgattctgtgcagcccccacaatcccatcggtcgggtttggacacgggaagagttggaagaggtcggccgtatttgcattgacaacaatgtattagtagtatcggatgagattcattttgattttattctgactgggcataaacacacagtatttgctaatatttcggaagagtttgcccagcattgtattatttgcacggctccaagtaaaacatttaacattgcgggtctgaaaatatccaatattgttattccgaatgaccatctacgtaaacagcttctggagaaaaatcagagggattttgcgtccaatgcgctgggtattcaggcttgccggatttgctacgatgattgcggtgcttggaaagatgaaatgctgtgtatgatcgaatacaattaccaacaggtgaaaaagtttgtggaagaaaagttgccgcagattaaagtgatcgaactgcagggtacctatttgctgtggttggactgcacggctctgggcctttctgacgaagagttggaaaaactcactttaggggcagatttatatttagacgaaggatatctctttggaccgggtggcagtggctttgagcggattaatttggcctgccccacgcggtatctgatggcggcaatggaacgatttcaaaaggcaatcagcgctttgaaataattttgacgaaaagaggagaagtatcatggcgaaaattaacgttggcgagaaaatggagaactttgtattcgacactccttataaaagagggatggatcttgagacagttgtaggagggaaaaagacgggcctgctgttctcccgttactacggatgctccctgtgccgttacgatatgatccaactcaaagagcagtatgagaaaattaccgctactggcgggcaggttgtttttgtacttcagtctgacccggatctgctggcacgcaattttaccgaaaacgagtatcctttttgggtgattgctgatccggaacagaaaatctataaagcgctgtctattgatccggcgacttcgatcaaagatgccatcgatgaaaaagcactgaaaaaaattcaggcggccagaaaacttggcttggagcatggagaatatgagggaaacgaagaccaactgccggctgcatttgtcattgagccggatttgactgtgtcctatgcgcattatgccaaaaccgctggagatattccggatgtagatgagtttgccacactgctggcaaaaaaatgctgttgctgtaaataagaataacaaataaaatccagcatcttcggatgctggattttatttgtcttataggcttaaaagggaagagtagtctgatgatattcgacagacatgccaatctcaagtacaaatatggaagcagggatactatgtagatacggtaggtcgcaataagaaagtaattgaggagtacatcaagaatcaattacaggaggatattgcggcagaccaaataacattaaaagaatacatagacccgtttacaggtaataagaataccaaggcataaaaacatagaccgctttagcggcggcctgtgagtaaaatacggttggcaaacctttcgaagcatcttaagatgcgatgcctgtattaagcccttctagggcttggtgcaagccacgcgtttcacgcgtggtcttgactggaaagaaatgggatacgcatgtttttactatatcaaagaaggttaaaaagagaaatgattgatcgaaagttctgctggcatctacaggacaaaagcattttttgtttgacacaggatgaaaaggccatctaacgaatcttatccactaccttccccaatcaatctgacaaaacaggcaggtttcctgcatagaatggttatcggagggatgcgctatgcggcgattcatggtagttggacgaaaaaaatcagtttggtttttattgggagcggtagtttatgtcttcattattttgctgggactcggtaatatggtggtatctttggtatcaattaccgaaaaggaactccccatttactctgttcagcgggaagaggcgctggttgcactgacctttaactgtgcctgggaagaaaatgatataccgcagctattggatttactggagagggaaaacatcaaagcaacattttttctggtagggcaatggattgaacgatatcctgattcggttcggcagattgtcgacgcaggacatgaaatcggtaaccattcttattcccatgtagattttgtgggagcgggagaagaagtaatccgacagcaaatggaaaaaacggacgcactgattcgggaggtgactggatcggatccagtactggcgcgcgttccctccggctcttatgacagccgtgtgatacgcttgctgcggcaggagggatatgaagttattcaatgggatgtcgattccatagactggaagaaaccaccggcgaaagaaataaccgaaaggattttaaccaaagttcagaatggaagtattgtgctgttccattccggtgcagccaccactttggaggctttgccagacgtgattgccggcctgcgggcaaaaggatattgttttaccacagtgggagatctgttgctgaaaggagaaacggtaatggatcataccggtcgccaaatgcctgcaaagcaggaataaatcagatgaagaaggcggtctttcagcaaaaagccccgagcggactccgctcggggccttttgcacaggatagttgacctttacggctccaaaatgaacaatcgaatgaccgcttgcatctgccgaaaagaaactgttccgtttattttttcaactggtgtgacaggcaccaatttttagaaatgtttgccacctcttttacacagttttcttcaaaaggtgttttcaatcccgcagttttgactacgtcgacgaaagtgccggttccggcttgattgactaaggcgagataccgtttccaagcgtctttgggatcttttaaatacagcgaccagaattgcagtgcaacggtctgggccagacagtagtcaatataataaaaggggtttagataaatgtgcatttgtcgctgccatccggctccacgtccataaaaaggcagatcgccaaatgtcaagtaagggcggtattttttctccagttccatccatgcttcgttgcgctgttggggagaaagttccggattaccatagacaatgtgctgaaactcgtctaccatacagccgtaaggcaggaaaaatacagcgctttccgcgtggaaaagctggtatttatctgtttggtctgcaaaaaacagatgatggtagtcagatgttaaaaattccatgctcatggaatgaacttcgcaggcttccagtgtgttatcagcatactcaggaagaagttctcgctttgcagcctgataggcggcgaaagcgtggccggcttcatgggtcagtacgtctacatctccggcagttccgttgaagttagagaaaataaacgggcttttctggctgggaatatacgtacagtatccgccgggcgctttgccttctttggccagcacgtcgaaaagttcggaatgaaacataaagtcaataaattcggctgtttccggagaaagagcgcgatacatctgctgaccggcagctaaaatttcatcagcgttgccaaagggaacggggttaccgtccggaaaaagaaaagtatcgtcaaaatactgcatagaatcagctccgatacgtctttgctgcacctttttcagctgagtcaccgccgggactatttcttctacgatttttttacgatactcttcgacttcagatataccgtagccgtttcgcttcatacgaatatagcctaacggaataaaattgtcgtatcccatgagacgggcctgctttgttcggttttttaccagtttatcatagatctcatcgaatttttcccggttttcgtcaaagaaacgaccttctgcttcaaaagcggctttgcgcaccgcacggtccgggtcctgtttataaggggtcagctgagcaacggtcaggatttttcctgcaaaggggatttgcgcagaggcatataactgctgatattcggtttgcagtccgttttcttcctgcatcagaggaatgatggaagggtcagctgatttgacgtcgatttccattttggtaaacagcagctttccaagatctttctccaacgccgggcggtggggactagaaagcattgtacggtaaatatccagctgtttgtcagtgaacagcgggagattttcatcccaaaaagcgttttccttttcataaaaaagatcgcgggtattcaccgtgtgacggacatagcagatggcagagaggcttccgatccgctccgcgatttcctcaaacgataaaaaagccttttttgcatcttcagctgttggagcgccggcaatggagcgggacagtgtatccagctgtgccatggctgtctgaagatctgggcgctcgtagggaaattcggcaaatttcatatgatccctcttttccaaaatttgataatcttagtatagcatgtcccaaaagcagaaaaaagaggattgttgtttttttatgtttttttttcagatgtattggatatttcgggctgttacacaaaattttatcctttccacatacatccagggaaatttgcttgcattttacattgttttagcgcattatgaaagaatagcaccccctgcctgattcatttttcccaaaaggcagccaaagcctgcaaaaagtgaaaggagagtgcagatgttttccggaaaacagctaattaaattgatattgcctttggttgtagaacagtttttggccatgactattggaattgcagatacattaatggtagcaacctgtggggaagcggcagtatccggtatttctttggttgattccatcaatatcctgttgattaatattttttcggctttggctaccggcggtgccattgtctgctcccaatatattggcaaagaacagacggaaaacgcacggaaagctgccaagcaattggttctgatcacggcaattttatctgtggcaattatgattgcctgtttgctgtcccaaaggggcctactccgtgtgctgtttggctcaatcgaagatgccgttatgaacaatgcggtgacctatttgtttttatcagctctttcttatccgtttattgccgtttataatgcgggtgccgcgctgtttcgcagcatggggaattctaaaatttccatgtatgcatcgttaatgatgaatattgtcaatgtaggcggaaatgctttgttaatttttcagtttaatatgggagtggccggtgccggtttggcttcgctgatctccagaattttggcggcagtattcgtgttgtacctgttgcgcagcaagaaaaatctgattcgtattgagaattggctgtactggaagcctgattttggtatgatcaaaaatattctccgtatcggaattcccaccggattggaaaacggtatgtttcaaattggaaaaattctggtagccagcctgatcgcttccttcggtactgtaagtattactgccaatgcggtagccaacagcgccagttccctggtttttgtcccggctcaggctattggattgggaatgattacagtagtgggacagtgcgttggtgcagggaattttaaacaggcacagcactatatgctgagtcttacaggtgttgcttatctgtttatgacttccttaaatattttgatgtatttctgtatcaatcctatgctggcgttgtatcagctttcagccgaaaccgctaccattacccgggaaattatggtttggcattgtattgcagccgcaattctgtggccagcagcgtttacacttcccaatgggctcagagcggcgggcgatgttaaatttaccatgatcgtttcggtgttttccatgtggactttccgaatcggatttagttttttgattggaaagtacatgggggttggtgtgttaggcgtatggattgcaatgtttattgactggattttccgtattatcctatttgtctggcgtgttgccagcgggaagtggaaaaatcggcagttggtgtaaaagaactttggccgtgtcggcttactttatatcctgtttgtaggtatgcctgaatttttcctttctgaccgaaaaaaggcagaaaacaatgaataaaactgtatgataaaagcctgctgtttagcaggcttttatcatatacgaaacatgaggagttataattttttgcggtaatagagtttacagcttccgataatcagggcgatgcaataagttgccgttagtaaggtatagaataccgttcgatcaaaataagatgccacaagagtagcaagcgctatggctgccaaggttattaggatgctggaacaggcgcatcggttttgaatatactgatttcgttcattcgtttctgcaatatatagttttcgtatttttcttcgcttctcaaggcatgtgcatattggataacgaaaaataacacaacggctgcaataccagttaccattcccagtgtaaaaccggaagaaagtgtttctcccacactaaaatgcagaacgattgccagcaggggaaccaaacagcagtaaacagagccgatgatcatacgagtttttagctttttttaaagttttccattacgatcctccatttctgaaaaatcaaaaacttcctcaatcgtcattccgaaatattttgcaattttgtaagctaggatcagagaggcagtatatttttccacctccaaggaagtgattgtctgccgggtgaccccaacggcattggccaactcttcttgtgagatccgacgctgttttcgaagctgcgcaatcttcgatttcaaaaaaacgcctcctttttgcaatgctaactttgcaaattcagtatagtacactctgcatataatgtcaagtatactttgcggtttttgatttggatgaaaaaatatactttttctccaaaagcctgtacgaaatgaaatgattttgttatactaaaataaattgatcaaggaggctaaagcaatgaatttgacacaggcgcaaaaagaaaaattaaacgcggaactggatcggtgggtggaaagtcaccgcgaggaatacatcaaggacgtatccgatctttgccggattcgcagcgtatcagaggaaccggtaggcgataaaccctttggcgagggttgttatgaaatgctgatggcatccttcaaattggcggagtcctatggtttccgcaccaaaaactatgataattactgcggcagcgctatttacggagacaatcccaatggggattcgattggaattattgcacatatggatattgtaccggagggcaacggttggacccatgatccctttgagccgaccttatcggaggatggaaaatatctgtttggccgcggcactgccgacgacaaagcgccggcgatggtcggcctttatgccatgcgttttttaaaagagcatgggattaaactgaaaaatgatattatgctggtattcggattaaacgaggaaaaaggaagcgccgatatgccggaatttttgaaaagggaaaaagcgccgaaatggtctttggtaccggattccaaatttccggtgggacatgcggaaatcggttttatccgggcgaagtttgccattccggacttgggagatgaactggtagagatccacggcggtgaagcgaccaactctgttccggatagagcatatgcggtagtttctggctgcacggtagaagaagtccgcggaaaattgggcaatatggagcggatcaccgtagaggaagatgccagaggcgttcgctttttggctaccggtaactcccagcatgcatcccgtcctgcgggtgcagtgaacgcgaataatgtattggcacaggctctcttgaaagcgcaggttctgcatggcaaaaccctggcggcaattgagttgtttgaaaaattgaccagccattactatggagaagacctggggattacctgcgaagatgagatgtccggcaaattaacctgcgtctttacctgggtgcgtaacgaaggtggaaagctgattttaaaaccggatatccgttatcccgttacagcggatcaaaaattcctgatggatacgctgcctcaaactgctgagaagttgggcctggagattctggatttaagcaacaatccggcattcagtttcccgttggatcatccggtggtagagaagttgatcgaagtaccgcgcgaagtgctgggaatgcccgacattccgccgattgttttggccggcggcacctatgccagaagtttacccaatgcggtctcttttggcgtaacggttccggatcgtgtgcgtttgtttggctttgaaaagggcggtgctcatcaggccgacgagtatggcgatatccccaacctgatgcggagcattaaggtttatgtccgtgccttaatcgggattgatgatattgtggcggcgctataaacagctgttaaaaaaatgccctgtatttcatgggaatacagggcattttgtataaaatttgttgcgaataagcagtaaaaatgttataattattctattattctgactctttcacaatgaaaaagcagataaaacaaaatgaggagtgtttttatgctggaagaatttattcatctgatcctacccagtattattgctattatcgagttaattggtatttttgtggttgcggtttcggcagtccagggattttatcattatctgcggggattattcggacataaggatcataacgtcaaattagatttggcaaacggcatggcaaccggcttggaatttaaggttgcatcggaaattttgaaaaccgtgttagtccgtgatctcaatgaactgttggtgcttggatctgttattgtgctgcgggcgctgctggcgttgttgatccattttgagatgaaaaccagcaaggagcatgacggataaatactgcttacataaaaacattgatccgttgaaatcaatgagtcgaaaggaaaagacaaagggggaaagccggtataggtttcctccctttgtcttttcctgcggatatggtatcccaacattttttgacagcatgcctgggcacatgacacatgatatactaaaaaatctgcgttaagttggaggtcaaaatggttcatttgggaattacgctgatagtgggcggcacgattggatttctttttctcaagctgaaggtgcctgggggcatgatggttggggcgttgttggcggtatcaattttaagtgtctgtaccgattttgcttatatgccatcctacgtacgcgtggcggcacagattaccgcaggcgcatttattgcctgtactgtcgagaaaaaggatttgaaacgccttcctcatattatcaaaccggcggcgattttgttgggcggcatgctgggcctgaatttgatcat

SEQ ID NO: 753 - DNA, 3488 bp, Unknown
  16S sequences of unknown bacteria
cattaaagaagcaggcctcaaactgaaagacggcaaaattctcgctcccatgtaggccccggaacggtggcgctgtttttctacggcaacaataaaatattataagtcgacgtttgcggcttgtcataagaaaaagctccctcaaagaatttttgagggagctttgctgttttttaaagattattttttatagagacggcagatcttttcggccgcttcaagcacggattttcttaaactctcggggcgcagaacctcaaccgaatcgccgaagctgacaatatcggcagtcagccccgcgctttgcgccatggacaccttgaatgtgaaacagccgtcggaaagcgctcttatgcgaatgtcgtccccgaatcggtcaaacatctgctccagcatttcgtttttgcatttaagctccaccgtttcggtctttcctccgaaggcgttggagatttttctcgcatagtcggccacgtcaaaggtatttttatattccgaaacctcctcaaagctgcgggagggactgtcggttatttcggccgattttatgcggtcgaggcgaagatgcatgagattgtcgtatttttcgttgtttcctatgagataatagcggtcgtcctcccaaagcagagcataggggctgacggtgaattccttcgactcggtggcgattttacctccccactgagccttgcggcggcggtaggtgcaatggattttcctgctctccgaaatggcccgctgaattttgtctatgttataatatatctcttcgtttttttcctttttgcggttttcgaggaaaagctgcttttttatttcggcgccctgattttcgcttaaagagccgcacagattgtccacaagctcccgactcttgttgcccgtgataaattcggccgacagcacggcgtcgcacagcagccttatttccaccgggtcccaatcccgcgacacgaggtaaaacccgcttttgaccgaacgggtctttaaaatgtcgaggccgaaatcccgaagctcctgtatgtcggagtaaaccgatttacgctcggcaaaaattccccgtttctcaagctcggcaacaatttcgtcggcggtcagcggatgctgttcgtcggtctttttattcaaaatatcggccacatgaagcagcttttgcttttgcgaagaatttcccgccatggtttttcctcctaaaaaagcgaatttcaaaacaaggtttcaaaattcgctcgaataataatcaacagctctaccgcttgaaaacacaaacggcggttttgcaaagtattttaaggtcgagacccaccgaaaaattcatggtgtaatcaaggttgatggccattttgtcggggagaatttcctcgatgtaaaaccgctcgggatcgtcggcgtccttaagcatatcattttcacagctgtatttaaggctcgactgccccgtgacacccgggcgaagcaacagacttgccatcatttccggggtatattcgtcaacatatcgcttgacctcggggcgggtgcccacaaggctcatgtctcccttgagaatgtttatcatttgggggagctcgtcgacgcttgtctttctcagcacatatccgacggaagttatgcgcgggtcgcgccctccgacggttatctgcgcgccctttttgtcggcgtcggtaaccatggttcggaattttattatcttaaagggcttgccgtaaagcccgacgcgctgctgaagataaaaaacggggcccttggagctcaccgcaacggaaacggcggcaacaaggaaaatcggtgaaagcacaacaagcacaataagcgcgaccgcaatgtcgaaaagcctttttaaaaaaagctgaaatctctttttgctcagactttcgaaatagggtctcacttcctcaagccgaaccgcatcggggagacggtcgaattgccgtatcatttaattctcgcctttctatgccttgtgattaaaggtgggaacaagctcccttaccagatcaaacatcacatgaatgtcctcttccttaaccgaggcctcaagctcctttatggttgaggcaagccacgattcgtcaaaggccatgggcttcataatcataatcttcttgtttgaagtgcggtcgacgtcctcgtcggcaaggctgatttcctcaaacagcttttcaccgggacgaaggcccgtatatatgatctttatgtccttgtccggttcaaatcccgaaagacggatcatatcctttgcaaggtcgcttataagcaccggctgacccatatcgagaacgaatatttctccgccctttgccatggctcccgcctcaagcacgagctggcaggcctcgggaatggtcataaaatagcggcgcatttcggggtgggtgactgtgacggggccgccctttgcaatttggtctctgaagaagggcacgacgctgccgtttgagccgagcacgtttccgaaacgcacggcggcaaaatcggtgtcggacacggtgtccatcatctgcatgacaagctcggttatgcgcttggaggcgcccatgatgttggtggggttgaccgccttgtcggtggaaatggttataaactttttaacgccgtgcattatggcaacctgacaaacgttgaccgttcccatgacgttgttctttatggcttctctcggatttatctccatcatggggacgtgtttgtgagccgccgcatgaaacactatttcgggattgaattcgtcaaaaatctcggttattctggctctgtcacgaatggagccgagacggacgacaaatttaccggcgtaattctgcttaaactcgttatcgacaaagaaaagaccgttttcgttgaaatcgacaaccacaagctttttgcagccgaaacgaagcacctgacggcaaatttcgctgcctatcgagcctgcgccgccggtgacaagcacaaccttgtcctttatgaaattttccacaacatccatgttgagggaaacgctgttgcggtggagcagctgttcgagatttatctctctcatgaccatgttttttggctcgctgtccgattcctcgatggttccgaaacggcgggtgcggcaattatgctttttgcatatgtcgagtatgccgagaatggtctcacgctcggccgtgggaatggcgataacgacctgctttacgcccatatttgtaatggtgtcgttgagcttgtcctttccgccgacgattttaactccctcgattttcctgccgtggagggacgcgtcgtcgtccatgagagccacgaccctcatgttcatttcgggatgtccgttgatttttttaagaagataggtgccggtctctcccgcgccgtagataaccacgggatcggcatttttgttgccgaaggacgactccttaagagccgagaagaacctgccgcagccccgcccgacaacggtcagaatgagcagcgacatacctattataatatatgccgtgggcggcaaaaagccg

SEQ ID NO: 754 - DNA, 6070 bp, Unknown
  16S sequences of unknown bacteria
ttcttgatgttgtctttgccggcgatgtctacatggacgagcaccatcgtgtctccggtagatgtcgtgccggaagtggagctgctgctgtcgctcgtgttgtcgatctgaatccactcgctcgtctcgccttcgctcagtgccagcgccgcgttcagcacgctttcatccagcgggatcacatcgcttgcagaagagatccatgatgcggtgttctcatcgatgtagccatagaagccgttggtggtgctgtacacagattcgttgtattcaccagcgacttctgcaaaagatgtgccctcttccagcgccttgttgatggcgtctactttctgctgctcttcatcgctgagggcgcttacatcggatacggaaagctcgagataagaaatgatcatcgggttttccacatcgctcatcagatcatcataatgttcctttacataattgcgctgtatgacgctctccttctgagcgagcatgcagaagcggtacagttcgtcgctgcccagtccatagttctccagcatggagctgatcaggtcttctgcgctggatccataataggatgcgctggactgtgcctgcgagttcaggcttgtctccatctgcttggcagcgctcttcatgtcgtctgtctcttcggtcacggtctgctcgatcacggcgttgcggaaacggtagtagacctgtgaagtcgcgtatttgctcatctctccgtaaagatcgtccgcggtcagatcgtagtcgtcaatggacgcaaccacatccttgccgtccacgctcttgcccccaatattgtctttggtggtgtcccagacatagaaaatcgcaaaaccgcagagaaggactgcgatcagtacgacaaaccagtttttcttcagtatttctaccataagaacctccttcattcccagttgccttactattatattagattccatttgaaaaagcaatttttcgtctgatttcacacaatattcagacgaaaaatgaagcgctttcttccgcacgggcatgataaaaggggcacgagacgtttgaattgaggtttgagatgttttttgctatgattactgcgtcagaaagaaaggatgatgatgaatgagcattctcaccgtcaaagacctgcatgtacaggtagaagataaagagatcctcaaggggctgaacctggaggtaaaggaaggagagacccatgcgctcatggggccaaacggcaatggcaagtccaccctgttggccgcgatcatgggcaatccgaaatacacggtcaccgcaggagagatcctgctggatggcagagatgtcttatccatggaggtggatgagcgcagcaaggccggactgtttctggggatgcagtatcccagtgagatcagcggcgtgacgaattcagattttctgcgcacggccatcaacgcgcgccgggagacgccgatcccgctgtttcagttcatccgcaagatggagaagaccatttccgcgctgcagatgaaggaggatctggcgcaccgctttctcaatgagggcttttccggcggtgaaaaaaagcgcaacgagatcatccagatgatcttgctggagcctgccgtcgccatgcttgatgagatcgattccggcctggatgtggatgcgctcaaggtcgtggccaacgctgtgctcgatctgcagcagcgcacgaagatggggctgatcgtcgtctctcactatgcgcgcttctatgaatatatcaagccgacccacgcccatgtgctgatggacggccgcatcgtggtgagcggaggaacggagctgatcgaaaagatcgacagcgaaggctatgagtgggtagaagagacataccatgtgtctgccgcaaaggagccggaaaagaaagtagaactgctgggcagctgcggcgcgcagcgcggtgagtgatatggaacgagtgtttgcgcatcatgtggatgagctgcaggagctgcggcaggagagcgaacagcttcagctcagctttgcgccgcagacctccggcacgctcgtgctgcgtctgcaggaagaggtgcgcctgctcgatctgacgatccatgcagaggatgacagcgagatctgcgtcttcctggatatccgctgcgcgcatgagctgaagctgacgcagcatgttcacgccgggcgcgatgcgcaggtgaagatcggcatcctcgatctggaagaggcagccgcagattatgacctgcacgcagagcttgaccgatccggggcgcgggtggagatccataccgccacgctggtcagcgcagataagaaatggcgcatggagatcgtgcacgcgcatccgcatacttatggatatatggagaacttctgcgtcgtgaaggatgacgcgcgctgccaggtggaggccatcggcagcatccgcaagggcgcatatggcagcgagagccaccagaagacccgcatcctcacgatgagcgcgcatcatcacgccgaggccgtgccggtgctctgcatcgatgagcatgacgtgaaggcttcgcatgcgatgacgctgggacagcctgatgaggaacagctgtattacctgcagacacgcggattgagcaaggaacaggcgctcggcctgctgtcggtgggctacttcatgccggtagctgatctgctcgcgcatagcgagatgcatgcgcaaatacaatatagagtggaagaaaaggtgggactctatgatcacagaagcagtacgagatgactttccgatcctgaagcgcgagatgatgggacacccgctgatctatttggacagcggcgccaccgccttgaagccgcagtgcgtgatcgatgccgtgagcgagtattacgctgtgctgggggccaacgcgcaccgcggggattatgcgctcagcgcggaggtggaccgccgctttgaagaggcgagagcggccgtcgccgcttttctgcatgcggccgacagccgggagatcgtgttcaccgccggcagcagcgcttcgctcaatcagatcgcctcaggctatgtgcgccccaggctgaaggaaggggacgtcatcctcagcgatgtggcggagcatgccagcagcgtgctgcccttcatgcgcgcggcgcgggaaacaggcgcgcgcatggaatatatcgaactggatgagcatgggcgcatcacgatggaaaatgtccgaaaggccatccatgatcgtgtgcgcttcatcgtcatcgcgcagatcagcaatgtgctgggccagatcgcgccggtgcaggacatctgcgcgctggctcatgcgcagggcatcgaggtcatcgtggatggcgcgcagtctgcgccgcatctgcccgtcgatgtgcagcagatggactgcgatttcttcgtgttcagcgcccataagctgtgcggccctaccggcgtcggcgtcctgtatggaaagaagcggctgctcgatgcctgcgaaccgctgtatctggggggcggaagcaacgcccgcttcgatgcctgcggcaatctgcagctcaaagagacgccgttcaagtttgagagcgggaccccgcccatcgagggcgtgctgggcatgaaggcggccatcgattatctgcaggcactgggcatggcggacatccatgcgcacgaacagcagctgcgcgccgacatgatcgccggcatgaagcagatggaccatgtcatcctctataatgaagaggcagacagcggcatcgtcaccttcaatgtgaagaatgtgttcgcgcaggacgcagccagctggttcaatgccaacggcatcgcgctgcgcagcggccagcactgcgccaagctgctcgttgagtttttaggcacgtccgcgacgctgcgggccagcctgtatgtctataatacgaaggcggaggtcacgcgcttcctggaagtgctcagggaatgcacgatggaaaactgcctgaatatctttttctgaaggaggggatgacatgtcagacatgatgaaagatccgatggtgctgcggcagatcatcatggatcattatcagtatccacgcaatcatcagctgagcgaggaagaaggctatgtgcagcggcatatggcctcggattcctgcatagacgatatctatgtgcagggcaaggtggaagacggggtggtgaaggatatccgtttcgacggagaggcctgcaccatctccaccgcctccacctccatcatgagcgagctggtgaaaggaaagcgcgtggatgaagcgcgcaagatcatggacaactactttgccatggtcgatcagaaggaatatgacgaggatctgctggaggaagccgtcgcattcgcaaacgtggggcggcaggccaaccgcatcaactgcgccaccatcggctggcgggcgctgcgtgagatcctcgatgaaagtgaaggaaaaacagatgagcaagaataagatcgaactgcaggatacctatgcttatggctttcatgatcaggatgtcagcgtttatcggacccgcaaggggcttgacgcgcaggtggtggagaccatctcccgcatcaagcaggagccggactggatgcgcgagctgcgcctgaaggcctatgacagcttcgtgaagcagaagaacccggactggggtccggacctcagcggcattgactttgacgaatatacttactacatcaagccgagcgaaaaacaaggaaaagactgggatgaggtgccggagacgatcaaggatacgtttgaccgcctgggcatcccggaggcagaagccaagtatctggccggcgtctccacgcagtatgaatcagaagtggtctatcacaacatgctggaggaagtgcaggaaaaaggcgtcatcttcttagataccgatacggcgctgcgggagcatcctgatctggtaaagaaatacttcggcaccctggtgccgtattcggacaataagtacgcggcgctcaacacggcggtgtggagcggaggatcgttcatctatgtgcctaagggcgtgaagctggagaagccgcttcagtcttatttccgcatcaacagcatgcagatgggacagtttgaacgtacgctgatcatcgtggatgagggcgcagatgtgcattatgtcgaaggctgcaccgcgccggtgtattccaaggattcgctgcatgcggccatcgtggagatcttcgtgcaccgcaatgcgcgctgccgctattccacggtgcagaactggtcagacaacatcatcaacctggtgaccaagcgggccaaggtgatgggcaacggcgccatggagtggatcgacggcaacatcggttcaaggctgaacatgaagtatccggcctgcatcctggcggaagagggcgcaaagggaacgatggtgtccatcgcggtcgccgggcgcgggcagatccaggatgcgggcgccaagatgatccatctggtgccgcgcaccaccagcaacatcatttccaagtctgtggccagatgcggcggagagaccaactaccgcgacatcatctatcatgcgccgggggcggatcatgcccgcagcaagatcgaatgcgatacgctgatcctggatcgggaatcacgcagcgatacgattccgatcaaccgctcgaagaaccgcagctcgcagatcgagcatgaggcgaccgtgtccaatgtcagcgaagaacagctgttctatctgatgtcgcgcggcttgtcgcgtgagcaggcgacggagatgatcgtcatgggcttcctggagccgtttacgcgctgccgatggagtatgcggtggagctcaaccagctgctcaagctggatatgagcgattccattggatagccaggcacagcgcgcatccgcgctggccctgcgccgcgccatgtcatgcgcgcagcgaaaggaagcagaacgaaggatcatcgcgcggctgctgccgcggctgcaagatgccgcctgcatcggcatgtatatggcgcagggcagcgaggtctcattagatgcgctgctcgctctgctgccgaaaaagacgcttgcggcgccggtctgtgcggcaggcgggatcatgcgctttcatgagatcatggaccctgatcgctttgcgctgtccgcgatgaagatccgc

SEQ ID NO: 755 - DNA, 14491 bp, Unknown
  16S sequences of unknown bacteria
caccgacgccgaaatcctttcctatcttaagggcaaggaattttcggtggacaaaatatggtttgtcgaggaatttagacagatgtaagttccaaaagccgctgctcggaaatgatttcgattccgaggctctgagccttttggagcttgcttccagccgcctctccggccaaaacatagcttgtttttttggaaaccgacgaggaaacctttcctccgcaattttctatgatttcggttgcctgtgctcggctgagcgtgggcaaggttcccgtcagcacaaaggtcttgccctcgaaaacgctgttgccgctcttttccttggattttaaattaagtccggcttgcttgaatttttccaaaagctcctttgtaccgtcgagggcgaaaaactcagcggcgctttgagccattatctctccgaaaccgtcaattttcataaaatcgtctttgcttgcttttgcaatgctttccatgccgtcaaagctcgattcgatgagcttggcggctttttcgcctatatggcgtattccgaggccgaaaatcagcctccaaagctcgtttttcttggaatttttaatggcatttataaggtttgcggcagatttctcgcccatacgttcaatatcggcaatctgctcggctttcaaatcatatatgtcggagggcttttttataagacccttgccgaccagctgaataacaaccgcttctcccagtccctcgatgtccattgcaccgcgggaagaaaaatgaatgagatttcttacaagctgagcgggacattcgggattgacgcacctgacggcaacctcgccttcgtcttttacaacgctttccccgcaagagggacatttgtcgggcatttcaaagggctttgaaccctcaatgtggcacaccgagcacacaatttcgggaattatatctcccgcctttctcacctcaatggtgtcgcctattcttatatccttttcggcaatatagtcggcattgtgcaaaaccgcacgggaaaccgtcgacccggcaagcagcattggctcgaaaacggccgtgggagtgagtacgcccgttcttccgacacttacatcaatgtcggtgagcaccgtgcttttctgctcgggaggatatttataggcaatagcccattttggaaatttggaggtgctgccgagctttcggcgcatggcaaaatcatcgacctttacaacggctccgtcaatgtcaaaggcaagagagcctctgctttggccgattttttcgatttcggctattgcctcctcaatatcggcgcacttaatataagagggcaaaacatgaagcccttgagatttcatatagtcgagcgaggcgatgtgggactcaaactgcacccctccgaccttttgctgaatattaaaaagaaaaatgtcaagattacgcgttgccgttacggcggaatttttctgtctcaatgccccggctgcggcattacgcggattttttgcgggcttttctcccataagctcctggtgctccacaagctgctcaaagcttgtatggggcatataaacttcgcctctgacctcaagaaaatcaatgggcgtgttaagatgagcgggaatagacttaaccgtttttaaattatcggtaacatcctctcccgtcacaccgtcgccacgcgtcgaacctctcacaaaggttccgttcacatattcgagagaaaccgaaagaccgtctattttcggttcaacgctgtaaacgggattttccgccgtttccctcacccgtctgtcaaaatcgcgaagttcgtcaaaggaaaaggcgtcctgaaggctttccatcttcaccttatgctcaaccggcgaaaaaagctttgacgctttcccccctacctttgcggtgggagattcgggacttttaagtttcggaaactcatcctcaagcgtttcaagctcgcggagcatcatatcatattcataatcctcaatttcgggactgtcgtcaacataatatttcctgctgtgatattcaagaagctttctgagctcgtttattcttttttctgcgtcggtaaaattcatactaaatcctcacaagaataattaaaagaaaaaggcacccgaatctttaaatcaagatccgacgggtgccttttggtgctggtggccggggtcgaaccggcacgaggttgccctcatgggattttaagtcccaggcgtctgcctattccgccacaccagcgtataatcgggaaaatacgacctaatgattatactttcccgaaagaacaatgtcaagaaaaacttaagacacgtcggcaattacttcatattttccgctgatccaacatccgcccgaggaaacgctcagggtgggatttaccgacgacgaaccggtctgaatcagctcggaggcatttatggaaatgtgaatattgcttaccgtgagattcttaacctccgaatagggtccgataaccgtcactcccttaagagccgttttgaccgaaatggttttcccctccggcaccgaggtcaccgaaatgttgtcggcgggaatgtcaaaggacttggatgtaaagcttgagcggtcgatgttgacctcaaaataaacatttgaaaccttggtataatcgtagtaggtcacgccgcttattttgggaagggtcaacttaaagttaaatgtcgtcgcgtcgtcataatttatcgtcgaaaaatcaatgggatcgtccaacgttatattttcaatttgagaaataacatcgggagcgcccttaattccgatttgggaaacctgccgttcggtggaggtgtcgctgcccgtcacctcgtatataacaagctcgggcaaattctgcggcgcgttcttgacgtcgacattaagcggaacggtctttctcatgcggacgttggccgagacagaaacggtgttcgccttgggctttgtatatttaagaatgttgtcgttggagtagggattatagagaacgttgccgtccttatcatacatgaatattcccgcgtcgtaggtttcggtttcggtcaaaaccttgttgacattggcgactgccctcaccgacgctatctttttgatttcggtttcgggacccacaaggtcgattaccttgtcggattcgtcggtaaactcgggctcaagaagcatggcggtgttttcggtctgaagattttcaacgctcgctcccacacagtcgatggcaagctcgaaggtggtttcgcttttggcgtcaaggtataccgaaacgctcgacggctccaccgaaacgatttcataatcgctgttggaagaattctttttggccgaaagagaaaggttgtattcgcccgcctttgtgaccgactcggtatttgccgaaacggtcagcgaatttgcgtcgagacgctcgaccatgtatttcttgcctctgacggcaaccttgaccgtcgtattttcgttaccgaacaccgacatgggaacggcgccgtcaaccgaggaaagcgaaatttccaccggcacatcggagataacgcggtcgacctgaggactgtaggttatggaaataaagagccatattatcagcgcaataacaaaagacagggcgagaagaaatttgttgttggcaagcagtttgttaaatttgttcatttaaaccaccccatacgcttgaaaggatttttgctttttttgcccgcgtcggccgactctactccagaaatggaattttcaagctcggtcttaagggtgatggcgtcgaaatcacgtttgagatttcccttgcttgccaccgaaatggttcccgtctcctccgaaaccacaacaacggttgcatcggaattttccgacataccgattgcggcgcggtgacgtgtacccaaagcaagtgaaatattcgtattcttggtaagcggcaaaatacaggcggccgaatgaattcttccgtcgcgaattaccacggcgccgtcgtgaagaggcgctttgggataaaatatattttcaagcatttcacgggagacaattgcgtcaaccgagcttccgctttccacaacgtcgtttaaaatcgtcttgttttcaaaaactatgagaacgcccacctttgccgacgacatggaaacgcaggccttacatacctcttcaatgcttctgcgtatgctttcctgcgcctcttcgtcggaaagagtccgaccgagagagctgagcttgttgcgcccaagctgctcgagcacatggcgaagctcgggctggaacagaacaattagggcgagaattcccacgctccaaaccgtttgcagaatgaccttcatcatggtcatatcaagaagatttaccagaagatcgatgagtacaagaaaaacaattcccttgagcagctgacccgcgtgggtctctcttacaagctgaattgctttatatataaggaaggtaagaatgagtatatcaagcacatccccaaaggaaattcccttgagaacgccgaagatattataaaacacttccgaaattccgtttaataaatgagtcattgttttctccgaatttataattttaaaaagcacggcatttttgggcagaaaaaacattttttcataccgcagccacgataacacatttgtaatatacatatattttaacactaattttcaatataatcaataccaaaaaaagaaataaaattatatatttttaatattttttgtaaacaaagcaacctcatcggggcggttaaaaaccgaaaaactcaccctcaccgttccgttctttagggttccgagacttttgtgagcaaggggcgaacagtgaagacccgcgcgcacggcaaatccgcggcgggaaagctcggcggcaagttcctccgagcgggtgtctgaaagattaaaactgacgacgggagcggtagttgttttttccgggtcttccccgtaaagaattactccggggattttaccgagttctcggtaaagcatggaggcgagcttcttttcgtgagaaaaaatacgttcgacttctcttgccttcacaaagtcaattcccgccgaaacaccggcaattccgggtaaattcagcgtgccgctttcaagtctttcgggaaggtcgtcgggctggtaaagagtgtgtgaaaaatttcccgtacctccctcggtcaaagtccccgaaagttctccgccgcaaagcagcgcgccggttcccatgggcgcataaaggcccttgtgcccgggaaggcaaagaaagtctatacaatccctttcggtgtttatgtcaagcacccgccgattgggcggcgtcgacgcaaaagggaattttcttttttctgcaaagtctgcctatttttccgacaggcaaaatacacccgcacacattcgaggcatgggtgcataccacaagccttgtccgctcgttcataagactttcaaaggactctaccgtcctcttttcgtcataaaaatatacctttgcaacctttgttattacccccttctttttaagcgaaaaaagagggcgggaaacggaattatgctcgaaggaggaaataatgacctcgcagttttcaagttcaagaccttttattacggtattcaaagcctcggtgcaatttttggtaaaaacaattctttcgggatttgcaaagccgaaaaaatccgccagcttttgccgacaggcatacaccgtatcggccgccttgaccgaaagggtgtgcccgcttcttcccgggtttgccgaaagagccgacatggcgtaatccgccgccttaatgaccgagagcggtttgggcgacgttgtggcggcattgtcaaaatatatcatatcaacgaccgccgcttcttccgagaatttttattcccgcatctttaagaatttgctcggcagcgtcggcatctccgctgacatatatgctgtaaccgcagcccgccgtatcaagatttccaggtgttctttcgatatatgccttgaagccttttccgcgcaaaagctctctgcccttgatggcataggtaatggagctgaccattataagctgttttttcatttgtctcacctcgtatcaatatcattctatgtcaaggtcagacaaaggggaattttaatttttgaaaatacagcaaacggcgtgagcggcaatgccctctccccgtccggtaaatccgaggtgctcctcggtggtggcttttatatttactttatcgtcaccgcagcctatacagtcggcaacggtctttttcatcaaatctatgtaaggagcaagcttcggcgcctgagcgatcacggtcgcatcgacgtttgaaatttcatatcccatattatacatacgatttgcggtatctttaagcagaattttgctgtcgatatttaaaaatctgtcgtcgttatcgggataaagctttcctatatcgccgagacccagcgcgccgataacggcgtcgcaaatggcatgaataagcacatccgcgtcggaatgtccgtcaagccctttttcccacggaatttccactccgccgagcatcagctttcggttttcggcaaaaacatgaacgtcatatccgtgtcccactctaatcaccgattttcctcctttcaagtatcgtcctcgcaatttcaaggtcgtccggggtagttatttttatgttttcatagctcccgtcggttaaaaagacgtcaaaccccgcgaattccataacagaacagtcgtcggtaaattcctcgtcggaattttccgccttttcaagagcctttttatagagccttgaatcaaaaacctgaggagtctgcacggcatagagaaaatcacgctttggggtttccaccacgcgtttttccacattgaccctcttaaccgtgtccttgaccttcacggccggagcggcgccgccggtttccttggcacgaaaaacggcgtcggcaataatttcatcggtaacaaggggtcttgccccgtcgtgaattgcaaaaaagctgatgtcgggtgaacaggcctttacaccgtttacaaccgactcaaatctgttttttcctccctcgacgacagccgtcaccttggatatttcatacctgtcgcagagattttgaatatcggcaacgctgtcctttttaccgacgacaacaatgtctcggatatgcggacagccgtcaaagaccgatagagtccttgcaagcacgggaacgccaagcaagtcggcaaattgcttatctcctttgaatctttcgcccgaccctgccgcaactacaacggccgcaacctgcgactcgatttcgtccacaaatgaataatcaagctcaaaatcggttaatactcccattttagcgtcgtttctcccttttaatcgtttttgtaagtgtaaatttcatattttccgccgccgtatattgccgcagaaagacttgaatcgtcaaaagtatagtaatatttacagccgtgtttctcaagacgggaaagcacttgatcggtcggatgaccgtagctgttatatccgaaggaaagcaccgcagccgacggagtcgttttgtcaagaaacctttcgccggttccgtacttgctgccgtggtgtccgaccgcaagaatgtcggtatcaagatcaaacccttcgtttaaaagcatattttcttcggtgaatccgttgtcacccataaaaagcgttctcacaccgcaaaactcggccaaaaatgcgagactgcaattttcatcttggccgtatgccttttcaggtacaaaaaccgtgatttttccgctgcccaaagcaaacccgtcaagacttttcggaacaacaaggttaacgttataacgtgctgcggcgtctttgacagagtcgaaatattcttcggcctcctgaccgtaaaccctgtcggacaaaacgacattttcaatcggaatttttccgaaaagaccgagcagaccgcccacatggtcgctgtggcaatgggtaataaaaacgtatttgacgctgcctgcgcccttatttttaagtttgttatatgcctctattcctccgccggattcaaggcccgtgtcgacaagagcatattctccgccgcttgaaacaagagtgcaggaaccctgccccacatcgagaaaatcaatgaccgctgctgcgccgtccttgctgtttgcaaggccgaaggcgcgggaaaagctctgcctcagaggcgctcctccgacggcaaaacaaaccgaaagaacagcaaggcaaaaaatcacaaggcagacggttaccgtctttttccttttgagccttttctgttcgccgtagaccgttctgagatccattgatggcttacctttcttttgttatttttcatgtttttcgaggagacctgcttctttttcccgcccttttccgagaaagtccgttcatttttatcgggcggaacaagacacttttcgccgtatccgataagttcggaccggccggcaattttcaaagcctttctgacaatgtcatagttttccggcttaaaatattgaagaagggcgcgctgcattttcttttcttcgcgggttttgggcacaaaaaccggctccattgtataggggtcaagctcggtgtaaaacatggcggtggaaatcgttcccggagtgggataaaaatcctgaacctgctgcgggtgtatgtgctcacgcttcagaaaaagagcaagctctattgcgtctttcagcgtacttcccgggtgagaagacatgagataaggtacaagatactgcttaaggccctcgttcctgttgaattcgtcatattttttcttaaaacgaatatagctttcaatgtgcggcttgcccattttgtcaagcacggcggcggagcaatgctcgggagcgaccttaagctgtccgcttatgtgatatttgacaagctctctgaaaaattcttcgtcgctgtcctcgagcagaaaatcaaatcttatgcccgaacggataaagaccttttttatgccctttatgtttctcatgctgcggagaatgtcgaggtattccctgtggtcggccacaagatttttacatggcgctggtgcaagacattttctgcccttgcaaaggccctgtttaagctgtaaatcgcaggaagggcggcggaaatttgccgtggggccgcccacatcgtggatatatcccttgaaatgcggattttttgtcagctcttcggcctctttgagcaccgactgcttacttcggcaggtaataaatcggccttgatgaaaggcaagagagcagaaattgcaggcaccgaagcagccgcgattgtgagttatggaaaactccacctctttaatggcgggaacccctccctcgctttcataaatcggatggtaatatctcatataaggcagctcatacaccctgtcaagctcgggctgagtgagcggaggcatgggtggattttgcacgagaaatctgtcgccgtgcttttgaacaagcattttgcctcttatgtggtcggcctcgtcaagctcgattctcgcggccttggcatactcccttttttcgtctctcacctgctcaaatgagggaacaaacttgccggcgatcggtttatcggaaagatagcaggttccctttatgtcggtcatgctctttatgtcctcgccatttcgcagacggttgacgatttcaacggtttggttttcgcccattccgtaaatgagaatatcggcgccgctttcgacaagtatcgacggcctgaccctatcgtcccaatagtcgtaatttgcaaaacggcggagcgatgcctcaagcccgccgataacaatgggcacatcgggatatatttctctgacctttttgcaatagaccgtgacggcgcgatcggggcgttttccggccttgttgcccgccgaataggcgtcgtcgctgcggcgtttttttgcagcggtatagtgagccaccatggaatctatatttcccgaatttatcataaaggcatatttcgggcggccgaaacgtttgaaatcggtatcggttttccagttcggctgagccagaattccaaccctgaagccctcggcctcgataacgcgggaaataatggcggttccgaatgtcggatgatccacataggcgtccccggttatgacgacaaaatcaagctcgtcccagccccgcttttccatgtcctctttgtttatgggtaaaaaatctttaatcataattcctctttaacagcaaatgggttgtaaggaaacaagccaaacaacccatataaaatcattcttcgtcaaacggcggctcgtcggtttcggcctcgggtacagccccctgctcggcagagtcgtttccgttcattttcatttccatatagcgttgcttggaaatcagcacctttcggggctttgaaccctcaaaaggaccgacaattcccttttcctccatcatgtcaatgattcgggcggctcgggcatatccgagtttcagctttctctggagcagcgacgttgaagccattcccgcttccacaaccgtttcgatggcggcaggaagcatttcgtcgccgtcgtcggattcgtcggaaattcctccgctctttttgccctttccgctttcaacggcctgacgctcgatttcctcggaaatttcctcgctgtactgcgccgagttgtcgtcggcggttatatattccactacgtccttaatctccttgtcggagacccaacagccctgcacacgcagaggcttcgcaagaccaacgggatagaaaagcatatcgccctttccgagcagcttttcggctcccaccgtgtcgataatggtgcccgaatcaaaacggtttgcaaccttgagggcaatacggctgggcacgttggccttgataagaccggtcagcacgtcaaccgacgggcgctgagtcgctatgacaaggttcatgccggcggctctcgccttttgtgcaagacggcaaatggagtcctcaacctcgcccggcgccaccatcataaggtcgttaagctcgtcaaccacaataagtatctgcggcatggtgtccattttcggattgattctcgcaaggtcgttatatgacttgatatctctgaccttatgctctccgaaaagcttatatcttttttccatttcggtaactgcccagcccagcgctcccgccgcctttttggggtcggtcacaacggggacaagcaaatgaggaagtccgtcataaacctcaagctcgacgaccttcgggtcaatcataagcattttgacctcttcgggagaggatttgaaaagaatgcttaaaatgaagctgttaatacacacggattttcccgagccggtggttcccgctataagcaaatggggcattttcgcgaggtcggccgtaatcacgtttcccgcaatgtcttttccgaccgcaacggtcaggcggcttttggcgtcctcaaattttttggaaccgataatttctctcagccgcaccgacgcagtcgttttgttgggcacctctattcccacggcagccttgccaggaatgggagcctcgattctcacgccgaccgtggcaagattaagcgcaatgtcgtccgaaagattggtgattttgcttattttaactcctgcggccggctgaagctcatatctcgtaaccgacggtccgcggcttatgtttataattcttgtttcgacgccgaagcttttaagggtatccacaagcagctcggcgttttgcttaagctcgtcgccgatgtcgaccccgtcgccggaagtaccctcctcaagcagcgaaagaggcggataacggtattccttggcagattcggtctccacggtaattcccgttttgtcgtcgggaaggctctctgccgccttttcggcttttttctccggctttttctcgacagccgcctttttttgctcatgcaccgccgtctgcctgtcgtttaccgcgtcttttattatgtcctcaagagcctttggctgctcaagctgctgctcgcggggctgctcttgcggttgttcctcggacactggcgcatggctttcggggctttgcccgtgaaaaccctcaagagaaatatcatagtcggcgggtttctttttgacattttcgatttggggcatcgacgcccttttctccgcacgctgttcctctctgatcttctgctcgtctataaaacggcgggtattgttctttattttatcggccgagcccgaaaaaacctcggcaatttgcttaaatgaaattcccgccacaaagaggaagatgatgacaagcagcaaaataataataatcgcggctcccgccttactgaaaacacaggctgcgggatagctcaaaattcctccgagcaacccgccgcccgaaacacctttgccgtagcacgccgtgagaaaatcgccgtaggaaaggctcgggtcatatgaaaagacgttaaaaacagcagaaaaaagatagataaatattccttcaaaaacgacccgtacatttgtactgctgtcgaatttatcgattgcgactctcagactcgtatagccggaaagcgcaaatgcggggaatgcggcaaagccgaaaactccgagaataaagccgtgaatcgtcgcccaaaagctctcaagctttaaaaccgaaaaaagcataagcaaaacggataccacaaaaacggcttcggccttaaaccgaaacccgttattcttctttgcggtgttttttttatttttgcttttcgccgatgtttttttctttgacgacattattcttatacctctttataatttatcaggcgatatagcccactccgaatattccgagcacaagcgtcaaaacgccgattgcaaggcaataatatccgaaaagcttatatctgtccttgcggataagccattgaatgagctttatggcggcaatgcccgatacgagcgccgcaataattccggcaatcagagggcctgtctgcacgcttattcccgcgcttacagcatccttgccctcactcagagccgaggcgataataacgggaatactcatgatgaaggaatattccaccatatattcgcggttaagtccgcaaaggagtccggcacaaaccgtcgaaccggaacgggaaattcccgaaatcgtggcaacgcactgtgcgccgccgattatgagtgcgtccttgaccttggctccgtttcttgtctttttatatgtatttgaaatcttaaaggtcatcacaaggaaaactccggttataataaaggcaaaaccgagaggcacaatgctttttgaattgttgatagcctcggccccgtccttcagcgaatatcctccgaaaacaggaagaaccattatgagaagcatggccgtggaaatgattatcataaccatcatgcgacggtaacggttcattcccttaaagctgaattttcccgtaaaaatatctctgaccgagaaaacaaattcctttataagcttccatataaccttgtaatacacaatgaaaacggcggcaagcgttcccacatgcatcattacggttataaaaagattgttgttcgggtcaagcccgaaaagatgctgaaaaaggcttaaatggccgctgctggaaatgggaagaaactcggcgagtccctgaacgattcccaaaaaaagtccctgtaaaaatgacattagatattctccctttcaatcaaatcataaagacatcccaccgcgtccttaaggcttccgattttgtcaataagcccttccttcacggcttgacgtccgtcaagcattgttcccacatcactgaccagttggccgtttcgggtcatcagccaattgaatctcttggcggaaatgtttgaatttctgaccacaaagtcggttattctttcctgcattttcagaaaaacgtcaaggctttccctcactccgagcaccattccgttcattctcacgggatgaaccgtcatggtagccgtcggaacaataaaggagcaatcggccgaaacggcaaggggcaccccaatggaatgtcctcctccgagcacaagagaaaccgtgggctttttcattccgcatataagctcggaaattgcaagacccgcttcaacatcgcctccgacggtgtttaatataatcaaaagtccctttatctcgggcgactcctcgacggcgataagctgcggaattatctgttcgtattttgtggattttgtccccgcgggaaggcagtagtgaccctcaatctgccctataacggtcagactgtgaaaaatatgctttccgtgggccgtaacggcagaaagttgtctacactccgccgcaccttccgaattctcatcattttgagaaggattttccccctcgggtacggttatttgcggttcatcgttttcaataaacaaggcaagcgctccttttgcggtttgccattattatttgcagcgattacaaagattatatgcccgcaaaattatttctatcattatatcacggttttaattttttaacaaccgcaaaatatcaattattataaaaaattcatcttgacattcgctccgcttttggttataatcattgagcaaacatattcgggggcgtagctcagctgggagagcgtacggttcgcatccgtaagg

SEQ ID NO: 756 - DNA, 21217 bp, Unknown
  16S sequences of unknown bacteria
aggtatttcatcgttgatatttgtgataatttcgccaaccttctcataatagcagttatcatcacctttgtagatgtaactatcaacgtatttcttgccgagttgagctttcttttcatcacggattcgctttaacaattcgcttgcaggtgcgtcgttttcgtcttgtggaacgagttttccttgtatagcatactgtaaaatggactttttaagcttgtcatatatctcaccgtcaagttttgttttttgttgttccaacttatcatactcggtaataagaggctcgtatttttctatttcagcaacaatacgttgctgttcggcaaacggcggcaatccaaataacattgaactcataaattcattgtttgttttgattaaaactcttatgattgcttgtttaatatctaaaaatttatcagaatggacagtaaaactagcatagataggaatggactcaattcgtttttcttgcatacacaagttttctagaaaagcaattatttcagtggtttctttttcaacataaatttttgaagttttagacttactacaataaagtattattgcagcgccattttggaaaataaattttgttccatgttgaattgatgtttctttgagaataataatacccgcagtactcaaagcatcctttagtttacttatgccaattgcttcttcataacaatattcatacgtttttcccataatcattctccttatcttaatagctatttctaggttcaagccttttaagcatttaatcctttcgtaatctccataaagaattccgtactccaaatgttcaacttggttttatctttgataaaggggattacgtcttgtttggcttgttcgtagtcgattgcggcgaagcgttcgttcagcatggaaatcagagcttcgcaggtaaggttaaaatccttatcgataaatccggagtccacgagccttgcctttaggtgcggcatattgaccgcaacgtttcgcgagagatagaaaatatagtcgtacaagtccctgcctttgacacgggttttccacgcacggcagatgacggcgtggagtttgcccgcaaacagtgatggcatatcgtacagttttacttgatagggcgacggcagcaatcggtacttgttttcaaacgtcgcaaaagcagggggattagtatcgacctcgaacttgattttaattacctcggacggattgattttcgtcgcgttctgttcgtctttgtaaacgcttaaaatatgttccttggtgttgcctttcaggaaagccgatttgatattggagtctgctgtcttgaccttttcttccaccttgaaattcagtccgacggcatgcagttcgctctccaaaaccgagaaatattttttcagttcaaaatcggcgtcgggcgctattagcgaaaagtctaagtcttcggaaaatcggtcaagtccataaaagatacgtaatgccgttccaccgtaaaacgcggcgtctttgaaaaatcctgcgcgtgaaagtccgcatagtgcgacttcctgtatgacttcggtcagtgcgttcttttcgtcgctttgcgactgcgtgggatatagggcaagcatttggcttaaaattgtctgcatttattttcctccgtcgatcagctttgcaagatatttatgattagtcgatttgtaaagcggcgcaagctgtctgatgtcgtccaagttcaactgccaaaagtcgctctcatcgacgcgcaaatcgtcgaacagtaacacccgcattgccttgattgaacctacgggtgatatggtgtacagtttgtcgcacagcgctttttcaggcgtggcgatctgataggaataaccgttttcttcacgaattttcacgcctaaattgtagacggcggcagggacgtccctgtatatgaatacgccgaatgcgttgtcgtactgctttgctttgcctttacggaacgttgcggacgtgtaagtccggaaaatcgcttcgggaatcagtgaacacatcgacagcacataatcgaaagaaagataagacggaccgtagattgcgcccgcaagatatttgccgtccgcacgcgcgtcggtttcgtataaccctcgcgtgatttgcgtcaatcgcccggattgtacttcgcggcgtatcttccctttcacgtcggtgtaatccttgaattgtaatgctaaactgtcaaacgttaaaaccattgttttctcctattggttttattatatcaaacttttcggcgaaaatcaatacctttggggaaatttgttataaatatttcgataaaatgtaagaattgagatgctatcgggatattgacgcctttgcattcggtaaatttaggacaacgaacaattttttctttgtttttgttttcctaaaacacgctgcaatccaatcggctgatactcatcaagaacgccctgaaactgttcgaaacggtctaaaaaatctaaaatggtggtaaatggtagtaaatgcggcgaaaaaccgttactaccatttttctttgaattgtggtcaaataataaaaaaacggcggaaaggcacaagatattgtgtctttttcgccgtttttatctttttagaacactttctctttttgcggtagagcacgtccttggtaaggacgaggtcgcgggttcaaatcccgctaacagctccaaaaagcgcctatcgaaccgataggcgctttttcatcttaccattagtataaaataccgcgggaaaaaaattgtttgaaaaggttgccattcctcttgttttatggtaaaatgtaaacacttacttttatagtaacaggaggaaattcatatgaataaaagtgatttcatcgcaaaacttgccgaagataccgctatgaaaaagagcgatgcggaaaagtttctggacgcgttcgttgcgaacgtcaaagagattctgatcagcggcgacaaattgcaactcgtcgggttcggcacgttcgagacgaaagagcgcagcgaaaaagagggcgtaaatcctgctacgggtgaaaagattaccattgcagcctgcaaagttcccgctttcaagcccgggaaaatttttaaagaagaactcaatcgctgaaacctgtaaaaaaatgaaaaaccgccgcaacggtggtttttttcatgtggcgggaaaatgatttgacagaaccgtgacaaaaaaactataatattgccaaggaaaacgcgcgcggaatcggcgcggcgggagtatttatgatcgagctcaaaaatgtgtgctattccgtcaaggacgagaggacgggagaaaaacagacgattctggaaaacgtaaatctgacttttcccgaaaagagcattaccgtcatcacgggcccgaacgggagcggtaaatccaccctcatcaaattgctgatgggcatcgaaaagccgacttcgggtaaaatatatttcggaaacgaagaaattcaaaacaaaactattaccgaacgcgcgaaactcggctttacgatcgcatttcagcagcccgtacgtttcaagggcatcaccgtaaaaaaacttctcgacgttgcgagcggcaaaaaactgacgcagaacgaactgtgcgactgcctctccgttgtggggctctgcgcgcgcaattatatcgaccgcaccgtagacggcacactgtcgggcggggaactcaaacgcatcgaacttgccatgaccatcgccaagggcggcgaggtgtttttgctggacgagccagaagcgggcatcgatctctggagtttcgaagatctcgtgaccttattcaaaaaattgcacgacaagacggtcatcatcgtcagccatcagaaccgtattttggaaaccgcggataaaatagtgctgttcgagggcgataaaactttcctcgagggcgggcgcgacgaaattttatgccgcattaccgaccgtcccaacggatgctggaaaaacgtcaaggaggctgacaatggacaatctcgataaagaactgttggaaaccattgcggatctgcacggtattcccgagggaagtttcaatatccgtaaaaacgggcagttgttggcgcgcaattccaccgcagacatcgaaatcgttcccaaaacggataaggacggcattgatatcatcgtaaaggcgggcgtcacgaacagatctgtgcatatacccgtattgttgaccgttggggatttccatgacaccgtatacaacgatttttatatcggcgagggagcggacgtgactatcgtcgcggggtgcggtattcataacgacagcgcgtgcgcatctgaacacgacggcatccacaccttttatctttctgaaaattccaaagtgcgctatgtggaaaaacattacgcgtcgggaaacggtgaaggaaaaaaggtgttcgatcccgtgacctatattttcttgaaagaaggcgcggagttcgtgatggaatccacgcagttgggcggcgtcacctataccgaccgcaagacggttgcaaccgtaggcaaaaaagcgcggctcgtcgtcaaggagaaacttctcacagacggcgaagaggtggcgaaaacttccttccgcgttttgttgaaagggagagagagcagcgccgatatcgtcagccgcagcgtagcgaaggggaacagttcgcagtttttcaaatcggacatggtggggaaaaacgcctgtttcgggcatgtggaatgcgacggcattcttttgggcggagcgcgcatcgtttccacgccgaagatcgacgcggtcagccccgaagcgagcctcgtacacgaggccgccgtgggcaagatcgcgggagaacaacttttgaaactgatgagcctgggactttccgaacaggaagccgaggacatgatcattcagggttttttgaattaatcaatatataagcagcccccgtacggtaaaccaccgtgcgggggctgcttataaaatcaggaaatagaatttcggataaaccgaaatgaggtgagcgttttaaggtttgcgatggcttttcaatatcgaaaagaaaagcgcttcgttcgcgttgacgagtaaattttcgggaaaagcgcattcgcggatcaatgcctctgcgtaggtaaaatttcccacgtgcgccgcgccgtgactgtccgatcccatagcaacgaccactttatgcttttcgcacaacgccagaagttcggcgtcgcgctctttcgcgttgccgcggtagccgccgggcgtcagggaagcattattcaattcgatcatcgtattcgcgtctgcgcaggctctgacgagttcttcggcaaaaaggggatatttttcgtcgtcgggatgtcccacgatgtctattttacccgtgcgcaccgccgccacgagcgccgccgtgttttccttcgcgctcctgggcgcaaagcagggcgggtgctggctcacaatgacgatatccatttcttccagaatatcgcttcgaagcccgagcgtgccttcggtatcgagcacgtccgcttcggtgccgtagaggatgcgcacgccgaagcgcgttttttcacaatatttgagattgcggaaataactttcctttgcggagccgggaacggaaggcgaatgatcggtgatcgcaaggacgctcagtcccgccgtttttgcggcgcgggcaaggtccgtcgcggtatccgtcgtaaaatgaccgctcgcgatggtatgggtatgtgtgtcgatcttcgctttcatgatactattatagcgcgtgttttcagaaaaaacaacaattttacacacatttctcaaaaataaattcagataatccacacaagtcaacaaaaaatattcaaaaaaccacaaatttttcacgtgaacctattgacaagcgaagcaatgtatcgtataataaaaacgaatgaaaaagagaggaagggaagtattatggctaagtattattctgaaacgatagcgatgagagaccgaatcgcgaggctgaaagacgatctcttcaaaaaaatgcccgaaatcgaatccgcgcgagcgcgtctgatcaccgaatcctatcgaatgacagagggcgaaccgatgatcacccggcgtgcgaaggcgtttttgcatatcttgcaaaacattcccatcatcatccgcgacgaggaactggtcgtgggcagtacgacgctggcgccgcgcgggtgtcagacctatcccgagttttcctatgaatggctggaagcggaattcgacacggtagcgacgcgttccgccgaccctttctatatttccgaagacgcaaaacgcgagatcgcggaggcggacaagtactggaagggcaagacgacgagcgaacttgccacttcctatatgtcgcccgaggcgatacgagccatcgaccacaatatcttcacgcccggaaactatttctataacggcgtggggcacgtgaccgtacattacgactggatcctcgcggtcggttttaaggggatcgccgcgaaagcgaaaaaggctttggaagaggccgacttcggcgacgccgattatgcaaagcgttcgcactttttaaacgcggtcatcctgagttgcgaggctgcgatcatctatgccgagcgttacagcgatctcgcaaggaaaatggcggaaaaggaaacggacgccgagcgcaagcgcgaacttttgcagatttccgaaaactgcgcgaacgttcccgcgaacggcgcgagatcgttctgggaagcgtgtcaggcattctggttcgtacagcaacttttgcagatcgaatcgagcggtcattccatttcgccgggaagattcgaccaatatatgtatccatattataaagcagatctcgaaaagggtgcgatcacgcgcgaattcgcgcaggaactcatcgactgtatatgggtcaaactcaacgatctgaataaatgccgcgacgccgcgagcgcggaaggctttgccgggtacagcctgttccagaacctcatcgtgggcggacagaatgccgaaggactggacgtcacaaacgatctgtcttttatgtgcatcagcgcgtccatgcacgtgatgctgccgcagccgtcgctctccatccgcgtgtggaacggaagcccgcacgatctgctcattcatgcggcgacgcttacccgtacgggcgtgggacttcccgcgtactataacgacgaagtcgtcatcccttcgctgatgagccgcggtctgactttgcaggacgcgcgcgagtacaatatcatcggctgcgtcgaaccgcagaaagcgggcaagacggaaggttggcacgacgcggcgtttttcaatatgtgccgaccgcttgaactcgtgttctccgacggcatggagaacggtgaactcgtcggtatacatacgggcgacgtggcgcagatgactactttcgaagaattctacgacgcctacaaaaaacagatgaattacgcgatctcgctgcttgtcaacgcagacaacgccatcgacgtggcgcacgcggagcgctgcccgctgcctttcctttcgggcatgatcgaggattgtatcgggcgcggcaagacggtgcaggaaggcggcgcgatctataactttacggggccgcagggcttcggcatcgccaacatggcggactctctgtacgtcatcaaaaaattggtgttcgaggaaaagaaactcactctcgcccagttccgcgaggcgctcgccgagaattacggcaagggactgcctgcctcgaagacggcgcaggtcgttgcggaaacggtcaaagaactgcgcgcggcgggaaaacaggtttctcccgaagagatcgccgcggcggtcgctcagttgacgaaacctaccgacaaatacgataaacttttggaaatgatcgaggaagtgccgaagttcggcaacgatatcgaggaagtggacgcgttcgcacgcgacgtggcgtacacttacacccgcccgctggaaactttcaaaaacccgcgcggcggtatgttccaggcggggctgtaccccgtttcggcaaacgtaccgctcggcgcgcaaacgggcgcgacgcccgacggcaggctcgcgggaagacccgtggcggacggcgtttctccctctgcgggaaaggacgtgcacggtccgaccgcggcggcgaattccgtttccaggctcgaccattatatcgcgtccaacggcacgctgttcaatcagaagttccatccgtccgctttgagcggacgcgcgggactggaaaatttcgtggcactcattcgctcctatttcgatcagaaaggcagccatatgcagttcaacgtcgtttcgcgcgaaactttgctggacgcgcagaagtatcccgaaaaatacaagcacctcgtcgtgcgtgtcgcgggatacagcgccctctttaccacgctgtcgcgcagtttgcaggacgacatcatcaaccgtaccgaacagggattgtaaatcatggctgaaaaatacttggacacgaagggacggatcttcgacatacagagattttccattcacgacggaaaggggatacgcaccatcgtatttttaaagggatgcgtgctccgatgtaaatggtgctgtaatcccgaatcgcaggaatatcggatccagacgatgaccgtacagggcaagcccaaggtcatagggcaggacgtgaccgtgcgcgaagtgctggaaacggtggaaaaagaccgcacgtactaccgccgcagcggcggggggctcaccttatccggcggcgagagcctgtgccagcccgatttttgcgaagcgcttttgcacggggcgaaagatctggggctgacgaccgcgatggagagcatggcgtgcgcagaatattccgtcatcgaacgtattctcccgtatctcgacacctatttaatggatatcaaacatacggacccgcaaaagcatcgcgaattcacgggtaagagcaacgaactgatgctggaaaacgcgaaaaaggtcgcggcgagcggcatgaccgaactcattatccgcgtccccgtgataccgacctttaacgcgacggtcggagagatttcttccatcgcggaatttgcggcgaaacttcccggggtgaaacgtctgcatttactgccgtatcaccgtttgggacaggataaatacgaaggactgggaagggaatacgaactcaaacatattcttccgcccgcaaacgaaaccatgcaggaacttctgcgcgcggcgcagagagtatcgggcctggattgccagatcggaggttgacattgaaactcgacgatatgttaaacgacaagagcggaaaactgcgcatcgtacaggaacttgttcccggcaaacagatcaccatcgcgcacgtcatcgccaatcccgataaagtgctgtatcagaaactcgggctcaaccccgccatcgattacagtaaatccgcgatcggtatcgtgacggtcagccctgcggaaacggcgatcatactgggagatatctccatcaaagccgcgggcatcgaactcgggttcgtagaccgtttcagcggcacgctcatcgtgacgggtaccgtttccgaagtcgaggcggcgctctccgcgctcatggattacgccgaaaatattctgggctttacctgctgcaaaataacaaagacgtaatatgcgcaagatattactgataggacgcacgggcgcgggcaagaccacgctgacgcaggcgctgaaaggggaaaaactcgactataaaaaaacgcagtatatcaactttcagggcgctctcatcgatacgcccggcgaatatatcgaaacaaagcatctgggctacgccatcgccctgtacgcctacgaggcggacgtggtggggctgctgatgtcgtccacggaacccttctcgctctatccgcccaacgtgacggggatggtcaaccgagaagtggtggggatcgtgaccaagatcgacgatcccgagggcgatccggaacgcgccgccgcctggctgaggctgacgggctgcgaaaaaatattctacgtttcctccgtttcgggagaggggatcgccgaaattttcgactatttgaaggaagatggcgacgttcttccctgggaaaccgaaaataaacagtaatcaacaaaatcccacaaaaatattttcattattttgtattaaagtgttgacttgtgtgggatttggttgtataatgtacatgaacaataaataaaaaccaatattaggagaggtaaaaatggtaaacgagttcgaaatcaaaaaagagatttgcgacattggcaagcgtatctacaaccgcggcatggttgctgcaaacgacggtaatatttccgttaaactcaacgaccacgaatttctttgcacccccacgggcgtgagcaaaggtttcatgactcccgaatacatctgcaaagtcgacgaaaacggacaggtcattcaggcgaataagggattcaagccttcttccgagatcaaaatgcatatgcgcgtttacaaagagcgccccgacgtgcaatcggtcgtgcacgcgcatcccatgtatgcgaccgctttcgcgatcgcgggcattcctttgacgcagcccatcatgcccgaagccgtcatcgctctgggatgcgttcccatcgcggaatacggcacgccttccaccgaggagatccccaacgcggtttccaaatacctgcagtatttcgacgccgtcctcttggagaatcacggcgcgctcgcttactccgactctcttttgaacgcttatcataaaatggaatccgtagaattctacgcgcagcttcttttcctttccagacaactcggcggcccgaaggaactctccaaagcgcaggtcgaaagactgtatgagatccgccgtcagttcggcttgaagggcaagcaccccgccaacgtgtgcctcaacgcgaaggacggcaaacccagttgccattcgtgcggcggctgtgcgaacaccgaaaaatcctgtgccgcttccgatgaggacgtggttgccgcgatcaccaaaaaggtgatgaaggaactcggcctgtaagcgtatgaatgaaaaagagatagccgcggcggtcgaaaagatcgtccgctcgtctcttgccgaaccgcaaaaagaagagcacgtctgccgctgcggcagtcacaagatgacgctggaaaaggcgaaaaaacttgccgaggccgtccgtgagcgcgcgcgcgaaatgggcgtcaaggcggtcgtcgccgtggcggacaaaggcgggaaccccgtcctcgtcgagtccatggacgacgcgtatctcgccagttgggatgtcgctcttcaaaaatcgtacacggtcgtcgctctgaaaatgtccacgcaaaaactggcggcgcttgcggcgccgggcggttctttgtacggcatacagtttacgaatcagggcaaaatcgtcattttcgggggcggagaacctctggagatcgacggtaagatcgtcggcggtttgggcgtcagcggcggatccgcagaacaggacaccgcgctcgccgcattcggcagagataaatttaaggagatttcggaatgttgaacgaaaaagcagttcaggacattgtgaaagaagtcgtagccaagttgaacctcggcgcggaagtcgaaacgggaatgggaatattcacggatatgaacgaagcgatcgcggcggcaaaaaaggcgcaggcgattttgaagagaatgtccatggaccaaagagaaaaaatcatttccaacattcgcaaaaagacgctggaaaatgctgaaacgctcgcccgtatgggcgtagaagaaaccggcatgggaaatgtcggacataaaattctcaaacaccgtctcgtggcggaaaaaacacccgggacggaagatattcagacggtggcatggtcgggagacaggggattgactctcatcgaaatggggcccttcggcgtgatcggcgcgatcactccctgcaccaacccgagcgaaaccattttgtgcaacagtatcggcatgatcgcgggcggcaacacggtcgtattcaacccgcaccccgccgccatcaagacctccaacttcgcggtacgcatgatcaacgaggcgtcgcttgaggcgggcggtcccgaaaatatcgcctgctctttggtgaaacctaccttgcagagcagcgagatcatgatgaaacataaagatattcccctgatcgccgcgacaggcggtcccggcgttgtgaccgcggtgctctcatcgggcaagcgcggcatcggcgcgggcgcgggcaatcctcccgcactcgtggacgaaacggcggatatccgcaaagcggcggaagacatcgtcaacggctgtacgttcgacaacaaccttccctgcatcgcggaaaaggaagtcgtcgccgtagattccgtcgtggaagaactcatgcactatatgctcaccgagcagggctgctatctcgcgagcaaggaagagcaggataaactcgtcgcgaccgttttgacgcccaaggggctcaaccgtaagtgcgtgggaaggagcgccaaggcgctgctcgccatgatcggcgtggacgttcccgacagtatccgctgtatcatctttgagggagagaaagagcacccgctcatttccgaagagttgatgatgcccattttaggcatcgtccgcgccaaggatttcgacgaagcggtcgaaaaagcggtatggctggaacacggcaaccgccattcggcgcatattcattccaaaaacgtagataatatcacgaagtacgcgaaggcgatcgatacggcgatcctcgtcaaaaacgggccttcctattccgcgatcgggttcggcggcgaagggttctgcacctttacgatcgcgagccgtacgggcgaaggcctgacgtctgcggctacgttcacgaagcgccgcagatgcgtcttgtgcgacagcctatgtatccgataatgtaaggagagtaaaatggacgaaaaacagttggctgacattgtcagaaaagttctggaagatatgacgggcggcgcggcgaaatccgctcccgccgcagcaaagccgagcacggcgtccgcgggtattcccaagacagcgcgcgttgccatgctcgtcgaaaaagaaaaatacgagatcaaagaatatccgcttcccgccgtcggcgacgacgatatcctcgtaaaagtggaagggtgcggcatctgcgggacggacgcgcacgaattcaagcgcgacccgttcaatctcattccagtcgttctcggtcacgagggtacgggcgagatcgtcaaaatgggcaaaaacgtcaagaaggacagcgcgggcaaagatttacatatcggcgacaaagtcgtgtcctgcatgatcttcaaagacaatcccgatattaccatgttcgatctgaataagcaaaacgtgggcggcgcggacgtgtacggactgctccccgacgacgatattcatttcaacggctggtttgccgattacattctgatccgcggcggcagcacggtattcaacgtgagcgatctggatctgtattcgagaatcctcatcgagccttgcgccgttctcatccatgcggtggaacgcgccaagacgacgggtatcctgcgtttcaacagccgcgtcgtcgtgcagggctgcggcccgatcgggctgatctgtattgcggtgctgcgcaccatgggcgtggagaatatcaccgcggtggacggagaacagaagcgcctcgatttcgccaaagaaatgggcgcgaacaaatccgtcaatttcaaagatcataaggggatcgaaaacctcgcgaaagcggtggaagagagtttcggcggacatcccgcggatttcgctttccaatgcacgggttcgcccgtcgcgcattccaatatctataagttcatccgcaacggcggaggcctgtgcgagttgggattcttcatcaacggcggcgacgcgaccatcaatccccatttcgatatctgcgccaaagagatcacgacggtcggttcctgggtctataccctgcgcgactacgcgaccactttcgatttcttgaaacgcgccaacggcatcggacttccgatgtccaaactgatcacgcatacgtacccgctcgaagagatcaacgaagggcacagaacaaacctgaaaatggaaggtttgaagatcgcgatcatcaacaaataagcaggtgtgatttatggcaaaagctgtcggaatactcgaagttttcggtttggtcgcgggattcgtcgcggcggacgcgggctgcaaagcggctgacgtcgcgatcgaaaatttcgataaaaacaaacccggtaacgcggacgcgcttcccgtgcccctcatcgtttccatcaaattccgtggcgacgttgcggcggtggaagcggcggtagaggcgggagccgctgccgcggagcgcgtgtcgggcgtagtcagcagacatattattccaaatcccgaaggggataccgagaagatgttgaagatcaacgctctcgataaaaactgaaaatatttataaaatcagaatcattttaggaggatatacaaaatggctaaggaagcattgggcatgattgaaaccagaggcttgacggcggcgatcgaagcggcggatgcaatggtaaaagcagcggaggtcaccttgatcggcaccgagaagatcggcagtggattggtcagcgtgatggtcagaggcgacgtaggcgccgtcaatgcggccgtgcaggcgggcgctgcgaacgccgcgaaactcggcgagttggtagcgacccacgtaattccccgtccccatcaggacgtagaaaagatccttcccaaactttaatcattggcgaagccggaggatatcatggaaagatcactcggattcatcgaaatatccggcgtaaccgcggcgatcgacgctctcgacatcatgtgcaaaacggcggatgtcgaacttgtgagctgggaaagaaaactcggcggcagattggtcactctcatcgtgagagggaacgtatccgccgtgaccgaagcggtagaagctgctgcggcgcacgcgatcaaaaagcccgtcgcaaaagcggtcatcgcaaatccgcattcggaaacggaacgcatcgttaaactttcggcttcccgtctcgaaaagaaagcgggaaaagcggaaccgatgaaacacgacacttgatttcataggtaattcgggcagacagcccatttacgaataaatttgtttaaatctctgaaggaggagaaagaaatgtcactcgaagcattaggtatggttgaaacgagaggtttggtagccgcaatcgaggctgccgatgctatgctcaaagccgcgaacgttacgctggtcggcaccgagaagatcggtagcggattggtcagcgtgatggtcaggggcgacgtcggcgccgtgaacgctgccgtgcaggcaggcgctgcgaacgcgtccaaactcggcgagttggtagcaacccacgtaattccccgtccccattccgacgtcgagaaaattcttccccagcttaacaaataagttacggaaaattctcgggtgtcagccttgtaattcacgtcccgccgtacggcgggacggatacattgctttttgaatgtaactgttctgtcggaaagcggcaggatatggcttttgttgccctttttttcgggcagcggtttgttatttgaggaaaatttaccgaaaggggcgttatcgtggaagaaaagaccattgagctgatcacaaaacttgcgttgcaggcattggaagaacagcaaaaccatacgaacggttttatggtacccgtcggggtatccgcaaggcacgtgcatcttaccaaagaacacgtggaagcgctgttcggcgcggggcacactttacataagaaaaaagatctgatgggcggccagttcgccgcggaagagtgcgtcaccatcgtcgggctaaaacttcgcgccattgaaaacgtgcgcgtactcggaccttgccgcagtaaatcgcaggtggagatatccgccacagacgctttgaaactgggagtgaaagcgcccatccgcgaatcgggaaatatcgcaggcagcgcacctatcgctttggtaggccccaagggcgctatttacctgaacgagggctgcatcatcgcgaaacggcatattcatatgtccccgaaagacgccgaagccgcaggcgtcaaagacggcgacgtcgtatccgtcaaggcggataacgagcgcggcaccgtgttcaaccacgtacagatccgcgtgcacgacagttttacgctggaaatgcacatcgatacggacgaggcgaacgcgtcaaaaatcgtgaccggcagtacggtcagaatcatttaacggtcagaggtgtaagaatgatcatcggaaaggtcgtcggaagcgtggtatccacgcgtaaatgtgacaatttagtcggtaataaattcatgatcgtagagcctattccgagtttgaaagtggacaacaggattgtcgcgatcgataaaatcggcgccgggatcggcgaatacgttctcgtcgcgcaagggagcgccgcccgtgtgggctgcggtatacccgatgcgcccgtcgacgcggctatcgtaggcattttggacgaagggcagaatttggagtaattacttatggagataaaagagcttgcggacttgctgcaaaaaaacggcgtagtcggtgcgggcggagcggggtttcccacgtacgccaagctggataaacgggcggaaacaattctgatgaattgtgcggagtgcgaacctctgttaaaactgcaccgccaattactggaaaaacacgcagatgagatcgtttcggcgttccatctcgtcatggaaacggtgggcgcgaaagaagcgatcatcggcattaaaaaagaatataagaaaaccatcgaagccttgaagggcgtcattcccaactattcgggcgtacggctcggattgttggacgaagtgtaccccgcgggcgacgaggtcgttttgatatacgaagtcacgggcaaagtcgttcgtcccggcggacttcccatcgagagcggcgtcatcgtgttcaacgtagagacgctgtacaatctttcccgcgcaatgcataagagcgaacccgtcgtcgataaactcgtcagcgtggtggcggaagtcaaccgccccgtgacgctccgtatgcccctcggcgcgaccgtggaggacgcggtgcggttggcgggcggcgcgaaaatcaaaaatcccgtctatttcgtgggcggtcccatgatgggcaacatcatgcccgggtctacgcccattaccaagacgacgaatgcgatccttgtgcttcccgaaaatcattatcttgtcgagcgcaagcgggcgaaacccgagatcatgttgaaaagggcagcggcaagttgctgccagtgcagtatgtgtacggatctttgcccccgccatatgctcgggcatcccattcagccgcatctctttatgcgcgcggcgacctgcaaggacgtgcaggatccttcgattttcgtcgatacgttcttttgttgctcgtgcgggctgtgtgaactgtattcctgtttccagggactttctcccagaacgctgatggcggaatataagaacggactgcgcgcggcaggcgtcaaaccgcccgtcgtacaggctgcgcccgttcccagggaaagggaactgagaaaagcgcccatgaagcgtctgatggcgcggctcgatctcgtgaaatacaacgttcccgcgccgctcgaagataaatgcgtgggagtgaagagcgttaaaattcctctgcgtcagcacatcggcgcgcccgccgtagcggcagtgaaggacggggacgtcgtcaagcgcgggcagacgatcgcggaacctgcgaacgggctgagcgtggcgatccacgcctcgatctgcggcagagtgcgcgaagcgaacgcgaactacataattattgacagtacggagaatcaagcatgagtaaagcaatcggaatggcggaattcaagacggtctccgcgggtatcaccgcggcggacgcaatggtaaagaccgccgacgttgaaatcattgaggcggaaactgtctgccccggtaaatacatagtcattctcacgggcgaactttccgccgtgaacgcctccgtggaaacggcgaagaccttgcacgcgacgcatttgatcgacagtttcgtgctcggcaatcccgccgaagagatctttcccgcgatctacggcgcttcgcacgtggaagtcgtcaattctctcggcatcatcgagacgtacgacgcggctgcgatcatcgtcgctgcggatgaagcggctaagactgcggacgtttctttgatcgagatccgccttgcccgcggtatgtgcggaaaaagttatctcttattgacgggcgaagtcgcggcagtggaagcggcgattaagcgcgcgcagaaatccgtggagcctcgcggcatgttcctcgacagttcggtgatcgcgcggcccgatcagaaactgatcagccagatcttataaattgctttgcaaattcggtgaacgtttcccgaatttgcggtttttaaaagacatacgccgcgtttgtgtgcggcggtaaggggaggggtgtgcgtgctcgcgattgaaagaagaaacaggattttgacgatattacgggaagaaaggcacgttgtcgtaagcgaactcgccaaagtattcgacgtttccgaagaaactattaggcgcgatctggataaactggaaaaagaagggcacgtcgtcaagacgtacggcggcgccgtcatcagtgagggtagtgaggcggaacttccctacgtgatccgcaaaaaagcgaacgtggaagcgaaacaaaagatcgccgacctcgccgcagatctcatcatggacggcgatacgctcatactcgacgcgagttcgaccgccgtattcattgcgcagaagatcaaaagcaaaaaggagatcacgctcattaccaattccatcgaagtgctgatggaactttccgacgttacgggctggaaaattctttcgacgggcggaacgctcaaagagcgctcctgcgcgttggtcggcagcgaggcggaagagagtttatcgcgttttcacgtggacaaagcgtttatttcctgtaagggggtcgatccccgtcacgggttctcagacagcagcgatatgcacgcggcggtcaagcgcaaaatgctgcaagccgcatcgcagatcttttttgcggtcgattcctctaaattcgataaaatttctttcacttccgtcagcggattttcgggcgtggacgccgtcatcaccgagcgcgcaccggacgccgcgtggagcgaactgttcgccgcaaacggcgtggaatgcctgtatccggaaggagttgaaaaatgagcaaaacgcgcgtgatctgtttcgccaataacaagggcggcagcggtaaatcgaccacctgctcgaatgtcggctattttatggcggaggcgggcaaaaaagttttattgatcgacggcgatatgcagttgaacctttcgcttgccttttttgacgaagaacgcgttctcgaaatcgcgggcggcgaaaaaaatctgtatcaggcgatccgcaaacaggcggatctgaccgattacactttccgcaccgactatgaaaatctcgatatcattccttcgtccacattgatgagcgcgatcgaattcgaactcttttccaagtggcagagagaatatatcttaaaaaagagcctggaaaaattgaaaaattcgggcttgtacgactacatattgattgactcgccgccgactttgggtggctgggtgatgaatattctggcggcgtccgactatctcatcatacccgtagaggcgagcccctgggggttgttcgggctttctaacatgttcgaatttttgtccgacgtgaaggaagtggctcccgatctgaccgtggcgggcattgccgttaccaaagtggacggacgcaaaaattatttcaaacagacgatggaaactttaaagcaactgcccgcgcgcgtgttcgaaacgtttatccatctggacagcaacatcgaatgggcgcaggacaacagtaaacctgtgggaaaataccgcagaagttcgcgcagcagcaaggaatatcttgcgctcgccgaggaggtcttaaaagtatgtcgttaggaaacgcaagcatcaagcgcgccacgggcgccatcggcaagacgggtgaaaagagcaaaaaggcggcctttaccgccaaccgttcgctcatcgaactggaaatttcaaaaatcaagttcgaaaggtctgcgtacgacctcgccgaattgaaaaaatccgttaagaagtacgggatcctgcatcccgtgttcgttctgcgcgaaggggaagagtttattcttctttctggcaaagcgagaatgacggctgccgccgaactgagaatggagagcgttcccgcggtggtgctggatatggaaggcagcggcgtttctgccgccaaaaaagaacttctgctcaaaaaagcggcgcctgtacagccgagcatctcggacgagatcgccgcgagcgaagatattcacgaagaaaaattcaacgcgatcaaagggataggctccgatctgcccgagtacctcttataaccgataggaagaaagcatgaagagttttgacattaagacaaaaatctatttcggcgacaatgcgatggatcgcgtccgcgagattccgtacagccggatattgatcatcaccgataaattcttttcggggagcagcatgcttcgcatcgtaacgcaaccgctttccgaaaccaataaggaatttcgtatatttaacgacgtggttcccgatcctcccgtggaaaagatcgtaaacggcgtcaaagtcgtgctcgattataaacccgactgcctgatcgcggtagggggcggctcggtcatcgattccgccaaagcgatccgcgaatttgccgtaaagatggaaacgggtctgaatatcgccctcatagccatacccacgacgagcggtacgggttcggaagtcacggctttttccgtcattaccgataccgccaatcatatgaaatatccgctcgtgtccgacagcatgctgcccgacgaggcgatcttggacgaagaactcgtaaaaagcgttcccccgaacgtgaccgccgatacgggcatggacgttttgacgcatgccatcgaagcatatacgagcatcaacaacaacgaattttccgcggcgcttgccgaaaaatccgtcgagatttgcggcgcgtttctgatgcgcgcctatctg

SEQ ID NO: 757 - DNA, 8256 bp, Unknown
  16S sequences of unknown bacteria
aggaattatgggttcttgaactcacttcctgttgctcttagtttgacaattcaccccttacgggtgtctatgccgaccgggtaaatcacaaaatttatgtcgaagatacgcggctctcttgtaaagtatactgaattggtataatttaagcttcaggggatgatttttcctgagaaatgtgttatactattcacaaacaaggacatacttcagccgaaacggagagatacgctatgggaaagacattgacggagaaagtgacctgggtcggtaaggtggactgggagctgaaaaagttccatggggacgagtattccacccatcatggttcgtcctataattcctacctgattcgggataccgagaagacggtgctggtggataccgtctggaagccctacgacaaggaatttgtccaaaacctcaagcaggaggtggagctcagccaaatcgacgcgatcatcgtcaaccacggggaagtggatcacagcggcgccctgcccctgctgatgaaggagatccccgataccccgatttactgcaccgccaacggcgtcaagtccctgaccgggcagtatcacgagaactggaacttcatcccggtgaaaacgggggataccctggatctgggcacggtcaccctgacctttatcgaggcccccatgctgcactggccggataccatgttcacctacatgagcggggaaaacatcctgttcagcaacgacggcttcggccagcactacgccaccgaatccctgtacaacgatatggtggatccgagcgagctgatggcggaggcccgcaaatactacgccaatatcctctgccctttcagcatgatggtcgcgcgcaaaatccgggagattcaggccatgaacctgccgctggatatgatctgcaccagccacggcgtcatctggcgcaacgatcccgcccagattgtggagaaatatctggagtgggcggccgattaccaggataaccaggtgtcgattgtgtacgacaccatgtgggaggccacccgccacatggcgcaggccatcgccgctggcctgcgggaggccgacccgggcgtgacggtcaagctgttcaacgcctccaagtcggacaagaccgacatcatcgccgaggtcttccagtccaaggcggtggtggtgggatcccccacagtcaacaacggctatctgtacgccattgccggcattctggagttgatgaagggcgccaagttcaagaagaaaaaggcggccgccttcggcagctacggctggagcggcgaggccgtgaagctgataagcgaggagctggcggcctccggcttcgaggtggtcagcgagggcaaacgcgcctcctgggagcccgatgaggccatgctggaggactataaggcctacggccgcgagctggcggagaaattccgctgaaccgccgctggtttaaacaaaaaggggatggcgccaggcgccatcccctttggctattttccatccgccagccggcaggcccgcaccgcttcctcccgggtgtccgccgcaatgagaaaccgcccgttgtggcaaaaacgcagcccggcgatgccggtcatgtccgccagcgcctccggcgtctgtcccgcccaggcggcgggaaacggctgcttggccgcccccgtttcctcgtcggccggcaccacctgggcgctgtagccgccccgctgggagggatagaccacgaagcgggccggggaggggatgagcacacttttccagggggcgaaccggggcagaatcaccaccccgtcctccatatgggtcagcgcctcttccaccagtgccctggcccgcccgatcccccggatgctctccagctttttctgcaagaggagccgggccaccctttccgcctcctcaaaacagtcgtcaggatcggctggggaatcccaggtggggttgaacgcgccgatcacccccgccagcgtgttgccgcagccggtgttgtcgtcctcatccagcggctggataaaggaggcgtcgaaccgcgccgcctcctccgccggcagaaggcgggcgccaaactcccgccacagcagcccgaaggccgcgtagggcacgccgttttcccgcaccggcgcgtcctgctgatgatggtcgaaggggccgagcccgatgtcgaacaccagcccctcgaacgcctccggcacctggaatccccgatgaatccggatatccggccgcagcaggcgcagcagcgcggcggaaaacacgtcgtcggcatggaatttgccgccatgggtcatggcggcggctggtatatccctcatcggtttcgtccccttattcgtcgtaatcgactgcttcaaagctggcgtcctgtgcccgcagatcaaagagcagccggtaatcttcatataggcggtagcgggccgggcaggccgcgctttcccggatcacccgggacatgtgcccgccgctcggcgccttgagatcctgcgccttatccggatccgcttccaccttgaggcagtgcttgccctgctggagaatgagcccgttgccactgtatcgccggattttcaccccgtgataggtggccagccggatttcccgcccctggtatcgcaccgccgcgatgcagccccggaagctccgtcccaggaagggcacgtccgcgatggataccatcaccgagcagtcctcctccggcgcgctgcactgggtccagagatacgagcgggggaaggaggtgccccagtccatctccatgtagccgacgcccccgtcgaagacgagggtttccccctgatagttcagccgcccctgcaccgtgtggcgcatgctgatcacccggtggcggcattccatcagtggcatgctgcggaacggccccatgatgtccgattccagcggcgtcagctccccgtaatgcagcttgccccgcagtgtcagatccggctcccgaatgtccaggaacagcccctcggcggtgaagaccgattggccgatacgcaccccgagcggcgaccgcctcgcctcgaaggcggagaagggatacgcgacgaaatgggaggcggactccgtgatcacctgaatgaacgccgttttgctcccgtccgccgccatgctgatccccgggatgacggccagcgtccgcccgtttgcctgctgcttgaaataccagccctcgaaataggagcgctcgcgatgctgtccgtgataaaagctcataatccgtccccccgtcttttctggtagtgtgcggcgtccgcccgcccattatgcggccgccgcgtagaaatcccctatagtatgggtaagaataccagatttcccctcccgccgcaacccccttgtccgcttcttaataaaaacacaagaaacccctcggcgggaaccgcggttccgccgaggggttctctacagtcctaaaaaccgccgccacagcggccgcaccgccaggcacagccccatcccggcggcgcacagcccgaacagcagccagttgaccgcgttccagccccactgcccggccgccagtcccagcccccagccggacagcgcgctgcccagataggtgaacgcgttggtcagtcccgccaccgtggacgaacgtcctgccttggcgaactgcagcggcaccaggctgatgagcaccgtgttgattccggaaacgcacaggctgaccgccgagaacagcagcacggtcagcagcgggtggagcctcccgaccgccaccagcagcagcatgcccgtgcccgccgcgccgaacagcaggaaagaggtgcgcacgtcgtcgcttcccggacgcttgctcagcttttggatcaaccacagtcccgccagattcaccagcggaaggatggctgtcagaaagatcgacagcgccgcatcgatttggaacgtatcggtcatctcctgcggcacccaggtcatgatgccgtccttgagcagtcccatgaacaggatgatagccagcagcagaggcagaccggagaccaaatacaacgcccggaagctttcggttgctttgacggtgtttttcgtttccaccttttccggcgtttggtaacagccccgtgtggtcgcccccacggcgatccatcccagccccgtcagcagcgtcagcgccgccggcaccagaaaagatacccgccaggggaagtgagttaccagcaggggaatgagcagataggtacccgtggttcccagcgacgtggcgtaatggaaagacagtatcgctttgcgcagccgttccggcggcatgcacagcgtcatcagccggatcatcggcgcccaaatcagcgcgcagaacagcccgttgaggcaccacgccgcctgcatcagccccacgctgccggccagccccatcagcaggttgcttcccgccgaccccagcatgcccgccgcgataagcgccttggggttcagccggtcgcccagccacccgctgaacagctgtccaagcccgtaggagacgaacaaggtggaggcgataagccccagctgatcggtccgaagcccctccgcttgcccgatgaccaccatggccgccgcgtaattgtaccggccgaaataattgataaaatacacggtccatcccatgagaaacagccgcatataagcgggcgtttcccgcagcgcgcgcagccgcatatccgccgtcccctcccttgcggctttcagtatagacagcgccgcgccggaaaacaagaggtgaacaatttattgaaattcgttcaaatatttgctatactaaatgtgaattgttcaaatattttgaacgaatggaggcgtccccatgccgaacgaccgccggcagcaaatcctcgactggctcacccgctataaaagcgcttccctcgacgagctgggcgccgccctgcactacagccgatccaccattcgccgcgacgtgctggagctggaggagatgggccttgtgcagcgcggccgcggccgggtggaactgctcgtcacctccagcaaggagcggcaccacctgctgcgcgccggcgagagggtggaggaaaagcggcgcatcgccgccctggccgccgacttcgtctccgacggcatggccctgttcctcgacgcgagcaccaccgtgcggcaggtttgccccctcctccgccccttccagcacctgaccgtggtgaccaacggcctggaaaccgcccaggccgtcacccgcatgccccatatcggcttgttcttcaccggcggctattggcgggatgacaccggctccttcgttggggaaccggcggtcgattttgtgcgccggctgcggctggatctctgcctgctctcctgctgcggcatggacggggacggcctgtatgaggccagcctccagcaggcctacgtcaagcaggctatgatccgcaacgccggctctaccctggctttatgcgacgcctcgaaattcggccgtcccttcaaataccggctggccggctttggggaggtgtcctacgtgctcaccgacgccgctccgccgcccgccctggaggccgccgctcaccgggatgactgcgaattcctgatcgccgggatttagtctatccatacaagtttgcgcataaaaattagacggcggcagattttctgccgccgccttttcgtctggtgttttgcccggtgccatggtatactggacgttgaaagcccgcctcttataaatcccaaagccatcgggtggcccagtccggccagcccgcgcaggcctcctgcaccacgccggtctccgccgtggccaaggataacccgtggggcccgctgggcaggatgtgcagctcggtcggcaccccgttttgacgcagcgccgtcgccagcagcagggaattctccaccggcacacacgcgtcgtcccaggtgtgccagaggaaggtgggcggcgtgtctgccgaaacctggttttccaaggatgtcagcgcgcgatcttcctcataccggtctcccagcagattgatgaaggagccccggtgagcgaactcgccggaggtgatgaccggatagccgagaatcattccgttcggcttcgcgtctcccggcgtcagacccagcggcccgttgacgaactcccggttccagaacacgcccaggctggccgccagatgtccccccgccgaaaagccgcagaccgcgattttgtcggcgttcacatgccattcgtcggcgcggctgcgcaccatggccaccgccgtcgccaactgaagaagcgccgcggggaaccgcaccggctccaccgaatagcgcaggataaagcactggaatcccttttccagaaatttcagcgccaccggctccgcctcccggtcggaagtcatgccgtaccctccgcccggacaaatgaccaccgcaggccgtcggtgcgcctccatttcgggcgactcatcccggatgtaagtatagagcttggcggtcgtcccggcggcgcccgcccggatgtctaggacttgatgctgcatcgatatccctcccagttgttattgtacagcagccagtttaccatgccgccggggaaagtgcaatccccctgtccctataaatatgtagcttgcaggaaggccgcggttccgcccggcattctgcctgtgtctccagcccctcgaaaggaatgtgatggatcgccatgcctcgttttgccacccgcgccgccggcccccgttcggctgccgccgctctcctcgccctcgccctcaccgcctctgtcagcgcggcggttattacctccgtggtctcccaaaaggcctccagcctggcccccggcgtcacctatcagtatcaggacgtcaagaccggccaggggccccagaaggtccataccatctcctttcccctgggcgggccggtcgatatgcgcctcgggctgtccaacggcaagatccgcggcaatcaaaacgtgctggatatggccaagcaagccgatgccaatggcgatgttctggccgccatcaacggcagctttttcaagctgggtgcctcttacggcggcattcccttcagcttcctcatgcaggatggggaactgtacgtcagcccgcccgtccccggcagccccctgaacggcagcgaacaggtcgtcatggcgatcaataaggacaatacctgctttgtggcccccacccccaccttccaggccacctgcaccatcggggaacaggctacagttattcagcatatcaaccgcctgcgggcccccgccgccgcgaacagcagccccgacgatttcgtcctctacacggatttgtatgatacctccacccataccgacggcggcctggaggtcagcctggaggtgaaggacgacgccgtccgtcccggcggcaccatgaccggcaaggtcacggcggtgaccacggccggcaactcccccttgaaagccggcactgtggtgctctccgtcaccgacaaggccaaggcccccttggcggggctgaaggtgggggacaccgtctccctcgacttcgcctttcaggacgaacgctgggaaaacgtggccttttctttcggaggaagcgccatcctggcccaggacggcaagctggccgccctgccggacgacagcctgtaccgcaatcgcaacccccgcaccgctatgggcttccgggccgataacagcatcgtctggatgacggtggacggccggcagaacgatgtcagcgaaggggtcaacggcaagaatctcggtcagctgatgctggacgccggctgtgtggccgccatcaatctggacggcggcgcctcctccaccatggtggtgaagctgccggaggacggcctcaaggtgcgcaacgtcccctccgccggctccctgcgcaaagtggccaacggccttcttctggtacgcaacagccgctatgtccccaccaccacgacgacgaccaccacggccaccgccgcgaccaccacaaccacgaccaccaccgcaacaaccacgacgactacgacgacgaccacgacgacgaccaccacgacgacgaccacgaccaccaccacgacgcagccgcccacgaccacgaccctgccgcccacgaccaccaccgccctgcccagctggcaggataccgggggcgacccggtgtccacccgctggtggataggcccgcttatcacggtggccgccctggccgcggccggaggtgccggtctggtgctttggaagaagggcgtgttccagcgtcgctgacggccttaaagagaaacccccggttcctgcagtgtggcgccccagattgtacagacagaacaaaaagccccctatgcaggaaatatt

SEQ ID NO: 758 - DNA, 3119 bp, Unknown
  16S sequences of unknown bacteria
gcctatttatttgatttacatatttttttataattattttagagctatactactcctcatctgtttcttgttcctcggtttcctccggaagtatgaaaagctccactttttctattcttctttcctttacggacagtattttgaataccagatttccgtattctatgactcgctgttcgcgctcatcgtcatcaggaatttcaccgagtatatctataaggaagcctcctattgtttcactgttttcggattcgagatttgttcctatctcttcatttatatcgtcaagcgacgtaaagccgcttataatataaatttgatcgtcaaccttttcaatttccgattcttcctcatcatattcgtcttcgatttcgcccacgatttcctcaatgatatcttccatcgtaacaataccggaaaatccaccgtattcgtctataagtatcgctatattgtttctcgtcctctgaaggtcgcggaagagcgagtctatatttttcgactccggcacaaaataaggttttctgaggatgcttcttatatccacaccttcatagccatcatctctcgctttcataaaatagtccttgatatgaagtatgcctatgatattgtcaagatcgtcatcatatacaggtattcttgaatatttaagctccataagctcgtcgagatactcgtccggcgtatcgttgatatctatgagaaatacctcggtacgcggtgtcattatctcatacgcaagcttgtcgtcaaaatcaaagatggcatttatcattttcttgccttcttctttcagtactcccgtttcctgacccacttcaagcatcgacattacttcgtcttccgagaactcttcatcctccacatctacgctttgacgtgtcaggcgcagaagtaaatttacagataccgaaagaagccatacaaacggttttgttattttcgacatcacaatgagcggcttcaccaccatcatcgcaatcgtctccgaatgctgaagcgcaatccgcttcggataaagctctccgagaactaatgtaatatacgataaaatcattgttacgagaactaccgctatttgatttccatatggaatgccgaatttcgtgaggaaagcgcctaaatcatctgacaaagcaacagccgcagacgcacttgccaaaaatcccgcaagcgtaatcgccacctgaattgtagataaaaacttattaggctcttcgagaagcttttgcagcaaaacagctttcttgttgccatcctgagcaagcaccttgattttgttcttgttggcagatacaatagacatttctgcaagcgcaaagaacgcattaatgagaattaaaacgaataagaaaataatttgtacagctaaagatgtactgggactggggtccggcatttaaaatgtcactcctttcaaaattacgccgcctatgcggcagtttcaaatatattgagacgattatatattatcggcagcctatagtcaagcaaaatccaaattttttataaaactgtcatcttatttacgtttcctgatcataaagtaaggtgccgcaaaaccatcgagttttattttgagcatctgctgcggatgcggcgctgactcaagaggttctcctgtttcgagatcatacatttctgtcagaatctgtgcgtaaaaatctgcattcgggccgaaaacttctatttcctcccctatgctcatcttattgcgctgctctaccaccgcataaccagtcttttcatcgtatgccttgacaagacctgtaaaggagtagtcgcgagtatatgcgctcgtctgatagttttgatccttatttgtcggcttatcgaaataaaaacctgtcgtaaactcgcgatgagacacctttttcagctcagcaagccatttaggatcgaatctatatcccgccgggtttttatagtattcgtctatcgcacggcggtatacgccgacaatcgtcgccacataaaaaatgctcttcatcctgccttctatcttagccgacactatacctgactctgcaagctcgggaatatgctctatcatgcacagatcgcgcgaattcagaatgtatgtaccgcgctcgtcttcctctatcggaaaatattcacccggccgcttttcttccataagcgtatacttccagcggcacggatgcgcacacataccgcggttggcatcgcgctctatcataaaattggaaagaaggcatcttcccgaataggagatgcacattgcaccgtgcacaaacgcttcaagttccatactttccggcatctcgcttcgcagctttcttatctccgaaaaagtaagctcgcgcgcaatcactatgcgcttcactccctgcgcctcccaaaattttgccgtaacataattcgtcatattcgcctgcgtagaaagatgaacttccgcatcaggaatcatttctctcacgagcattatgacgccgggatcggaaattataaacgcatcaatcggtatatcctttatcttggaaagatatgcgcaaagcggctcaatatcttcgttatgcgcaaagatattgagcgtcatatacgcttttgcaccatgttcgtgcgcaaaagcaactccctcttttatttcgtctatcgtcaaatttcctgctcctgcccgcagcgaaaaaaactctccgccgaaataaacagcgtctgcaccgtaaattacagcaatctttaatttttcaagatctcctgccggtgccaaaagttccatcttcttcatattaaatccattcctaaatattatataatttacttactatttacacgactcacagaaataccgtcgccgactgcgaggattgtcgtatcgagccgcgtgttgcttgttatcatctccataaacgcgcgcattttccttatgctggtcttatactttcccgtaggatcgtactcgtctgctgctgttttgcctttcatcaatacgttgtcgcatacaataagcgcgccttcacctataagcttcatagcacattcaagaaactgcgcatagtgactcttgccagcatctataaatacgaaatcaaatggctcgccttctgttggctcagcaccgcttacgggaacggcgtttttcttttatgcctgcg

SEQ ID NO: 759 - DNA, 2695 bp, Unknown
  16S sequences of unknown bacteria
acaaaaaacatatatgtgtgttaacttttcttaatattttaaactgtccccaaatttctcggcagaaaattttcatcatcggaatgataatcgttctaccacgccgcccttccccccttttttccggacagacaagctaattgtttattgctgcaaaaactttttttcaaaaagtaatgctcccgggtactatttacccgagagcattacataaaaagagtaaattatgcttttttagactgtgcgctttttcttcctttccatgatacccataattcaggcgctaagcatacagaagagaataagcctgcaatcataccgacgatcatggggaaagcaaaagaaagaatggattctaattgatataccaccgcaaccacgcaaaccgtaaccagcgcgatcatcgttgtgatggtagtcatcacgctgcgcttcaaggtctgattgatgctgacattgaccagctcatccagaggtgtagaaccgcccaaaagccgcttattttcacgaacgcggtcgtaaataacgattgtattattaattgaataacctaaaatcgtcaaagccgccgcaataaaattatcattgagcggaatccgaaggaacaaaaacgcggcaaacacccaaatcatgtcatgtaccaatgcaactacacacatggcgccagcagaccatccaccaatcttacggaaacgaaacgcaatatagaccaccatcaagagagaggcaaaggcaaccgctaccaaacattttgtaaagaactcttttcccattgtgggatcgacattatctgtttcttcaattttaatatggttgtccgggaaattttcctccattgcctgtgttagctgttcatgcatttcagtagtcaggctacctgacccagctactgtgatcacaacagaattaattccgctggccacgtcttgcgactcctgcacatttacgctaccaataatttcttgggcaacactcgctacttcggaagacgataactcacctgtataagaataagtaatcatcgatccacctttaaattggatatccatcggaacacctaaaataactgctgttccaaaaataacgaccatgcaaattgcggcaatgatataaaaccactttcgatttccaacaaaattaatcattatttgtcacctccgtacagccatgccttgcggaagggtttgaacctcgaaatggatttcagcatcagtctcgaagcggtaacgcccatgataaagttcataataataccgacaagcaacgtatatccgaatgaatagatcgtaccagcagttgaagcgccaaacgcaaaaaagacaggagataacagcgttgcaaaaatgctgtcggtcgggccaaacgcccccatcaaaatcacagcgacaaaaataacggtaatatttccatcgaaaattgcggtaaatccacgtttatacccaatattcaaagcattatccagcgattttccggccttcagctcttccttaatccgctcagcggtaatgatattggcatcaacgccaacacccaaagacaaaatgatacctgcaatgccaggtaatgttaatgtaaagctggggatagtggagaaaaatccggtaagcgctgcaatggtacccaccaattgccccaacagagcaatcgctgcgactgcgcccggcagtcggtagaaaacgataacaaatacggcaaccaaaacaaaagcgattgcgccggccaaaaccatggcatccttcgcacccatacccaaggtcgcggatatggagcggaagttttcagtttctaacttaaacggcaatgcgccgccattgattttgtttgccagatcagttgcagattctagcgtgaaattaccagtaatgctggcagagccatcggtaatctgcgtactcactgtcggataagaaatcacattctcatccatccaaatggaaatcggggtatttgtcccggccagacggcctgtcgcttcggaaaaagcggtaacacccgattcctttaactccagcaaaaccacatactgattttgctcgtctactccaaccgacgccttttttacatcgcttccagtcagaatgattttttctgcagtaagaccagtgggtttcccttcattatctacttcatacccttcacggaaggtcagcaatgccgtttcacccaactctgcaactgctttctccgggtcaaaatccgtttcatcttctttccacgggaaacggacaatgacacggtttttattcaaatccgtgtatacctcgtaatccgtaatattctgatttaccagccgcagtttgatgatggactctgccgcagccatctgctcttctgtcgggtccacatccgccggcgcacaaaaagtaacatctacgccaccgcgaatatcaataccccaccgaatatcgtctgcacccttaattatcgtcttttctacatctccaaaataggatgtcactccaaaaaaagacaaataagtaaggactgcaatcaatacgacaacgatgaaaaatactggttttccaactcgtttcatgtgcaatcctccaatgttcttctagcctgattccttttgaaagaataataccctgcttgtccggaacctgacattcataaagttgattataggtgaaaaactgttaaaagtcaacaaaaaatctgattctgctctcaaggatgctgagccgggctgaca

SEQ ID NO: 760 - DNA, 5828 bp, Unknown
  16S sequences of unknown bacteria
tagtaaaaattcaccggctgtaccgcgtcccccgccgtttcctgggctgcgcagcctgccagcagcgccagcagaagtgcagcgctccaaagcaatcgtctcattccggctcctcctccacggcaaacagcgggaacgtcacctggaagcgtgtccccccagggtcccggtgggcgacttcgatcgtgccgaagtgccgctcggccatatcatgtacgatggaaaggcccagtcctgtcccgccggcctggcgggagcgggccttgtccacccggtaaaagcgttcgaaaatatgggccatggcgtcgtccgggatgccgatgccggtgtccgccacggtcaggatgacggtctcgtcccggcgctccacctgcagcaggagcgcgccgccggggcggttgtatttgatgccgttctccgccagattgaagacgatctggtaaaggtcgtcctccgtggcgaggatcgtcgcgccgcctgcaaggtcgcagcttgctttgatatgctgctgctccagctggggctgcagcattttcagcacctgccggaccgtcccgctcacgtcgacgacctcccgaggctgcatcacctgggcgtccagcttcgtcagctccagcagccgggcggacaggcgggtcaggcggtcggcctcggtgctgatatccgcgacaaattcccggaccgtctcgctgtccatctcgttttgcaaaatcgaatccgccagcagcttgatggacgccagcggcgttttgagctcgtgggacgcatcggagacaaagcggcggcgcagctgctccgattcgtgcagccggtccgtcagctcgttaaattcctgggccagctgggagacctcgtcatggccggtcatctccagctggtgggtgtaatccccggcccgcacagtccggatggagtccagcacgcggttcatccggcgggagaaggcggaggagaacagcagagagatcaagatgaccgccagctccagcagcaccgtgatcttcagaagattcccctccagggacgcgatgagcgtgccttggtccgtatcgtaggccatgagatagaccgcgcccatgggggcgtcgtaataaagcaccggcgcggcggcgtggctctcgacagcttcgccggtatactggcagtagaaaacatcgttgccctccagcgcctgcacgacctcggtcaggaggaaatacacctgcttgctctgcccctcggcccgagagtcgtagaccatccgcccactggcgtccgtgacgacgacgcgggtggagcgcaggtccgccaggacctccatcgtttgggcgacccgctcctgggtcagctcatccagccccgccagggacgaggccacgagctgcgccttatcctgcatcgacgccgcgttggaccggaacaccaggttccgcgtcgaaacggcggcaatgaggttcaacagccacagcgccaccgccgtaatgagtacataaagcgccgcatgcttggcctgggacgtgctgggcagcagccgccggaggccgcggcgatttcccttctcatgctttgaaatagtagcccactccccacttggtcagaatatgctgcggcgcggcaggattcttctccagcttctcccggatgcggcggatgtgcacatccaccgtccgaatatcgctgcggtactcgtagccccagatggcgtcgagcagcgcctcccgggagtagacccgctccgggttgcgcagcagcagctccaccaggtcaaactctttgagggtcagatcgacctgggtattgccccggaaggccgtcctgctctgggtattcaggcgaatggagccgccggtcagccaggcggcctgctccggtccccgcttggcgcgccgcagcagcgcccggacccgggccttgagctccaggatgttaaagggctttgtcatatagtcgtccgccccgtggtcaaagccgataagcttatccatatcctctgccttcgccgtgagcatcaggatcgggacatcggaaaatgtccggatcttggcgcaggccatcaggccgtccatctccggcatcatcaggtccaggatgataaggtctacagacgggtccgccgccagctccaccgcttcgcggccattgctgccggtcacgacgtcatagccatcattgcagaggttgaatttgatccccttgaccaaaaccgcctcgtcatccaccactaaaatcttcatgattcctcactccactgttatgctgtctttgatctttgcgtagatccccgcgccgatgccgcggacgtcctgaatctccgccgtcgtctggaaggggccgttggccatgcggtagtcgatgatccgctgggcgagggccggtccgatcccgggcagggattccagggctgccgcgtcggcggtattcaggttgacgcgggatgccatgccctccggctcggtttcggtctcctccggcgcggccggttcttccggtgcttccggcgcctctggttcttccagtgcttccggcgtctctggttcttccggtgcttccggcgcttcagctgccacggatgatgcagcggctggccgctgatacaggaccgtcccgccggtcgtgcggccgaagtacaggcccagaccaaagagcaaaaagcctgcgcagcacagaagcaggccccagcgcagcagctttgctttcatagaaatccctccgccttttcgttgacaccagcccgttccttgcttataatagaaaaaagtcgcgctgcgcccggtcgaattttggttcttcttttttagtatatcacaatctgcgggcacgcagcaatcacctttgccgcatattttgcaatttactggagttttttatgactaagacacgcattttctcgctttttctggcgctgagccttcttttttctgttctcgccctcccctgcgccgccgtcaatgaccccggcaacgatccggccgccgcacagacggactcgtcgcaggatgaggccgccgcagaggaggaacccccggcagacgaggatacgccagccgacccagaaaacggcgacagtacccctgccgacgcaagcgacccggtcttctccgtcgacgctgcggcggcgatgctcgtcgagatgaattccgggaccatcgtctacgaaaaaaatgccgacgacaaggtctaccccgccagcctgacgaagatcatgacctgtatgctggcactggagctctgcaaggacctggccgaggaggtcaccgtcaccgagaccgcgctggccgggctggacccggacggctccaccgcatcgctgcaggtcggcgaggtgctgacgatggaggacctgctctattgcatcatgctcccctccgcaaacgacgcctgctgcgtcgtcgcggagcacctgggcggcacgatcgacgcctttgtggaaaaaatgaacgagaaggcccaggccttgggctgcaccggcacccactttgccaaccccgacggcctgcatgacgacgaccactacaccaccgcccgggatctgcgccgcataacggaggccgccctgcagaacgagacgttccggaccatcgtctccaccgcagtctacgaggtcccggcgacgaatctcagtgacaagcgcatcgtccatacgacgaactatctcatgagcacggccatcaacccggattattactacgaaaaggccaagggcgtcaaaaccggctacaccagcaaggcaggccgctgcctgatctcgacggtcaagcagggcgatgtctactatctcagcattgtcaccggctgcaaaacgattgtgaacgacgacggcagcgtcgtctatgacagcttcgtgcagacgaaaaagctgctggaatacggcctgacgagcttcagctttgccacagtaatctctcaacttgtcccggtggcccaggtgaaggtcaagaacgcgaatgtcgattccgtcgtcgtcgctccggcgcaggatgtcacagcgctactcccggcggattacgacgagagccagctgcagctgtcctacgcgctgaccggcggggcggacacgctgagcgcaccgctggaaacaacggacgacgtcggcaccgtcactgtgacctatcagggcaagacagttggccagacgacgctgcggcccatcaccgccgtggagcggcatgtggtgcagtacgcagccaagagtgccgggcggcaggtgaaaaaatttctttggctgctcatccccctgtcgctgattttggccgtcgttctgctgcgggtgcgcagcgagcgcatccgccggaaaaaggcggcggcgcggcggaaaaagcgggcccagcaagcaggcggccattacctctcgcaatccggccatgccagagctgccgcaaagccgcagaaaacatcatcagaaaatactgcgcgaaacacgccgcatcatacaccaccaaaggactgatcctatgctagactggaacaccctgcaggcccaatgcctggcctgcgaccgctgcgccctctgccagacacggcagcatgtcgtcttcggcgacggcaatcctgaagcaaagctgctgttcgtcggcgaggggccggggcagaatgaggatatccagggcgtccccttcgtcggggctgccgggcatctgctcgacgatatgctctccatcatcgaccttgaccgcagcgactattacatcaccaatatcgtcaaatgccgcccgccccagaaccgggacccgctgcagaccgagcaggacgcctgcatcgactggctgcggatgcagaccaagctgatgcagccgaagctcatcgtctgcctgggccgcatcgctgccatgcggctgattcgcaaggattttcgcatcagccgggagcacggccagtgggagcagcggggcggcatctggttcactgccatgtatcatcccgccgctctcctgcgggacgacgcgaaaaagccccagacgttctacgacctcaagtccctgcagtaccagctgttcaaggtctgcccagaaatctacgccgccaagggcatcgcgcggccctgatcatatggatcgcaaaaaagtgcttgacaaagcaggcatgatatggtataagtgagaaaaccgaagaggaagggtaagtacgatctgccccgctgatttcagagagccgccggtggtgggagcgcggtatgagcagcagatgggaatggccttctgagggcgagcggaacttttagtatgcgagccggaacgcgcaccgttatctgcgcgagcatatgtcagtatgcgatgagcgggcgcaaatgcgtcaagccgggtggcaccgcagagatctggaatttgaccgtctctgtcccagcaaattggttgggacagaggcgttttttctttgccccgccgaaaaaacagaaaggagcctaggaattatggcacagcaaatcccctacaagatctatctgagtgaaaatgagatgccgaagcaatggtacaacctgcgggcggacatgacgaacaaaccggccccgctgctgaaccccggcaccctgcagcccatgacctttgacgagctccgcggcgttttctgcgacgagctcatcaagcaagagctggacgacaccaccgcgtattttgacattcccgcggagatccgcgagttttacaaaatgtaccgcccctctcccctggtccgggcctactgcctggaaaaggccctagggaccccggcgaaaatctactacaaatttgagggcaacaacaccagcggcagccataagctgaattccgccatcgcccaggcctattacgccaagcagcagggcctgaccggcgtcacgacggagacgggcgccggccagtggggcacggccc

SEQ ID NO: 761 - DNA, 32759 bp, Unknown
  16S sequences of unknown bacteria
ccccgcatccttaaagaatgcggggcgttttccgttttagccgacgatcagattcaccagacggccggggacgacgatgcactttttgacttcttttcccgcgacgagtgcggcaatctcgggattggcgcagacggcggcttgaatctcctcgttcgagagatctttgccgatcatcattttcgcgcggatcttgctgttgagttgcacggcgtattccgtttcgtcccgaacgagagctttctcgtcgacggcgggatagctctccgcaaacacggattccctatgtccgagaatctcccaaagttcctcggaaaaatggggtgcgaagggcgccagcatcctcacgaggtcgtctacgcacgccttgaagaactttatgtttttattttccgaggcttcgtatttttgcagcgcgttgacgtattccatgagcctggcgacggaggtgttgaaagaaaatgcttccagatcgcgcgagatatttttcacggcgtagtttttcgcgtaatcaagctctttttccgcagctcccgtcccgtccgtcccgcccgtttccgcctcggctgtctttttcaccagccgctcgacgcgttcggtaaattttgcgatggacttgatgccgtcgtcgttccagggaccgccttccgtataactgaatccgaacatgagatagagcctaaaaatatccgaaccgtactcttcgatatacttgtcgggggacacgacgttgcccttggacttggacatacggttgccgtcgggaccgaggatgacgccttgatgaacgagccttttgaacggctcgtcgaagtcgatatagcccatgtcgcgcagcgctttggtgataaagcgggcgtagaggaggtgcatacaggcgtgctccgcgccgcccacatagacgtccacgggcagcatcttgtctgcgatctccttagagaagggctgtttttcgttgtgcgcgtcggggtaacgaagataataccagctggaacacacgaaagtatccaaagtatccgcgtccctcttggctttgccgccgcaggaggggcaggtgcagttcatgaatttttcgtgagaagcgagcggcgattttccgttgggacgaaattccacgtcgtagggaagcctgacgggaagatccttttcgggcacgggcaccacgccgcacttttcgcaatggatcatgggaatgggcgcaccccaatatctctggcgggacaccgaccagtcgcgcaggcggtaattgacctttttacaccctttcccgagcttgttcaaatgcacggcgacggcgtttctcgcctcgtcgcccgaaagcccgtcgaattctccgctgttgacgagaatgccgtcctcgcagaagggaaggactgtttctccgcccttcttttgaatcacctgcgtaacgggaaggtgatatttttgcgcaaaggcgtagtcgcgttcgtcgtgcgcggccaccgccatcacggcgcccgtgccgtaggaatacaatacgtagtccgcaaggtatatggggagccgcttgtccaggaggggatgcgccgcatacgcgcccgtaaagacgcccgtcttttcccgcgccgtggaaagcctgtctatatcgtttgctttggcggcgtactccacataagagtctatttccgccgccttttcgggatgagcggctttgatcgtttccacgaggggatgttcgggggcgaggacgacgtaatcgactccgaaaagggtgtcggggcgggtggtaaatacggtgatgacgtcgcccgtttcgcattcgaaattcacttcgcagcccgtggatttgccgatccagttcttctgcatcagcttggtcttttcgggccagtcgagtccgttcaatccgtccaaaagttcttccgcgtaatcggtgattttaaaaaaccactgcgtcatgctctttctcgataccgccgcgccgcagcgctcgcacgctccgtccacgacctgctcgttggcgagcacggtttcgcaggaggggcaccagttgacgagggcttccttgcggtaggccaatctctttttataaagctgtaaaaacagccattgcgtccatttgtaatactcttcttcgcaggttttgacctccgcggaccagtcgaacatggcgcccatttttttgagctgtccttccatggtttctatatttttttccgtggagtccttgggatggatgcccgtcttgatggcgtagttttccgcgggcagtccgaaggcgtcgaagcccatcggctggaacacttcgaagccctgcatctttttgaaacgcgcgtaagagtccgtagggccgtaattataccaatgtccgacgtggagcttcgctccggacggataggagaacatttcgaggacataccattttttatcgatgttctttttgttgaaattgttttgttttgacttttcccatttcgcctgccatttgctttccaccgatttcatgtccatcatccgttttaacctccgaaaaacgcggcgcgtctttccgccgcctgaaaaaatacttgtaatcgtttttctattatagcctttttcggggggtaagtcaagcaaataaacggattgtaaaaatcgaagggcggaaattttgcccggggtataaataattccgcttttgcggcatacaataatgttgtggataaaataacggtcactcaaagcggctcttccagcccgtatatgtcgtatctctatggcaaagtaacggataaattttcttttcttcccaccgattgcggactggaaaacgacggcgacagaacgacgctcgtattcctttcggaaaaaaaatattgtccctatatccgtaaatataccgaagaaaacatcgcggacgtcatcgccgtgggctataaataccaatatttcgacagaaatctttttctgccgcttttaaacgctgccgagcgggatattcttctcaccgctctcgtcgcggcggattttatcgaggacagagagtacatcagaaaacagatcaggggcttcgaagaatactgcatcgacggagtctttaattttcgcttaggggatctgagaatgcgctggcggggaatcgcggagtacattcccgcggaattcgcctcctcttccctcgaaagttttctcgattttctcatcggggaaagcagcggaaaagtgttcttgaaggacggcaggctctacgacgaggattatcgcgtactcaacaagagcgcgctgatcggcaaagccacgcccgtgagggaaattcttttgagcggcgcggacaatatctattgcttcggcgcccccgacgcgcagaccaaagaatttttgaaaaaatattataaggaaaaggtcgttttctgctgaaaacggttgacaaacgatctttaaacggttaaaatatacactgtaaagacaagtagcgtcgcttttgggattttcagagagtccgccctcggctgtgaggcgggtaatccgggcggacggcgaaaccgctttgcgctttatgacaatatcaatttgaaaagcggtcaaaatcgtatttgacaattaaggtggaaccgcgcaaacggaagtatttgcgtccttaaactcttggtatcacggcggagtttgaggatttttttatacaaaaaacgtaaaacggataacgatatacggaggatttatctatgaatatcattttgaagaacggcgaaagtatgcaggtgcaggaagaatcgacctgtatgcaggccgccgcggcgatttccgagggcttggcgagaaatgcggtctgcgcgaaggtcaacggggaggaagcggatctttcccgcgtactcaaagagggggatactctggaaatcatcacgctcaaagacaaggaggggctgcacgtctatcgccatacctgcgcgcacgttttggcacaggcgcttaaaaccatctatcccacctgcaaactctcgatcggtcccgtcatcgaaaacgggttttattacgacatcgatttcgtgacgcctatcaccaaggaggatttggcgaagatcgaggcggagatgcaaaagatcatcaagagcaatcttcccatcgaacgctttacccttcccagaaacgaggcgatcaagctgatggagggctacgacgagaagtataaggtggaacttatcagggatcttcccgaaggagaaacgatctccttttataaacagggtaacttcaccgacctctgccgcggaccgcacctgccctccacgggcaaaatcaaggcgtttaagctcatcagcatcgcgggcgcctattggagaggggacgaacacaataagatgctcacccgcatttacggcaccgcgttcgccaaaaaggacgaaatggaagcgtatttcaccatgctcgaagaggcgaaaaagcgcgaccataccaaactcggcaaggaactcaaactcttcaccattctcaacgaaggcaagggcttcccgttcttcctgccgcacggcatggtgctcaaaaacgcgctcgtcgagtattggcggcagatccacgacagagaagggtatgtggaagtcgccacgcccatcatgctcagccgcgccctttgggaaacctcggggcattgggatcactataaagaaaatatgtatacgacgaaaatcgacggcgaggactttgccatcaaacccatgaactgcccgggcgggattctcgtatacaagacggagccgcacagctataaggatctgcccatccgcatgggcgagctgggactcgtgcaccgccatgaaaaatcgggacagcttcacggactgttccgcgttcgctgcttcacgcaggacgacgcgcatattttcatgacgcccgaacagatcacggacgaaatcaagggcgtcgtgcgcatgatcaacgaagtatacacccttttcggctttaaatatcacgtggaactttccacgcgccccgccaacagcatgggcagcgacgaggattggaacaacgccacggacgcgctccgcctcgcgttggacgaactgcatatcgattatacggtcaacgaaggggacggcgcgttttacggccccaagatcgatttccatctggaagattccatcggacgcacctggcagtgcggcaccattcagctggactttcagcttcctcagcgctttgaaatggagtacgtgggcgaggacggaatgaaacatcgtcccatcatggtccaccgcgtcatcttcggctctatcgagcgttttatcggcatcctcatcgagcattacgcgggtaagttccccgtctggctttcgcccgtacaggtaaaacttctgcccatcacggagaagcagcaggcgtatgcggaggaactctgcgcgcagatgaaggcacagggaatccgcgcggaactggattcgagaaacgaaaaaatcggctataagatccgggaggcgcagatggaaaaagtgccctatatgctcgttttaggcgagaaggaagcacaggaaaagctggtcgcggtcaggcgcagagataaaggggatacgggcgccgttcccgtcggggaatttatcgcgcaggtcaaaaaagagatcgaggagaaaacggcgttttaaagcgcagggaggaaaacgatgaaaatttccacggaaacgggttctttcaggctctattcggaggacaaccgaaaaattctgcgtcttcttaaagacagcggctttacggcttacgacttttccatgtttaagggcgagctgaaagatcgcctgatagacagcgaagactacgcgctgcgcgcgaaagaattgagggaatacgcagacggaatcggactcgactgtaatcagacgcacgctccttttcccacagccgtcaagggggacgacgcgtataacgaatggatttttccgcagatcgtccgcgcgatagaagtcagcggcattttgggcgcgaaaatttgcgtggtacatccctgcaacgattataccgcggaggaaaacgccgcgctctatcgccgtttcgagccgtatgcccgcaaggcaagggtaaagatcggcttggagaatatgtggaattgggacagacaggcagggcacgcttcgcctgcggcttgttcctctcacggcgattttctcgcgcatctctcgcttctcgacaaagacgtattcgtcgcctgcctcgacatcggacacgcggaaatgaagggactgcaaacgagcgccgtcgaaatgatcgaaacgctgaaagacaatttgcaggctcttcatattcacgataacgatcgtttgaacgacaatcacgaactgccgtacagccgcgccgtcgaattcgctcccattctcgaagccttgaaaaagataggctatcggggggacgtgacgctggaatcgagcagctttatggtcagatatcccttggaactctatccgcaggcggcgcgttttatggcagaggtcgcggcaagcctgaaaaatcgtctggaatcggattgattaaaaaaattgttaaatttaagaaaattatcggtcgaatccgcttgacaaaaaattatggttatagtattataagatagctaagcagaagcgaaccttctcgccgcgcggtattcatcggcgcggctcgataattttcggatggtttagacgtcggtttaaacggttgcaaagattattgcgggtcgcttgtgtttcaagcgacctttattatatttggcgtgaggtgtactaccattaaagaacaacatcagttgaacggagatatccgtgacagggaaatcagagtgatcgcttccaacggcgatatgctcggcgtgatgagctcttcggaggctctgcgccttgcggaagaagaaaatttggatttggtgaaaatttcacccaacgcggtgccgcccgtctgcaagatcatgaactacggaaagttcaaattcgaacaggcgaagcgcgaaaaggaaaaccgcaaaaatcagaaggtgatggagatcaaggagatctatctttccatgaccatcgacataggggatctgaacgtcaaagcgaagaaagcgctggaatttctcgaagagggcaataaggtgaaggtttccattaaaatgcgcggcaggcagatggcgcattcgtccatgggcgtggacgtgatgcaccgctttttcagtgtgctcggcggcaaggcgacgatggacaaaaaccccgccacggaaggcagaaacatcatcatgatcctttcgcccgccaaataatcacaaagaatgtttccgcgcgccttgcgctaaggcagggaaggcggagcagataaagcaggaaaaaatattcggaggataaatatatgcctaaacagaaatcccacagcggaacaaaaaagcgtttttggcttacgggcagcggcaaggtcaacagacctcacggcggcaagaaccataaagcggaaacaaagagcagcaaaagaagaagaaatctgcgccagagcaccctcgtttcttcgactcaggaaaataccgtcaaaagtatgattccctataaggattaagaaataaggagaactcagttatgcgtattaaaagaagtgtaaacgcgctgaaaaagcgcagaaagatttttaagctctccaagggctatttcggcaacaagagcaagtcttaccgtatcgcaagacaagccgttatgaagtctttgaactatgcctatgtgggcagaagaagaagaaagagagatttcagaaagctctggatcgccagaatcaacgcggcggcgaggctcaacggtctttcttacagcaagctgatgcacggactcaacgttgccggtatcaatctcaacagaaaagttcttgccgacttggctgtcaatgacgctcccgcattcgcgcagctcgccgaaaaagctaaagcggctctttgacgaattcccaaaaagccttttagcatctaaaaggcttttttcgtgtaatgtaacatgatattgacttcgaaaaataatccgttgataaaagaaacggctgccttaaaggacaaaaagggcagaagggaacaggggctttttctcgtcgaaggcgcgaagatggcgtcagaatgtgtaaagagcggcatggagatcgaaagggcgatcctatccgaaagctatcgcggcgattgtctttttgataccgccgtccgcgtttccgacgaggtattccgcttcctttcggacgaaaaatccccacagggcatactctgcgccgtcaaacttcccaaagacgccttgcgtcccccgaaaaacagctgtcttttgctcgacggcgtttccgatccgggcaatatgggcgccatcatccgtaccgccaacgccgcgggatacaaagagatttatctcgtggagtgcaccgatccctattcccccaaaagcgttcgcgccagcatgagcggtatcttttttacgaagctgtatacggggactcgggaggaagtgctttccgcgctttcgggcacgcccatcgtcgcggcggatatggaaggggaaaatattttttcctttacgccgcccgcaaaatacgctttggcgatcggcaacgaggccaacggactttcggagaaagtttttcaatccgcggaatataccctgcgcatccccatggaggaaagccaggagagcctgaacgcgggaatcgccgcgggcatagcgatgtatattctcaaaaaagatcaatttataaacagcaatcgataggagttaaaatatgtcaggacacagcaaatggcacaatattcaggcaaaaaaaggtaaggcggacgcggcgaggggcagagttttcaccaaactcggcagggagatcgcggttgcggcgaagaacaatcccaatcccgacaccaacagcaagctcgcggatatcattgccaaggcaaaagccgccaatatgcccaacgacaacattatgcgcagcatcaaaaaggccgcgggcgaaatgaacggttcggattataaggaactcgtctacgagggctacggtcccgcggggtccgcggtcatcgtcacgacgctgacggacaataacaaccgtactgcgagcgacatccgcgccgtcatgggcaagcacggcggctcgatgggcagcacgggctgcgtttcctacaatttcgacaacaagggatacatcgtcgtcgaaaggacggtggaactcgacgaggacacgatgacggagtacgccctggaagcgggtgcggacgacgtggctgtcagcgacgacgtgtatgagattttcaccacgcccgagagcttttccgaggtcagaaaatatctcgaagagaagaatcgggaactgatggccgcggcgcctaaaacccgccgcaacgaggaagaagagccgaagatcaaattcgtgcaggcggaagtcgccatgatcccgcaaaacaagatcactcttcccgcggataaggtaaagaccttcgaaaatatgctcgacgctctcgaagagctcgacgacgtgcaggaagtttatcataacgtggatttgcccgacgacgaggacgaagaataaaaatgaaaaaacggtgccgcggggtaccgtttttttcatacagacgctttacatcggcgggtcagatatgatacaatagcataaactcggaaacacattccggagaaaggagaaaacacgaagatgaaaatcgctgtcttgggcgcgggcgccatgggctgtctgtacggcgcatatttaagcaaaaaaaatcaggtcctgatgatagattcctatcgtccgcaggtggaagccatccgggaaagcggcattgcggtcgtcgaaacggacggctcggaatcgtattataaagaaaatatttccgcctttctctcgggagaatgtccaaaaaaggtagatcttgtcatcgtctttgtcaagagcacgaatacggaaacggcgctcgaagaaaataaaaatctcttttcggacgaaactcttgtgatgacgctgcaaaacggagcgggaaacgacagaaaagtaactaaatacgcggattcgaaaaatattctcatcggcaccagcaagcataacgccatcaatctcggttccggcaggacccgtcacggcggcagcggcgtcaccacgatcggcagcaacgcccattgtacggaacctctcgaaagggtggcggaaattttgcgcgcctgcggcttcgaggtgacggtcagcgacgacatacagcgcattatttggagcaagctgttcgtcaatctttccgtcaacgcctttacggcgattacggaaacgcccatcggctatctggcgaaaaacgcctatgcgtggaattttgccaagcggctcatctatgaagccgtggaagtcgcggaagcggacggaacgtacttcgacaggcgcgaggtcctggaaatggtgcgtaaggtgtgcatcgacgacgcgggcggttattcgtccatgtatcaggacagaaaacgccgcgtcaagatggaaatagacgccatcaacggcgccgtggtggaacaggcgaagctctacggcgtccccaccccctataacgcgctcatcgtcgatctgatccacgcgatagagggcgcttacgatttatacgataaaccctgaatgaaaagcggttttcccgaattgaaattttcccacagcgtcggagcggtggtcttcaaagggggaaaaatcgattttgaaaagcttttatcgcgggcggatcgggcgctttatctatccaaacgccgcaaaaatatctataccgttttggattacgacgcgcgggaggactgcggcgaactcccgcactgacatccggacaaaaaaatagggcgcctgtaaaacgcaaaatgcgaaacgggcgtccttctttttttattttgtcagatcccagtcgatcggggcgattccgtattggttgagataggcgttcgtcttggaaaagtgacggcagccgaaaaatccattggaagcggacaggggagagggatgcgcgcattctaaaatcaagtgcttgctttggtcgatgagcggctttttgctcctcgcgtttcccccccaaagaataaatacgacgtgttcttttctttcggaaatcaactcgatgatgctgtccgtaaaccacgcccagccgcatttggaatgtgagttcgcctggtgcgcgcgcacggtcagggaggtgttcatgagaaggacgccttccttcgcccatttcgtcagattgcccgattgcgggatgccgcagccgatatccgctttcagctccttgaagatattttcgagagagggcggtttttcaacgccgtcctgtacggaaaaacacagcccgtgcgcctgtcctgcgttgtgataggggtcctgccccaaaagcaccactttcacctctgcaaacgacgtatagcggaagcagttgaataagtcgtacatatcgggataaacgacgtgattgttgtattcgtcaaacaaaaattttcgtatctgctgatagcgctcgtctttaaaaagaggcgccaataattcgttccaatctcctaaatcgaccatgatttccttcctgtcaaattttttatgggtgttgagtaaatatagaaaattcgttatttatatagataaaatccccaaacgcaatggcaaaattcgcccgaggcaaatttatacttgacaccgtttatcacgacagcgtaaatttcaaacgcgtgcgcctgatgatataaaggatccggtacttttacttttttatgcgtagaataccggggacaatcgaaaatatttactccgaataaagtcactttgccgttcatcccggaggtttcataattccgggattttttattttcatcgaattttctcttttaaagctcttcaaagagcatgggcagagccgctttaaggttttgaagcgctcttttgcggtttgaaagatattgttccgtcgtgctcccgctgcccgccacgtcggagatcgccttaacagcatagacgggaagctgcgcggcgtttgccgcctgaacgatcgccgctccttccatgtcgcggatatccgctttcagctctttggtcaaaagaaggtaatcctcgggagaatcgttaaaacggtcggctgtgccgagattttttttcttcaagggcgcacggaaagaggaaagctttaaatagttttccttgtattcgtccagcgttcctatttttgttccgttcagctgcgtgaggtcgaaatcgaactgtacggcggctttgatctgatataccccgcaaagctcggtggtcttgttgagtccgcccgccactccgaaattaaagatcttgtccgcgtcgaacttgctcacggcaagctgcgtgcccagcgcggcgttgaccttgccgacgccgcagatcacgacggcgacgtcttttccaaaggcgcgtcccacgtgcacctgttttccgctcacgatcagcgagcggaaagtttccgtctgctccaataaaatttccgcttcgctactcaaagcggctacaactccgatcatggtttataactccttttcctatgtaaaaagttccttttttgcctatgtacccaatagtgtaacaaatttttcggaaatatgcaaacgcttgaataggttttttgcgaaatgtagataataaacctatgaaaattcctttcggaggtaaaaaatgaatccatttgaagaaaaaccgcaaaagatcgaaaaaagctttcaaagctggaacaatgtgctcgtcagcccctatgacaagcagacggtggacccttatacccgtcttcgcgtcatcctgatgaacggcacggagttcgaatcggtgcgcctcggtcacagtttcacgcgtaactgcacgaacaacgacgtccgccgcgaactcgccttgatccgccgcagcgagcagatccagcaaaagcgcatcgcgtctttaaagccgatggacgaaaacattttggaacacaccatcggatacgaacagctcgccgtcgatctgaccgcaaatctcgccaagatggagaagaacgactatgtgcgccagcagttgaatttcgcgcttttggaggatttcgaccatctgtatcgctattcggatttgatggagctggaaaaatcgggggatcccggtcgtcttgtcggcgattatacggagattatgcccggcagacctaccgttgcggaatatcgccatcccttcgacgacgtaaacttcaacatcaacagctatctgaacaatacgctcacccgcctgcacgtcaacatcatcacggcggcggagcagcagacgatgaattattatatgaacgtgggcaatctctacgtcagcgatctgggcagaaagctgtataacgaaatcgccatgatagaggaacagcacgtcacgggatacggctctttgaaggattcttcctgcacgtggtttgaaaatctcgtcatgaacgagtatacggaatgctatctttattattcctgttacgaggacgaaaaagacccccgtatcaaaaaaatttgggaacagcattataacgaagaggtcgcgcatctgcataaagcggtggagcttttgcagaaatacgaaggtaaagtctggcagcagctcttcccctcgggcggagattttcccgaattgctcaaattccgctcgcagaaggaatatatccgcgacgtactcaaaagcgtgcgcctgacggcggtggaagagggttttcaggaacttgtcgccgtgcccgacagcttccgctatttcaattacaacaaatcggtcaacggcaacgtggaaacggtcggcactcactccgtcatcaaccttgccatttccgaattcggcaaggattaccgcatcgaaaacaaacagcatcccatcgcggcgctttccaagcgcaccaaggacaacacggaagtcggcagagtcaaaaacgcttaaattttgccggatagaaaaaaggcgcagtttttaaagactgcgctttttttgtataaagaacctgttagaagggatacaaaaaaggttagacgtacgactcttgaacgatacttctccttttggaataataaaatcgaggacggaaaattcaatcgctaaaaaatcaaaagagaatgatatggggataaaaaaaggaaaagaaggtagggatgatagagcggaagggcttagcctaaggagaagtaagcaaatggcaggggttactccttttgcagaggacaagccggggcgtgagagtttgtctgcctatgaacgaccccgcgtttggcgcggggcttgtcagggatcggagataaagttatcgatgaaaaatgcatttctctcgccgaggcagcgggactcaacggcgcattatgagcaaaaggaaaactctttaaaacttctcgttcatcgcgtttacgaactcccggcttttcgccgtcagctccacccaggcgggaaaaaagccgctcgccgtcgcgttgcgcacggaggggatgttcgaccaagcggcgcaatagaaaggcaccttgccccgatcgaggatttccagcgccagtcttcccgtcagggcggaggcgatcccgcgtcggcggtaagagggtaaaacgtcgatgcctatctgccacattttttcgcagtccgcggaggcgcccgccagcccgacgagcttttctccctcgaaggcgccgacggcgacgacgtccagttcctttctcttctcgcagagggcattgctccatgcgggcgtataaaatcggcaaaagtccttcggaaaaagtattttcaaatcgaaatcgcagggcggcgctttgagttttttcagatcgggcaaaaaatattccgccataaaacatagcctcagatctcgcctttgaagcgcgtcgttcaaaacgtgcagattcggggtttcaaaacagtgttcgacgggatagcgatcgatataggcgcgcacgacgtcggctagatcttcgcgcgcggaggcgacgatattgttgccgtaggacacgagattgcagtcgaagggcagggagaggtattttctcgccttgtcgctcgcgcgggacaatacgacgacgttttctccgcgcagaaaatcgtcgggcgtgcagtggagatcggcggcggactgtttcagcgccgtttcgaatatttcctgattcgtcaattttatttttccctttcgtttcttgctttttttagaaaaatgtgctatgatagtcgggaagaaaaagaggcgttcaaagacggataaaagtcggctcgtcgtccgcgtattcgcggcagagcgtcacgatgtgattctctttttcgaggtgcgcgatacaaacggggagttcgaggtcgagatagaacacctttccctttaaataggcgatttttttgaggtcggaggcgatcgttcctcccagccatttcacgacgctctccttggttgtccagtgcctgaaaaattccgctttgccttgtatttccaaacgttcctcgacgggaaatttcgagagtacgggcaaataatcgatctcgcgggaaaggcattcggcgtctatgccgatattgacgtcggcaactgccgcaaaacaaagccgattcgtatgcgtgagggaaaaaaaagggggagaggcgcttaaaaaaggctttcccgtttcgctccgcacgatttcggggttatgtagatgataatattcggagaagattctgcgcatcatttgctcggaggaagaaaaagcgcccttttccgcaaaaaagattttttccatggcttcattataacaggaggagttacaaatgtcaagagcggacgccgcaaaagaatattttatgaaagggtatgcctgcgcgcaggcggtgcttctggcattttcggacgtcacgggattggaatcggaaatagcgctgaaaatttctctgccgttcggcggcggcatggggcggctccgccttacctgcggcaccgtcagtggcgcggtgatggtcctgggaacggtcttttccaaagcggaaatcaatcccgaaaataaaaaagaggtctatgccgccgtacaggaattttccgggcgtttcaaagcggaaaacggcagcgtcgtctgcggcgagctgttgacgggagcgcatttaaaggcggatatcgcttccgttcccgaagcgcgcagcgcggaatattacaggaagcgcccgtgtcccgagctcgtgtattccgcggcgaaaattctcgaagaatatttggaggaacggggaaaactcgacggggacgctctttccgcggggaaacactgagaaggtccgataaagaaaaaacgatcgcgcctaaaacttgcggacgatctcgcgtcgatgagaactatatcatacgaacacgatgaaaattgtattttttcgacgaaagaaaaaaaaggcggtttaaatggcctaaaaaaacgcaggggtttatctgcccctgtgtttttctttgcgttttagctgtttccgttcaaaacggcgcagtttttcgacctcgcgttcttccctgtcgagcactttctgctccgatttgctctgttcccgccgcagcgagagcgccctttgggcttttgtgccgatgccgacgttttccatctgcttccgcgcttcccgctttgcccgtttgggacgcatttcccgttcctttatggccgcggcgacagccggactgaaaagaagcccgtcgtgcctatcgagaagaaagcggtacacttccgcgtccgtcggctccgcgccgaagatcactttgcatacgtacagtttcccgtcggacacccgctcgaagattcccacataaaacggctcttcgaaaaacacggtcagcttttcgctcgtcctgtccataacgaatcctccttttgacgaattcacaaagaagggacgaccaaggaggagggttacttatatccgaggggatacgtccggactaccgaccggaaccgcgctcgaaaagcgcgctgtgtttttatctttgcgtttgttttatatagagcgcaaaagcgctttataccgattatttagctaactgattttttataatttcctttgcgcctttgtccgattttttcgacgacggcgcaggaggtctttttcgcggcgttccctttttagggaattgtccgcgtcgattatttggcgctcttggaaacgttgaagtaatactcgacgacgtcgccgtcctgcatgacgtattccttgccctcggaacgcaccttgcccttctccttggcagcggcgacggaaccgagctcgacgagcgtttcccaatagacgacgtccgcgcggatgaatcccttttcgaaatcggaatgaattttccccgcggcctgaggcgctttggtgcccttgacgatcgtccaggcacgcgtttccttttcgcccgcggtgaggtaagagatgagccccaaaagcgcgtatgattttttgataaggcggtcaagaccgctttccccaagcccgaactcttccataaacaccgctttgtcctcggcgtccatctgcgaaagctcttcttccgtcttggcgcagatgacgagcacctcgctcccttccttcgccgcaaattccttcactttgacgacgtaggggagggagttttcctccttgcccatatcgctctctttgatattggcggcgtagatgacgggtttgactgtgaggagaaaaagactgcgcataaactcttcttccgcatcggcgacggcaaaggtgcgggcgggtttttccgcttcgagatgcgcgtacagcttttcgaggaaagcgtattcgtccgcggcttttttgtccgcgccgccgcgggcgttgctcttgatctttccgagcctgttctgcaccgcctccatatccgaaaggatgagttccaaattgatggtttctatatcccgtacgggatcgatggaattttccacgtgcgtgatgttcgcatcctcgaaacagcgcacgacgtgcacgatggcgtccacttcgcggatatgggagaggaatttgttgcccagtccctcgccgcgggaagcgcccttgacgagtcctgcgatgtccacgaattcgatgacggcgggcgtcacttttttgctttgatagagggcggcaagcttgtccagacgctcgtcgggcaccgccacgacgccgacgttcggctcgatggtgcaaaaaggataattggcgcattccgcgcccgcatgggtgattgcgttgaaaagagtggattttcccacgttgggaagacctacgacaccgagtttcatgattcgtttttccttgtccgatattttaaggcgacgcttttttccgcgaacgcggcttccgtttttgtgcgggaacacggcgcggggtcgccccgattgattttttctgctatattataatataaaattcgaaaataagcaaattaaacttgctcaaaattgaaaaatatgttaatatatctcttgtaaaaatcgattcgaaggttaaaagacatggattacaagaagtatatttcggagaaactcaaaatcgacggcgtttcggcagaggagatttacgattgcctcgcccttccgcccacgacggaaatgggggactatgcgcttccctgcttcaaattcgctaaaattttccgcaaaagtcccgcggcgatcgcggaggaactcagggcaaatatctctcccgacgaggtgatttctgaaatttccgccgtcaacggatacctcaatttcaagatagacaaaacgcagttcgcaaaagaagttctcgaaaggatatttcaggaaaaggacaaatacggcgcctccgacgaggggcggggcaagacggtctgcatcgattattcctccatcaatatcgccaagcctttccatatcgggcacctttccacgacggttttggggggcgctctgtaccggattttaaactttttgggctataaggcggtggggatcaaccatttgggcgattacggcacgcagttcggaaagctgatctccgcctataagcgctggggaaacaaggaaagcgtggaaaagggcggtatcagggctttaaacgagctgtacgtgcgttttcaccgcgaagccgaggaacaccccgagtacgacgaagaagcgcgcgcgtactttaaaaaaatcgagcagggggacgaagagtgcctcggacttttccattggttcaaagaattgactttaaaggacgtgcagaagatatacgatcttttggatatccgtttcgattcctacgcgggagagagcttttattcggataaaatgcagcctgtggtggacgaattgcgggaaaaaggactccttgtagaaagccgcggcgcgcaggtggtggatctcgaagactacggaatgccgccctgcatcattttgaaatcggacggttcctccctgtacgccacgcgggatatggctgccgctatttaccgcaagaaaacttacgattttcataagtgcctgtacgtcgtcgcctatcagcagaatcttcatttcaaacaatttttcaaagttttggaactgatgggaaaagagtgggcgaaagatctcgtgcacgtggcgtacggcatggtgtccctcgaagagggaacgatgtccacgagaaagggcaatgtggtgttccttgaagacgtcatcggtaaatgtatcgaaaaggcgtatacgattatcgacgaaaagaatcccgaacttgaaaacaagcgggaggtcgcggaaaaagtcggcgtcggcgcggtcattttcggcgcgctctataacaataagatcaaggacatcgttttttcctacgacaaagtgctcagtttcgaaggagaaaccagcgtttatgtgcagtatacctgcgcgcgggcaaattccgtgctcgaaaagggcggcgtgcccgcggtttatgaaattcccgagcttgaagtttcggagttcgagcttatcaaggctctcgcaacgttccccgcgacggtgaaggacgccgcggataaatacgagccttcatatatcgccaggctcgcggtggacgtttcccaaaaattcaacaagttctatatcgactgcaagatcctcgcggcggaggacgaaaagaccaaaaatttccgccttgcgctgacggcggcctctttgcagactttaaaaaacgcctttgctcttctcggcatcggcattcccgacaaaatgtaaaaaatcaaaaattgtcgtagtaagtcttagaaataggcttaaaggagaaaaatgttctttattcgagataactgctcggtgcggtcaagaaactgacggcggatcgaatcgagtaaatagtcgttgtcagtcggccgcgcctttcaagataaattttttttgaaaaggagcagttgaaatgaataaaaacgaatggaaacaaaattggctttcggaagaacgcgccgcgcatattcgcggctgggatttttcccatatagacggcagatatacggaagaaaccgatctgccttggagttataaggaagttctgctttcctatttaaggaaagacgacaaacttctcgacacagacacgggcggcggggaatttctgctgtctttgcgtcacgcggcgaacagaacaagcgcaacggaggggtatcctcccaatgtcgagctgtgtaaaaaggttctgcttccgctcggcgtggattttcgcgaggcgagagattataaaaagcttccttttgacgacaatacgttcgacgtggtatgcagtcgtcacggcagttatgaaataagcgagatcggacgagtcttgaaaaaaggcgggatttttgtcacgcagcaagtgggcgaggaaaacgacagggaattgacggagcttcttttgcccggcaccccgaagccttttcccggttggaatctttcaaatcagcggaaaaattgcgaaagagcggggttttccgttttagacgcggaagaggcttttcgtcccattctctttttcgacgtgggcgctttggtttggttcgcaaaaatcatcgaatgggaatttccgggtttttccgtcgaaaaatgcattgaaaggctgctgcgggcgcaaaagatcttggaaaacgagggatgtataaaaggaacgatccatcgttggcttcttaccgcccgaaaaaacttttgattttatggaaatattcaaaagaagcagtttaaaatgtttataaaaggacgctttccgcagaattttcggaaagcgcctttttgtttttacaaattttttcaaaaattttcgaaaaaggtattcccttttgccgtaaaatatgctatgattagaaaagtacgttaggagtagacatggggaaaacgaccgcatacgaaaatttaatcaagacgctcaatccgcataaggaggcggataaggcttggttcctcgaacttttggatacggaaaagcaaaaatcatacgaggacgggcacatggcggcagtgatgcagatgctgcggatttcccatatccgcgagcataaaatcaaaattatggaagcgcgggaggaaatcaggcgcatccaagcggaagaggagcaaaacgcggaaaactactgtaaagtgaccgcgcttttgaaagagatcgacgagcataaaaaagccatcgattcttatcgctgttttttcgacgagccgtattttgcccgtatggatttaacagaccctctcgaaggctacaacagctattacatcggcaaaaagggggacgtcaagctcgaaatcgtcgattggcgcgcgccactcgcgcgtaaatattatcagaaaagccgcatttccttttccatcaacgaatacgattataagacgatcctgcgccgcgccctgcgcaccaaggacgggaaggtgctggatttcaagaatgagtttttgtccgtcaaggactatctcgcgcccgaggagatcggcggacgggacgaggaaattctcttcgatccctatcttcgggagatcatcaaaaaccgcaaggaagagcccgcgatcaaggatatcatcgaaacgatccaggaaaaacagtacgaaatcatcacctgtcccgagagaaaaagtttcgtgctccaaggctgcgcgggcagcggcaagacgatggtgatgctgcatcgcctcagttatctcatgtataacaacgaggagatcaaatcccgcgacgtgctggttttgacgcccagcgattccttcaacgccttcatcgacgaactcgccgctattttggaactcgaaagggtcaagacgatcaccatttacgaatactttttgcaggtcttgaagaatgaaaatatcgatctgacgctgaaaatcgatcccgcgtccaaggaggctcccgactatctcgcctatatttactcttccgccttcgtcaaggacgtcgaaaagaagctccataaggtgtacgacagtctgtacggacttttcacgggcgccgagtgccgggaatttatcgaccgcatctcggacgcgtgcaaaaggcagctggaagcgtacgaagccatcaaaaacgcttctctgcgggtgcgcaggtcggtgctcggcgagatcaaggaaaagaaggaagggggactttattacaccaagcccttccgcgacctcatgaactgcattctggatatacaggactttttcgacggcacgctcaaaacggagaaagcgaaaaatcaaagctatttttataaacagttgatgtccttttataagagcgcggcgtttgcggcgcggcataccgaacgcatcgtttccgaggcggcggggacgctggcggagctgaaaacttccctcgaaaaggaaatatccgatctgaaacgttatcgccagcggatagggcaggcggaggtctacgcgtatgccgacaggattcagaggcggactctgctcctttcggaaatagaaaaagtggcggaaaaagtcctctctatcggggaaaataatacggcgttctcggaattttacgaatatctccgcggcgaaaagaattttgcagcgctcggcggcagcgaggattttgtggacgtggtgcgtttcttttatagggaaacggtcaaaaaatcaaagtttaaatacgggatgaagaacagaagaatgtacccgtccgacgcctatgcgctctgtatgatctgcgcgctcctcgatcgggaactcaccccgaaatattccttcgtattcgtcgacgaggcgcaggatatttccgaaaacgaatacgcgctcttaaagaggatcaacaccaacgcctcctttaacgtgttcggggatttggaacagaacgtcacgtcctggcggggcgtcagaatgtgggaatccgcctttcccgatttcgaggtgtttacgctcaatcagaattaccgcaataccaatcagatcgtggatttcgtcgcgtccgctttgaaggtggatatgcagtcgatcggctttgacggacccgaagtgcgacatatccccgcgcgcggcgtcagcgcttttttccgcgacaaaaagggactgaaagcggtgatctgcgcggaatcggaaaaggagaaatatgcgagaaaagcatacagtatcgtttccgaaaaggggcgcatctcccgcacgaagatcaatctgatgacggtttacgaaagcaaggggctggaatttacttcggtggtggtcattcccgagaatatgtcgcccaatgaaaaatatatcgcgtatacgcgcgctttgaaggaactcgccgtcgtcgaatagaacgggagaattttgcctcgtcccgttttttgagtcggagcgcgggataaaaatacttttacgcattcaaaaggagaaaaagagatctttatgaaaaaatacgatacgtttttggtcgatgccgacgatacgctgctcgattttcacgcctcctcccgcgccgcgctggaagcggctttccacagctttcaaaaggaatggaaagaggaatacgccgaggaatttttttcctttaacgacacgctttgggaaaagctcgaaagaaaacaaatcacgcgcgaaaggctcctcaaagagcgctttcccgcctatttggagcggctcggcgtcgacgacgttccgggcgaggaattcaataaaaaatatttggactatctggcgacgcacccgatttatatggagggcgcgaaagaatttctcgaagccctgaacggggcgggaagagtatatatcgtcacaaacggcacatactcgatacagacctcccgctttgacatcgcggggctttggcggtatatcgaggacgctttcatctcggagaagatcggctgcgacaaacccggaaaggcatataccgattacgtactgtcccacattccccgtttcgacgggaaaaagacgatctggataggggacagcctcacggcggacgttaaggcggcgaacgacgcggggatagagtgtatttggtataatccgaaaaataaaagcacaaacggcaaggcttttcccgactttgaagcggattcttatacggaaattctggaaattttgcaaatatattgaatttctgctctcttttttcgacaaagtatttgaaaaaaacgaaaaaaagtgttataataaaaaggaaaatgcggaagtgcgaccctgtacggattttttcgccttctatttccgcacggctcgcctgcgttatcacaaaagtaaggagcggaacggaatattcctccctatactctcgtactatacgatataacgtcggctatgccatcataaaaaagcaagaattttattcgggcgtttttgcgaaaatctgtcccgagtgagagaaaatcatacggtttgaggaaaaaatggcaacggataacacaaaacaaaccaaaactcaggcgtcaagttacagcgcaaagaatctcgaagtactcgaaggcctggacgcagtgcgtatgcgccccggtatgtatatcggttcgacgggaatcaaggggcttcatcatatcttatgggagatcgtggacaacgccatcgacgaagccgcgaacggctacgcggataagatcaaggtgacgctgcacaaagacggcagcgcttccgtagaggataacgggcgcggcattcccaccgacattcatcctaaggaaaaggtgtcgggcgtacagctggtattcaccaaactgcacgcgggcggcaaattcgggcagggcaactacgcgtattcggggggactccacggggtgggcgcctccgtcaccaacgccctttccgaatggctgaaagtggaagtctatcagaagcacgtctttaagatgagctttaaatcctattacaacaaacgcaagggaaaatacgaatcgggcgttcccgacggtcccttggaagatacgggcatctccaccaaacgcacgggcacgttcgtcagattcaaacccgacgcctccgtgttttcggaaacggagttcgacctcgaagaagtcgaggaacgcctcaacgaactggcgtttttgaatcgcggtctggaaatcactctgatcgacgaacgcatctccatggcggaggcaaagcgtagggaaagcaatttgggccgcgacgaagacgaggacgcgggcgagggaggcgaagagccggcgcccgacgccgcgcagcctcagtccctgttcgaagaagtggatatggctgcgctcgaaagcgagccttaccgcatcacctataaatataacggcggcatcagcgatttcgtgaaaaatctcaacgagggaaagaggaccttatattccgttcccgtctattatcaggcgacgaagaacgggattttggtggaatttgccattcagcacacgacggacttcacggagagcctcttttctttcgtcaacaacattccgacgcccgaggggggctatcacgaagcgggcttccgttcgggactcgtcaaggcgctcaacgactatgcgcgcagcaacggctttttgaaggacaaggaccccaattttcagggcgacgatttccgcgaaggtctgacggcggtattgtctatcaaaatgcagaacgtgcagttcgagggacagacgaagaccaagctcggcaatacggaagcgcgcgttcccgtggaatcgacggtcatcgagggactgaactccctgatgggcgcccgcggctataaaaagacgtttgacgagatcatcaaaaaggcgcagggcgccgcgaaggtacgccttgcggcaaaacaggcgaaagaaaccgcccgcgcgaaaaacagcatcgacggactcactctcatcggcaaactcgcctcctgttcgggcagaaagcccgaactcaacgaaatgttcatcgtggaaggcgattcggcgggcggtacggcgaaacaggcgcgaatccgtcagtttcagtccattctgcccctgcgaggtaagccgctcaacgtcgaaaagaagcgtttggatcagatcctcgccaacgaggagatccgcaccatcatcagcgccatcggcgcggggctggatcccgacttcaaaatcgataaaatcaactatcataaagtcatcatcctttccgatgccgatcaggacggtatgcacatccgctgcattctgctcaccttctttttccgatatatgcgcccgctcgtcaacgccgggcatgtctatatcggtatgccgcccctctataaagtctataagggggacaaggtggagtacgcttacgacgataaggaactgtcgcagaagatagcgaagatcggcaagggctatcagttgcagcgctataagggactcggggaaatgagcgcggaacagctgtgggaaacgacgatgaatcccgcctcccgcaatctcatgcaggtcacgatcgaggacgcggcgaaagcggaacgcatgatcacgactctcatgggcgacaaagtggaaggcagaaaggaatttctcgcaaagtacgcgaatttcaataagaaagacacgttcatggataagatagagaagaaggagggcgcaaatggcgaagagtaagaaagagcctgaaaagatcgaacccgcgggacagctttacgtagagccgctcgaaaacgtccttcattcctccatgcttccctatgcggaattcgtcattctcgacagggcgctgccccgcgtcgaggacggcttgaagcccgtgcagagaagaattttatatacgatgaacgaaatgggcttgacgcccgacaaacctcataaaaagagcgcgagaatcgtcggcgactgcatgggcaaataccatcctcacggcgacagttccgtttacgacgcgatggtgcgtatggcgcaggatttcaacatgggcaagacgctcgtcaacggtcacggcaattttggaagcgtggacggcgaccccgccgcggccatgcgttatacggaggctcgcttggagcctttggcgctcgaacttttaagggacatcgacaaggaaacggtacccttttctttaaatttcgacgacagcttgaaggaacccgacattctgcccggcagatttcccaatctcctggtcaacggcgcttcgggcatcgcggtggggcttgctaccaatattcccacgcacaatctcgacgaagtgatcaacggcgtggtggcgtacatcgacaatcccgctatttccctgggcgaaatgatgaagtatatcccgtcccccgattttccgacgggcggcatcatcatcgcgaacgagctgatacaggcttataaaacggggcggggcaagatcacccttcgcgcgaagatcacggcggaggaaacggaaagcggaaaaaccaatctcgtcatcaccgagcttccctatcaggtgaataaggcgcagctgatgcgcaagatcgcggaaatgcgcgaggaaaagaaagaggaactcgcctgcctcgattacgtggcggacgaatcggaccgttcgggaatgcgcgccgtcatccgcgtcaaaaaggatacggacatttccaagctcttgtcctatctctataagtacacggatctcgaagtcacgttcggcatcaacatggtggtgatcgcggacggcaagccgcagcagctcggactcatggagatcatccgtcactacgtcaaatatcagcagcagatcattctgcgccgcaccctgttcgatctgcatcaggcggaacagaggtgtcatattttggaaggtctgatcgtcgccgtccgaaacatcgacgaagtcatcgccatcatcaaaaaatccgaaagcacttcggacgcccgcaacaagttgatggcgcgtttcgaactgacggaaattcaggcgcaggcgattctcgatttgcgcctcgcccgtctcacaaaactcgaagttttcaaactggaagaggaactcaaagagctgaaaaagctcatcaaaaagctcacggcaatctccaagagcggggagcttcaattgcaggtcgtcaaggaagaaatcaccgaaatcaaggaaaaatacgcttctccgaggcgttcccgcttggttttctcgggcgaggaagcggacgagcttttgtcccgcgccagcgaaaagcagcccggcgtgaagtgtacgctcgtctatacggcggacgataagttcaaagtgttaacgggcaaacaggcggacgctttgaacaaaccgctcgaaggtaaattcaagccgcagctcgtggcgtgctgcaagctggaaacggtgacggaccgccgtatttttgcctttaccaatctcggcaactgccataaactggacatttactctcccgattacgaatgtaagctctcggacgcgggcgtttccttgaaggaactctccaaagatgcggaggaggacgaaaaggtgatcgcgctctttgaaataggagagcgtttccccgtcggaaaattgatgttcttcacgagaaagggcatgattaaaaagacggaatggagcgaatacgacaatcagcgaaaagacagtttcctcgccgtcaagctcgtcgaggaggacgaggtgatcgccgtcgaggaggaaacctcggaagaggacaccatcatcatcgtcaccaaggacggcatctgcctcaacgcgaaaaaggacgacgtgcctacgcagggcaggatcgcggcgggcgtgcgcggcatcatgctccacgaaggggacagggtagtgctgatgtcccaaatcaacggcgagggcgagatcatcatcgccacgtccgaaggaaagttcaagaaggtcatctcttcccaaatagagccgatgggcagatataaaaagggctcgatgatcgtaggactgagagagggcgacagcgtccttttggcaagctacgtcacgaagccgtatacgctcgccgtcgtggagaagaacaacgcggtgtccgaactttccagcgaggacattcccatcgccatgcagagcgcgaaggcgagaaagctgccccgttacgcagaaggcgcggtggtaaaggtccttccgctgccgtatcggacggaaagttaaggaactataagaaaaaggtcataacctctcaaaatccgacataaatatagaccataaatgtatttcggaggtcgaaaggtttgtgggattatattgaggaacgagtgaggaagagcgcggaatatatcgtcgccacgggctgtaccgtgcgcgcgtgttccgcgcatttcaatatcagcaaatctacggttcataaagacgtttccgaacgtctgaaaaacatcgatgcggagttatacgaaagggcgcgcgcggtatcggacagaaatctgagcgaaaggcatatccgcgggggcatagctaccaaacagaagtatctcaaaaccgacaagacggaggaagaatagcttttcaggctgtataggggaccgtgggagagaattcatttctctttcgcggtcttttttaaaaaagcattaaaaattccctttcaacgcttgaaattttttgtcggatatggtatgatgaaaaggaagaaaaagggacaaactctttatagacagaacaaaaggagcataccatgtataacgtgagaaaggttacggaggacgtcgtctggatcggcggcaacgacaggcggctcgccctgttcgaaaacgtatttcccattccccaaggagtttcttataacagctatgttttgaaggataaaaaaaccgtccttctcgatacggcggacgacgccgtttccgccgtatttttcgaaaatctcgtccatgcgctggacggcagaccgctcgattacgtggtcgtcaaccatatggagccggatcactgcgcgctgctcgcggacgtcgtgcgccgctatcccgacgtcactctcgtcggcaacgccaagacgttttccatcatttcaaacttttacggactggaaaaagccaagcgcctggtggtgaaagagggagattccctcgcctgcggcaaacacaccctgtatttctatttcgcgccgatggtgcattggccggaggtgatggtcacttacgacgccaaggataaaattctcttttccgcggacgcgttcggctctttcaaatctctcgacggcaaccttttcaacgacgatgtcaattacgagagggactggctggacgaggcgagaagatattacaccaatatcgtgggcaagtacggcgtgatggtgcagggcgcgctgaaaaagctctcggcgctcgacatcgcgtatatctgtccccttcacggactcgtctggcgaagcgatttttccttccttctcgaaaaatacgataagtggagccgctacgaagcggaatccaacggcgtcgtcgtcatttacggctctatctacggacacacggaaaacgcagcggaagttctcgcttcgttgctttcgcaaaagggcgtcagggacgtccgcgtgtatgacgcttccaaaacgcacgtgtccgaactgattgcggagattttccgcgtcaaaaacgtcgtcctcgcctcgtccacttataacgcggaaatctatattcccatgaaaaaccttatcgcggatatgaaagcgctcgcggtgcagaataagaatttcgcgctgatcgaaaacggcagctgggcgccctcggcgatggcgcagatgaaggaggcgctttccacgctcaagaattgtacgttcgaggacgtttccctcaccatccgctcggcgctcaaagaggaacagctctcttcgctcgaatcgctcgcggacagccttgcttccaaaataaaaatttagacggttttcggagaaatcatgaaaaagacggcggtcatagggctcggcatcatcggcggctcgatctgcaaagcgcttgcgggggcgggatatttcgtcgcgggacgggacatcgataaatcgacgctatcttgcgccctcaaagagggcgtcgtgcgggaagaggcgcaagagctttcccgatacgatacggtatttctcgccgtgccgccccgtgccgccctggctctattggaggagggggattttaaagaggacgcgctcgtcgcggatatttgcggcgtcaaagcggaaatggaaaaagccgtgtactcccgtccgagaaaatatcgctacgtcggcttgcaccccatggcgggaaaggaaacgaacggtctttcctcctcgtcggcggatttgttcgtcggcgccaatctcgtcgtcgtcctttcgcggaatacgaaagagagcgctttaaaagaggtcttggagtatgcaaaggcgatgggattcggcagaattacgcagtgcagcgcacaggagcacgacagaaagatcgcgctcacttcccagctcgcccatctcgtgtccaacgcttacgtgaagagtcccgaagtaaaggactgcgagggctttacgggcggcagctttcaggacatgactcgcatcgcgggcgtagatgaaaccatgtggtcgcagctttatctgttcaatcgcgaaaatatcttatcccagctcgacggactgatagaacatctttccgagtatcgggaagccatttttgaagggaaggaagagcgtctgaaagcgcaattgaaggcgggaagattgcttcgggaagccataaaaagcgaaaaatcatgattttctaattcttttcataaaaatattgcataataaagtttacttttcacataaactctgttataatatagatgggtatagtaacgatcgacagttgtgaatgcaatggagccttgttttttaaaaatcgtaacatcgaccgacggcgtggaaagcgtgttttcgcaggacgcggaaatggagctaactccgttgtccgcggttttgtggtatgaggagaaagacgggcgggtatgtctgcgtttgaaggacggccgcgtttccatcgagagagagggcgattatattctccgtcttcttttggcggaagggaaaaggcttcccgggaaaataggtcttcccggcgccgagggcgaaatcgaaacggacgcgcaccgcataggctatacgctcagggaaagctcactgttgctgtcgatgaaatacacgctgcgtttttccagcggaaagcaggagatgaaactcacgctcaccgcgcgcggcaaaaggaattcggaggaaaaatgaaaatccagtatttggggcattcctgcttcaagctaaccgagagtacggggacgacgatcattacggatccctataagggaatcggttacgaattgcccaaggggttgaaagcggatgcggttacggtgagccacagccatttcgaccacaatcatgtgaaagccataggcggtcatccccgcgttctcgacaaggaaggtttttatgaattgccgggcgtggaaattacgggtatcaagagctatcacgacaatcagggcggcagacagcggggggaaaacatcatctacaaattccgcatggacgggctggaagtctgtcatttgggggatttgggcgaggaatgttcctcggaacttttggagatgatattgcccgtcaacattttgttgattcccgtcggcggcacctacaccgtcgacgcggaacttgcgaaggagtacgtggacaggatcatgccggaaatcgtcatcccgatgcactacaaaacgcggagtctgaatctc

SEQ ID NO: 762 - DNA, 32759 bp, Unknown
  16S sequences of unknown bacteria
ccgccgaagttctgccccgaatgcggagatatatttgacgataacgacaaaaaatgaaagcaccgatgagggtgttgcttatcttgattctgttcacgttttttgttttgggtattacagccgttatcatatgcatgcgcagcagccgtcactctgcgagaaacaccatcatagacggcgacgtgacggaccgccctgttcctccccgaaaatttgagctgccagatattcccgagagcgctgcgcttaacagcctcaattggggacaaagctcgtcgaatgaatatgaatgcttttcgtttgatttgaatagggacgaaaactcctacaaactctccgggcgctatgtcgatccggagagtggcgggaggattgatcttgaggatgtactgcttaatgacgagcagctgaaaagcgttgaaaagatcctgaaaagcggcaagtttcggtgctataccgaacgaatctcggaaaacaacgtatacgacgaagccgacagcctgctgagcgcgggctggaggctgtcggacggcagcattatttcggttaaatacaacggcatagccgcaaaagagcttttcaaggtattaaaagtgttactgcggcagtaaggcaagctttccatcagaaaagcgggaaataattttccggatgatcagctttaataatgtattattactttatggagggtgttttatatttgtttgccaaaggaggaacaattgtgactgaaaaaccgaaaaaaaagaaaaaagatatatattccatattgcttttgtttctgggtatcggcttaattgctgccggaattatcggtataatttcaagtcgtaccgacagtagggaatataaaaactcaaccgatatacggaaaattcccgccgttattgatgacttttcaacccacgacagtaaggatgattccggagatgttaagtatacaacatataaatttaaagtttcatatgttattgacggaaaaacctataagggaaaatgtgaagaacgtgtctgggcaaggtcgagcagctacgaaaaaaaatatacctatgataaattgagaaaaggcgacacaatagacgtcgaggtttacaaaacctcaaaaggcgattacaagatttctcctgagggaaatcccgttgattttctgctctattgtgcggcaatccccgtcggcttgttctttgttgttataatgatatgcgacattacaaaagacaaccgaaaaaagaaaagcgaaaacgaaatgatcagcaaggaataaatcagaggtatttttatggatttatcagtatcactgtttattgcggcttcctttgctatattatgtacattctatatcggtaataaaatactcaccatagattattcggaatactgttccaaaaattctaaaaaagccaaaatggaaagattgcttgcgaaaaaggacactccccttcagaattcaaaaatccgaagagatataagaaaagcctttgaaagagttctgattccgctcggaaaagcggaccaaaaacttctccctgcaagaatggatatgacattccgaaaaaaaattgtcagtaaaatcaacaggcttaataagaataacctttgctgcaatatttatgttacagatgttgttcccgttcctaaaaatgactttgaaacatggagcgatgacggcagagaatggcgggaatcggttttaatgtgcagcacactggagcgttttgagtcaaccgaggataacacggttcggcatgagatataccgtaaaaattcatctctcagaatacttcagtcaagacacgtccgcagcgccgaccgaaatgaaaaaaagaaaagctattattccgatatgctgagaataacgtgtccgtcctgcggcgcagatgtaagacttgtcagtcagcaggtgatctgtgaatattgcggtgccgttattaaaaacgagttttacgattggcagaccgaatcgtttgagctttacgaatctatcagcacaaatctgaaaagattttttcaactgcttgtgtccggctgtatacttttcttatgtgtgttcctgtgtctctatttaatcaaggataccgagatttctctcgctgccggtgtcggcgcggcggttcttgctttcggagtaatcatcacaccgattatttacggaaaagttaagcaagaaaaacttgcgggaaaaatcgcaagatattccgagaattatctcagagcctgcttaaacgaacacttttgggagaatgaaagcgacgaagacctgcttgatttcagcgttgatacaattaagcttttgaaagttgcccacacagaagaaacaacaaccgttacggctgacattttcggaacaaaaacctttcttcccgaaaatcaaaagccgtttacaaaaagatttaaaaaaagattagttatacaaagagcaaggtatcccgaaaagagaaaagcggacggcgagttctatgtcgaaaaggattgtccgtcctgtggtgccaattttatgcctgatgaaaatcactgctgttcgttctgtgggtttggcttacaagtcaacaatgcaaaatggattgtgcagaaaaataaataaaaaacggaggattacattatgggactgtttgacaaaaaatactgtgacatctgcggtgagaaaatcggacttctcggaaaccgcaagctggaggacgggaatctctgcaaggactgcgcaagaaagctctcgccgtttttcagcgaacggcggaactcgaccgtagaagacatcagacgccagcttgcttaccgtgcggaaaatgaaaaaaagcttgctgatttttccccgtcgatcacctttgacgggagcaaaaaggtatatatcgatcccttaggggaacggttcgtcgttaccgggctttccaactggcgcagcggcaaccccgaccttattgcgttttcgcaggtgctcggagtagacacagatattcaagagaataaggaagagatttatttcgaggattccgatggaaataagaagagctatgtgcctccgcgttatacatgtgactatgagttcaatgtaacgatccgggtggattcaccctggtttgatgaaatagagctggagctgagcgacggaaaccgtcccgacagctgctacaccgatttgtaccgcgaacatgagagaagaatgcatgagcttgaggatattctgatgcgccgggatgagcgatatcgcgtttgggatggcgacggtatgatgaacagggtaggatgcatagacaaccgtccggagaaaaccgcttcggttcctcgtccgacggacggtgaggcatgggtatgctcttcctgcggctcgcaaagcaacggtaaattctgctcaaactgcggtgccgtaaaacccgtaacgtgttcctgctgtgaaaattgcggttggagcccggcggacggacagagtttgccgaaattctgtccggagtgcggcagaccgcttcaataaaataatgaagcataccgtatgtaagattgtgactgttgcggttgctctcctaccggttttcgggcttttcggctgctgcggaagtaaaaaatacactgccggtgatatcgttttaatcaataccgcttattacggatcgggaaggaatcctgtgtattcctttgccctgaaaaaagaggagggctgctggttcttctctgcagactgtcctgtggaaaatcagaaggagcattacacctcgtttgcctcgatcccgataacgtcggaagatgcggaggatttccttcggattatctgcgaggacggtgagatagagaggctttacaagcatcgtaatccgatacgactttttcttatatccgacgcaccggcacgcagttccggaataactttctccgacggaaatactattgagaaggaaacaccgctcggtgacagggtgcttaattatttctatcttcttgccgacagatattatgaggcagccgagggttcgtcggataattcgaaagatgcgacaatgagttgaagaaccattctgtcgccttgcctaaagcatgaaaaaaaacaaaccgacactgtcggtgagaaaaagggggtttattatggctgataaatgcgcgatttgcggcgcggatatcaatctgatccaaacacagaagttggcggacggcaactgcatatgccgcaaaaactgcagaaaaaaaggattcaaggcatatgactatgtgcacggcaatcttcagggcgtcaaggcacatcttacacaggtggagcgcggcactaagctgtgggaatactattttcttccgcgtaaaaagacaaaggataaaagcaaaaaactgaagcgcttcggcacctatctctatgtggcggaggatatcgggctgatggcgtatgtccagaacgattacaagtttatgatgttcggcaagaccacccgcgcctgcgtttaccgcattgccgacctgcgaagctataagtatgaagagcagctcgttaaaaacggtgataagactgagaagaaatccttggcacggctcagctttatcaatacggagggtctttatgagtttgttctcaccatgaacaatatcaaggatttcgaaagactcaaaaaatactttgatacactgttcggcatacagaatacactcggcaatgcctcaaatgtttggaagcagcagatgacggcggttaaggatatagcgtcaggtttttccgctgcggtaaaaggagaagccgatgccggcgacaaggcagctcaggcaatcgactccctggatgcggcaatttacggagatcgcaccgagtggattcggaaggcggatgcggcgcttgcagcatttaatggttaaaattctttaggagaggagttcttttcatgcaaaccttgcaggagtataaatgtccctgctgcggcggcgcgatagcctttgacagcacgctccagaagatgaagtgtccctactgcgacactgaatttgagatggaaacgctgaaggactatgatgccgagctgcagaacgagcggcaggatcaaatggaatgggaaactgcagcaggcagcgattggcaggagggggagaccgacggtctgcgctcatatgtgtgcaagtcctgcggcggcgagatcgtgggcgatgccaacacggcagctaccgcctgccccttctgcggcaatcccgtggtgatgatgggccagttctcaggcgccctcaagccggatcttgtaatcccgttcaagctggataaaaaggcggcaaaagcaggtctgatgaaacatctggccggtaaacggctgctgcccaagattttcaaggaacaaaaccatatcgacgagatcaaggggatctatgttcccttctggcttttcgatactgatgtggacgcgcagatccgctatcgcgccacacgggtgcgtacctggagtgacaaagactacaattatacggaaaccagccattttatggcgcatcggggcggcagcatcggctttgagcacgttccggtggatggctccaccaaaatggcggatgaccttatggaatctattgaaccatacgatttttccgaggcggtagacttccggacagcgtatcttgcggggtatctggcggataaatacgatgtgactgccgaggcgagcatcgatcgcgccaatgagcgcgtcaagcgctccgccgaggattcctttgccggaacggtgcaggggtataccacggtcacaacggaaaacagcaccgtgcagttccgcggcggcaaggcacgttatgcgctttatcccgtgtggctgctcaacacaacgtggaacggaaacaaatacacctttgccatgaacggacagaccggaaaatttgtcggcgatctgccggtggataaggctgcggcgatgcgctggacattcctgctggcggcgatatacagtgtcgctgcctatggcgtggcttggctcctgcacctgatcgggctattttaaggagggaacagaatgaaaaagaaaatatggacggttctgtttgttcttgtgctctgcctgtgtgtgacggttcctgccttcgctgagggtgccgccggttttgcgggtgataaggaggatcgggtcgtggacggcgccgatctgttgtccgacatagaggagacggagctgcgcgaaaagcttgaggagatccgcgtgcgtcagaagatggatatcgttatcgtgaccgcgaaaacgctgaacggcgctgatcccaccgcctatgccgacgacttctacgattataacggctacggctacggcaacaatcgggacggtttgctgctgctcatcagcatggagaaggagaatcgcgtttggtacatatccactaccggctacggcatcacggcatttaccgatgcggggatccaatacatcggcaacaagttaaaggagcctctgtcagatgaggattatgccgccgcttttaatacctttgccgagctttgcgacgattttatcacaaaggcaagaaccggaaccccttacgattcttctaatatgccaaaggagcctatgaaacggggctggatacttgtggcaattatagtcggctttatattatcgtttattacggttggtaatatgaagggtaagcttaaaaccgtgcggttccagccggcggcgaacagttatatgaaagccggcagtatgaatatcaccgagagccgtgatatgttcctgtacaacaccgtcacacgcactgcaaaaccgaaggctaacgattcggattcggaaggaagcagcacacacacatcttcttccggatcaacccacggcggcggcggaggtagtttctgatgcactcccgacgctcgcaagaaaaacagacaaaaaacattttataaaggagagataatcatgagtatctttgacaaactgaaaagcacagccgggcaggcggtaaatgccgctgcacagtctatcggcagtaagcgagaaacattcaccttcacttcgctgccggaaagccttgccgaaatgcaggctctgccggaggcaagcctcgacacaccgtttaaaacggcagcacttacggttcttgccctctgtgcgtatgcggcggataagaacatcggtatcgagatgttgaattggctgaggggaccgcgtccgttgaacgggcaggaaatttctttcctgaatgaccgcttccgtgacggtaagacttatttgcctttcacttattttgccggctccacaccggacaacaactacacgcctgccgagccatataagattataatcgaaagcaatcacgtgtccggcgaggagcagggttatatgaagctgtttatcccctgcggcggtgcggatgatccccgtcctatcaagatgcgccagcgtggatctgacggcaagtggtttttatgggagcagtatctcctgacaggcgtgcgtacgccgaaatctgccgatccgtgggcttaagcagaaagaaatttgtttatccgattgcatcaaaaacggtcgtttgaccgttttggatagaaattatttaggaggaaaagatggatatttgcggaatttggaaagtcaaagaagtccgtgtgcctacaccggacggagagaaggtctttacacccgacaacccgccggaggatgagcggtttgagggaagcgccgaattgatgcagtaccggacggagtttgccgaggacggcatgctcaatactctcatgttcgtgccggaggagatgcgcgaggaggccgccaagcacggagcggtcgtccgcgaggacggatatgctgccatcgaaagcacaacatggaaggaagagaacggaaagctctactacgacacaaagatcgagggtgaggttctcggggagaaggttgattcctttgcggagattcccgtcaccgaggacggctgtctgctttatgggctcggaatgatccttctggaaagactctgattgagattaagagtaacggcggaggtgacacagtggaggcagacaatccatataatcttgatatgaattctacggaatcgcagtctatgagtgataagcgtgcgagcgaattggttcttaagaaaacctttacagaatatttcggaggattaaactttttctttgctgccgagcaggctaatctcacttatgaggatgtggttaagcatatcggcgttgatccttctgaataccgttacgatgctgaacgcgatgcgcagatttattcttggtatgctgccgaaagtaaagcaagagtgatgcatgtttggtttaaggacgacagactttatgcttgcggcgtatacaatctcggtttcccgaaaatgacttagcatatgcgtacgaaagaggcttgctgcggcaagcctctttccgaaaattaccgaatgggttacggtgcatttcggaaaggaagaataaatgaaaaagtttttttgcgttatgtgcgtaggcttctttatattgctttttttcgcatgctcatcaaaacatacttcttataacaacaacgatattgagtattacggaggcaatccgatggaatttaaaagttttaaattggtacaaaccaatatgtcggcacaacaatacgtttacgaggggtataaaacggagaacggtgttcatttagaatattacatcagcacggaaaattgggattataaaactttagagcatgctgaattccgtaatattgtccgcaaatttgacggagacgaaaaaattttcggagaactgtgtgccttgttcggcagatgcaaaataattgaatggacggactttcacggctgcgattctcaggtacttgacggcaccggcatgagctttaccgctgtattggcggacggtaccgaggtgaatgcccaaggaaccaacagcttcccggaaaatttttcaacatttacacaagagcttcataagcttataacaacagaaaaaataaactcagtaaaatttaccgacggaacctatgaggttacactgccggaaagctgggtcgggacagttaaggcaagtttttcggaaggctttgtgtcgttttttgttgataaaaccgatggcagagagcttcccttttttataatcgataacgatacatacggctattcatcggattcctataagggaagaacagaagtcgggcggcttatgctggatgaagatatccggtttattacggcgcgcgacagttattcgatagcttcatatgcggaaagtgtttccgaggaagccattgcaatttggaggaattatgaaagcgataagcttgccgtaattgaaagccttcacggagtaaacggatatgagttttttcccgaggacggaacgattctatactactcaaatgcgagggaaatggcagataaagcgagaagcctttggctgagtttgaactttgcaggcgagtatccgagcacagcgaaacctgtaaggatcaagagacggaattatgtgcctatgtttcctccgtatgattttacaaacactgtcgaaaacgtacgcaaaaaattcttaaaggttttttcggaggaatttaccgatcaaacgttgaaccgtgctattgctgagaaggaattgattgaatataagggcgatgtttatgtagtttgtaagaaacgcaagggcgaagcctcttacaacagctgtgtggactgcgtccggaatgaaggcaacggaaaatttacagttgtgattgctgtgaaaatgccgccaaacggcaataagcgctatgttgatctgccgacggagaaaaatgccgcaggagaatttgtgtttacggattatccctactgggataaaagtgaatgattcttttcctgttcaagagaagaaaacaagtcaaaattttttctccgcagccggaaaaattgctgaatcatctgatcagaaacaggctttacgatatggatttttcagaatcaaggagctgtcggagttcgaaaacgaaaaaaatctatatgcagagcagatatgaaaaaatttgtttttacttttatttttgtattggcatttgtgggatttgctgccgcaacggttagtgccgagagcccggtgaagcccgtaattgaaggggaaatgccggattgttatatgcctatcggcagtgacggtattaccctgttcactaatgtcggtgtaaccgacggcggtacgctcgtataggtgatgacggcgatatgcagagcttttgggtcaaaaccgacctgactgtgacaccgacggcagcttcccatacccatagctacggtacggattggaagtatgacgaaacaaaccaccggcacgaatgtgcctgcggggacaaggcggacacggcggcgcacaccttcaagtgggttaccgacaaggaagcgaccgcaaccgagaagggatccaagcatgaggaatgcaccgtctgcggttataagaaagcagccgttgaaattcccgcgaacggttccggaaacggctcggccgaccggcccgctaagcccggcaacacatcttctccgcagaccggcgacaacagcagccctgccttgcggtttgccgttttgttcataagcggcggcgctgttgttggtacaaccgtgataagcggaaagaagaagcacaacagctaacaaagcgattttacttgcacagcggctatcaaaaacggtagccgcttttttattgtgaaaaaatgctcgaatttgcatcatcaattgcggtatgttgttggttcggaaagcggaggaaacaataaacacgcgtgaaaatcattgttatagtaacattactctgtgcggatgtgtgcatatcaaacagcgcagacaaagacgaattatttgaaaccgcggcgctgctcggaacaaaactcagatcatctctatgacaacttcagagttaaggctatgattgaaaatcagaagaaaagctacgggtgagagttcctgtttgtcgaggcgaacatcgatgcggtagaaaccgcaaagcatttcggaataagcgcgaacagagccggagactgtctcaaagacaaaagaacggcggtttactatgataaaagagcctgcggattttgatcctgtctcctgtctcaaaagcattattatcggaatttttcaccgtcaggtgtcgcagacaagctccgatacggcgcatatcaaaattcaaatacccccacataagaccagcctcgggtgatttctcacccgaggctgtatgttttatttgaaagctcaatcgcagactgcaaaatacagagaggtgtaggggtcgatcaggccaatgtccgtgatgcacgcttcgggcgcgatgctgtcaagctgcgcctgctttgcgctgtccttgtaattgtccgactgcgcttcggcggcaaagataagcccgttgtaatcctcgggcatatagacgacatagctcttcgtgaggatcatcgcccattcgccgatgccgtactgccaatcggtcgagtacgcgaactcgatcatatagctctgaccgtttacgctcacggtgtggacgtaataattctcgccgcgctgcgtattgccgtatgcggtggacgcggtaagccacattccggtatagtaatcgtaaagctcgctcttcgtatatgccatgtagtcgccctgcggaatcgagctctcggggatgtagcagacagcgtcaaactgaagctcgcggatgccgtcgtgaacgtcctccctctgctttgcgacctcccaatagcagtcggcagtgctgtaatcctcgccgagcccgtaatatgtgcatactccgtccttgaggagataatacccgtcgtccgtctcggcgttcagcccaatccccgcccgtgcgaagcacggctcgtttgacacgatctcttccgcggagacgagcgttccgccgttcgcactgtcgatcagatcgccgctcacggtgcggtcgagcatcagcacgtcgccgttttcgccgaagtggagggtcacaccgtcctcctccgcccacagagtgccgtcggcgagcaccgcactgttttcatcgagaatttcccatgtcgagtcgtcatagattctgagccaaaggttctcgccgacgtagctccaaagtccgacatactcgccgacatccgccgcagcgccgtcggtatcctcggtatcggacgtttcgtcgtcgagctcggcggtactctccttcggcgcgcgctcggtcgtgtcggtcgtgctccgctcatcgtccccgtcatcggagccgccgcatgcggcaagagcaatacaaaggacggcagccaataaaaatgtaatgatcttcttcaggtgaatcatagttgtctccttttatttgaatattttcggttcggtgtcaatgcggacaggcggtgtcacggcgcgcctctcctgatcgtatcagcggcggcgtccgccgagttcggcggaattcggctgtctgcggttattcccgaccgccgcctgcgcaaagtccgcgcacccacgcggcagcctcatacgtccatcggctcgagcgcggatatttttccggatcgccgagccctatgccatgctgtccgtccgggtaaaggtgaagctcgcacggcacctttgccctcacatatgcctcggcgaggacgagcgcgtttcgcggatcgacgcattcgtcggggaatgagtgccagatgaacgcgggggcgcttttttcgtcaacataccgttcaagggataccgcttgctcgccgtattcctccgtaacaagattgtcgaagcagaagcagcgtatgtcctccctcgtcgatacgacgccgtatgtgaggataacaccgttcggacggttcgcgccgtactccatatcgggggagctttttgcaaagtcgcagtgccacatggcaccgatcgcgccggcaaggtagcctcccgccgacgatcctatgacaaagagtttgtctgggtcgatgcagtatttctccgcgttttcgcgtatgtggacgatcgccgcggacacgtcggtgagcgggcgcgggaagaacgatttcggctttccgatcgagtaattcaggacaaatgcgttgaagccctccgccatgaagcggatcgcaaacggatcgccctcatgcgaggcaagcgcatagaatcctccgcccggcagtacgagcatcgcgggacggcatccggggaggatgtacgaggtcagcgtcacgtcgggacgcacgggatcgaggatgacggtttcggttttcatcgggtaaggtcctttcggttgaagatgcgcgggctgacgtcggcgcatcgggatttcatgtcatagtgtgcgcaatgtccgcgcggcacggacggcgcgggaaacgcacggctcggctgcggtttatgcacggacgcgattgcgccggcaattgcggcttcgcggtcggtttatacatgcgcgcggctgtgcggaatcattgcccgggctgtgatccgcttatgtttccgctgcgcgcttatcgggctgcgtaaagcccgagcgcccattcggcggcttcgtccgcccagcggtgcgcgcgcggataaaattcgctgtttccctcgccggggacgccgagcccgatcccgtgcgcgccgtccgaatagaggtgaagctcgcacggcaccttcgccctcacatatgagtcggcgaggacgagcgcgtttcgcggatcgacgcagccgtcgaggaaggaatgccatatgaatgcgggcacgcttttttcgtcaacgtgacgctcgatcgaaaccgcctcttcgccgtactcatcggtgacgaggttgttcatgcagggattgcgtatcccctccgccgtcgaggtcacggcatatgagaggataacgccgttcgggcggttcgcgccgtactccatatcgggggagctttttgcgaaatcgcagtgccacatggcaccgatcgcgcctgcaaggtagccgcccgccgaggttccctcgacgaagatgccgtcggggtcgatgcagtatttctccgcgtttttgcggacatggacgatcgcggcggacacatcggtgagcgggcgcggaaagaacgactgcggctgaccgatggtgtatctcagaacgaacgcattgaagcccttcgccatgaagtgaactgcgatcgggtcgccctcataggacgcaagctcgcagaatccgccgccgggaaggacgatcatcgcggggcggcatccggggaggatgtacgaggtcagcgtcacgtcgggacgtgcgggatcgaggataacggtttctgttttcatctggtaaaattcctttcgtatgaagatgcgcgggctgacatcggcgcatccggatttcatgttaaggtttgcgcaatgtacgcgcggttcaaaagtgcgggatgagagctgcggcacggacagtgtgaggatgtacggcaggcgcacaccgtacgaacagcgcggaggatacaacggtatcttcccccggctcagaccgcaccgcgaacagtgtgtgcggtgagccgagagcgactcgccggctgacagtgtaaatagaatatcgtgccggggacggcaaagcggcgaattaccgcacttcccgacctcacaagggaggatttttcaaaagagcgcacgggggaagcgcccatcggacgcttcccccgcatattttccgtgataacggacggttcattttaccgaagcgggaacctctgctccggaatgcgccgcctgtgccgaacccgccgtttcggacggaataccggacattacggctcaattcccccttatgtactcggcagctacccatcccgcgccggagccgtaggagatcatgtaccaataatgaccgtttatctgaaaatgcgtctcggcaagcaccgtcacggcggtgccgttcgagagtgagcctatcgagggagcggaggtcgtcggtccctttctgactgcaagagagcttgatatgttgatgaccgttcccgagcttatgctcgccgcggaaagatacgtcgtgacgtaatccatgcagatccatccgtagggcgtggaaaaccattcgcgtcccgacgaatccctgctgactttatccgacataatggttccgagacggtctccgtatgttgccggggcaacggtctgcacgatatcgtaatccgtgcccggtccgtaacggaagtgaacggagtcgccgattacgacggtgtagcccgcctcggaccaactcgcgctgaccgagaaggtgaacatggcggcgagcatgatcgccgcaagcattaccgataaaaattttttcattttttcctccctgtttttcgtatccgtgcgcaccgtcggttttcgcggtgcgctgcggtcattccggttcccggtataattatattcggcagagaggaaaaatattccttgaaattacgtttttataaaattttcatcttagcggaggcggcgcaagccgccgagcgcgcaagccggggcttcggccttcgcaaaacggcggcgcagccgtaaatctgccgccgctttacgctgtccgcaaagataacgtgcgctgcgggagggcacatcggcgaagcgcagaacttctcaattcgccgaacaaatcggaaatttgaaacccgtctgccgagcgcgccgtgcgtcagtcctcgatcgccgccgcggcggatatgatccgccttatctcctcgcacgggaatttcggctttctgtcgtatgtgtaaagtccgttctgctcctgttcgatatcggtgagctgtgtgtagcagaagccgaagatgtatttgttcttcagcagggcattcgtcaaaccttcgagccgatcggtgaactcgcgcgcgctgtcgggcgcgttcccgtaaccccagcccgatttatcgtcggtccatgcgatgccgccgtactcgctgacgaaaaacggctttttgccgtcgtatgactgaagatccgaaaaggcagtgggaatatccgccacgcgcccctctccgagcaatgcgtaatgctccgcaagggtattcggatcctgctcgtaatcgtgaatatcgtacacgtcggtcatgacgtggacgctgccgctcgtatcgatgcacggtcttgtcggatccgccgccttcgtcgcccggtaaaccgaagcgatcatctcatcgcactggcgtcttccgtcaatatcccaagtctcgttaaacgggcaccaccctatgatcgacgggtggttgaaatcgcgctccacttcgtcgagccactccggcagcacggaatatatgctgtccgcgtatgtgtgatcgagtccccagttcgggtactctccccagaccatgtatcccatgcggtcgcagtgatagagaaacctttcctcgaacaccttctcgtgaagtctcgctccgttgaagcccatcgccgcggcgcgttcgacatccgccgcaagctctccgtcggagggcgcggtgtatatcccgtccggatagaacccctgatcgagcacaaggcgctgaaagacgctctttccgttcaggagaaatctgtgaccgtcaaatccgaccgagcgcagcccgaaatagcttttcaccgaatcgtccccgaaggtcaggatcagatcgtacagccgtccttcgccgatctcccaaagatgcttttccgaaagcgcgagagtcagcacggcattcccgccgagcgcgcgtaccgacgcatccccgacgagtcttccctcatagaacgcctgcgcgcgcagagtcccctctccttcgagctttgcgcagacggtcagctgcgcgttttccggctgagcgaaatacttcaccccgacgatgcggctctgcggcgcgaactcaagccacaccgtctgccatatacccgtggttctcgtgtaataacagccgaaggagtcgcgtcttgcgctctgcttcccgctcgggataagcctgtcgcgggtatcgtcggtcacgttcaccgttacggtgttcacgcccgccgaaacgaaatcggttatatcaaacgagaaggaaacatatccgcccctgtggctgccgcactctcttccgtttacataaacagtcgtacggtaatccgccgcgccgaaatgaaggatcacccttccgccgagatgctctgcatcaagcgtaaagctccttttgtaccacaccgaattcatgaaatcggtgtactctacccccgacaggcggctttcggggcagaagggaacgtttatgctgccgaaaaggcgcaccccgtccgcaaacagctctctttcccttccgtcattatcgttgtcagtctcaaactgccattctccgttcagattcatccagctttcgcgcataaactgcggcttcgggtgctccgttcgaaatatcactgtttctctccgctttgcttttgtacgttttttactttctcggcagagtgaacgtctccgtcaccttgccgtcctttgcgatgtggcgaaactccgtttctccgtcgccgaagatcaccgccgtcgcgccgatcccgtcacggcggctgctcgccacgataacggggtaattatgcgcgaactttgcgttctcgtcccccgcggggtagaactcgtaccaatgaacgtgtccgcagatcatgaactcgggcgccatgcgctcgacctccgcattccacgcgcggtaaagctccggcatgatgtcgaactgacccgacatctcgcccgccgacataaacggaacgtggcacacggcgatcctgtacggcttatcctcaagctcgaagccgcgcagcgcctcaagctcctgctcgcggtaaggctcgaaccaattcactccgccgtattcgggatgatcgtcgtatttgtcctcgccgcagtcgagcacgacgccgcttatcggaccgaccgagaacgtgaagtacgttctttcgccgttcgttgcgatgtggcgcgggagaagctcggcgcacattccgcgcgtgtcgtggtttccgcgtccgacgatcgtcgggatcgcgccgtgcgtgaccttgccgatgaactcgttgagcttgacgagatcgtcgagcgtgtcggactcgccgaagtcgccgttcacgataaagagatcgagatcgtccccgaagtaggacgcgacgttctccgtctcctcgtaatcgccgtgcatatcggcgacgtaaacgctgtttatgccgctcgtcttttttatcgggcggaacgcaaagctctcgctctgcatatccccggtacgggagcagtagcttcttctctcgatcatgcggcggtacattacggtgtagctctccgcctcgtcgaggacgctctgcggtacggatatcttatgtacgcacctgtcgttgtagaaaattccgcttccgtcctcgtagaaattgcgatcgccgacccgcacgaagcacggtcccggctcggcaaggttgagtactatctgataatcgtttccgattacgaacacgttcggctcgcacgccaaaaattctgccatcttatatctccgttcctccgcgtttcccgcggactttcgtctgtgttttcatcctgcacaaagccgcttcggcattcccgcgcaaaaagcgcgcgtgcagtacatccataaacagtatacctcattttcgcaccgcggtcaacagaaaaaacggcacaggtgccgttttttcccgagttacagatacgttccggcgctctgcgtcagtttctcctcaagccggatcagcttctttgcgaccgtctttgctttctcgtcagccgccgcgtactgattcagataccggttgagcgatttcacgcccatgttgcagccgtccgtgatgagatcggcgaccgtcgcgtcgcttccgtccgcggcgagcatcacgttcgtcttgatccacgacatccccttcgccatggggttcggctccttgccgtcgtcgccgcaggagctgagcatctccctcacctgaacgcgcagattctcatgctcgtcgcggcaggcgttcagcgatttcctgaattcctcgccgtgaacgtggttcatcacgtcgtcgatcgcggcgacccccatttttatccccgcgtcgcactcgcgcagcagcttcaccgtatcgttttcaaccataacgatccctccttttcccttagtatcccgcgcaatcggcgaaatattcgcagaatgcacagccgtccttgattttttccatcctctattgtataattgacttaccgttaaatatgaaaagaggttttcccatgagagacacagttaaaatagacaaaagaggcgttcgcctgatcgcacaccgcggactttccggaatcgagcaggagaacacctgcgccgcgttcatcgccgccgcaaacagagaaagctactacggaatcgaaacggacgtctaccgcacgtcggacggcaagtacgttcttcaccacgacgacagagtgtgcaccggagcatacatccccgagacggatttcgacacgctccgcgcggtcgtcatggaggacaaggacggcagagagcgctgggatctgcgcgttccgacgcttgatgaatacgtccgcatatgcaagaactacggcaaggtcggcgttctcgagatcaagcagcccgagcttccggtggaataccttcgggagatcatcgacatcataaaggcggaggactatctcgacgggataatcttcatcggattctcgtttgagaatatgctgaacatcagaaagatgctgcccgatcagaccgttcagtttctctcgttcgattggaaggatgagtacttcgacatgctcgtcaggaacaggatcgacctcgatatcgcctacggcgcgctcaccgaggagaacgcgcaccgcctgcacgaagccggagtcgagatcaacatctggacctgcgacagcgccgaggtcgccgaaaagtacatcggctacggcgtagactacatcacaacggatattctcgagtaagagacgggtatgcccccaagagccggacacttttggggacatatcagacgatggaagcttttatttttgatcgattcgggaggtattgtatatgcaggaaataaaatgtccgaaatgcggagaaattttcacggttgatgaatccgggtatgccgccattgtcaagcaagtcagagacaaagagtttgaaaaggaaatatccgaacgtcaaaaacttataaatccgaaaaggagtctgccgttaaagccgccgcagctaaaacagaagctgaaaaagatagacaaatctctaaattgcaagtacagcttgaaaccgcaaaggcagagcaacagtcacaaattgacagggtttcctctgccaaggacaagcaaattgcagaaaaagaattagaaatctcaaagctgaaaagtgacatcgaattaagtaaaaacaatacggattccgctgttaaagtagccgtatttaaaactgaatcagagaaagacaaagaaatctctaaattgcaagcacagcttgaaactataaaatcagagcaacaatctcaaattgataaagtttcctctgccaaggataaacaaattgcggaaaaagaattagagatttcaaatttaaaaggtgccattgagttaagcaaagccaatacagatctagctgtaaaaaacgcagtgcaggaaaaagaaaccgctcttattaatttgcaaaacgaaataaaccataaaaatcaagagtgggaattgaacgaaaaaagactttgtgaaaaacatgcctacgaaatcaagcaaagagaagatgaaattgcttattacaaagacttcaaggcaaggcaatccacaaaaatggtgggggaaagcttggagcagtattgtgaaactgagtttaacaaactaagagcaacagccttccaaaattcatactttgaaaaagacaatgacataagaaccggcagtaaaggagatttcatatacagggagttttccgataatgatatggaattcatttcagtcatgttcgaaatgaaaaatgaaatggatactaccgcaacaaagcacaaaaacgaagatttcttcaaagaacttgataaagatcaaagagagaaaaagtgtgaatatgccgttttagtcacaatgcttgaggctgataatgaatattacaattcgggaattgtagatgtctcttacaaatatccgaaaatgtatgtcatacgtccccaattcttcataccgcttattaccattttgagaaatgccgccttgaattctctgcaagcaaaaaaggaattagaggtgttcaaaaaccagaacatcgatattaccaattttgaaaacgaaatcgccgaattcaaggacaagttttcaacaaactataggcgggcaagtgaacgattccataaagctattgatgaaattgataaaaccatcgagcatcttaaaaagacaaaggaagcattactctcatcggaaaacaatctaaaacttgcaaacaacaaggctgaagatttgaccgttaaacgtttaacaaaaggaaatcccacaatggcagcgaagttcgccgaattagaaaacagtcgggactgaactccccgcaaagacacccgaacataaaaaggaggatctcacgatcctcctttttcgtttatctatatgacggatgatgcgggcgaacgcgcctgcccgagtacctgcgtactttgccggattcagtccgagcgagcggctcgccgcggcttgccttacaaatcccgctttgctttcacggcggcgcagtaccagccgttctcgctttcgtccgagtcaacctcgaatccgtttgccgaaagcgcggcgcgtacctcatccgcgcgctcactgattattcccgacacgatgagaaccgcgccgtccttcatgaacgctccgacatcgggggcaagtctgattatcacgtcggcgacgatgttcgcgcacacgacgtcgtatttcttctccggcaccgccgagagaagatcgctgaccgcgcactctacgcacggtgtggaattcagcaccgtattctccttcgccaccttgatcgactgcgggtcgatatcgcacgcgaaggcatcggcggcaccgagcttcgcagccgtgatcgcaaggattccgctgccgcagcccacgtcgagcacgctctcgccgccgtgtatgtacttctcgagcatcgcggcgcagagcctcgtcgtttcgtgcgttcccgtaccgaacgccattccgggatccatgagcaccgtcacctcgccgggtgcggcatcgtacttctcccacacaggaactatgacgaccctttttccggtcttgatcggcttgtagtacttcttccacgaatccgcccaatcctcttcagacacgccgcatacgtctatctgcgcggggattttgagctcgtcgaatctgccgcgcgcgaacgagacgctctcggcgggatttgcgctgtcggagatgaacgccgacaccgcgcaggtcgagcggtcccgtgcgagcagctcctcatctatgaggtcgccgtaaactccgtcgagatccttctcgatatcggagtagtcctccgtcatcagcgaattcgagatcatgcccatgaccgcttccacgtcggacagatatgcgacaggcgcgctcgcctttatctgtatccatttaccgttttccatttgcgctccttatttgaagaactttttgaagaacttcgttttcttcgtataattcgtctctccggacagctcggcgaattcgcggagcttctccttctgagcggagctcagattcttcggaacctcgatgacgaccgtgattataagatcgccgcggcgcgacgaattgttcacatacggcacgcccttctgcttgagcgtgaacgacgttcccgtctgagtgccctcgggcacggtgaacttctccttgccctcaagcgtgggaatatcgatctccgcgccgagagtcgcctcggtgaaggttatcggcacctcgcagtagatatcgtagccgtcgcgctcgaataccgggtgcgccttgaccgccacgcttatcagaagatcgccggcgctgccgccgcgaagtccgtccgagccctgaccacgcagggatatcctctgtccgttgtcgattcccgcggggatcgaaacctcgagcgtttttgtcgcctgaaccgttccggttccgcggcacgctttacacggattctcgatcacggtaccgcgtccgccgcacgcatcgcaggtgcgctgcgtctgcatcacgccgagcggcgtgcgctgctgaacgcggatctgtccgcttcccgagcatttcgtacacgtcttcggctggcttccctttgcggcgcccgttccggagcattccgcgcaccgctgcgtccggcggtaggtgatatcctttttcacgccgaataccgcttcctcaaacgaaagcgtgatgcgcacgtttacgtcgtcgccgcggacgggaccgttctgtctgcgcgacgatgtaccgccgccgaaaaaggaggagaatatatcgccgaagccgcccatgtcgaatccgccgaaatccccgaagccggagaatcccgagccgcccgccgtgggatcgaacgcatcgtgaccgtaggtgtcgtacttctttcgcttatcggcgtcggagagcacggcgtaagcctcgttcacttccttgaatttctgttcggcttccttgtcgcccggattcatatcggggtggtacttcttcgcaagcgaacggtaagccttttttatgtcggcatccgacgcgcttttgtcaacgccgagcacctcatagtagtcacgtttatctgccattggttacggatataccgaggtaagcccgcggtattcctcccttcaaattcaatttcatcgtgcggcggggcgcttttgccgtgcggcaaaagcgggcttcgcgggatcgggggaacgacccgatttcacgcgccgtgccgcccgtgcggaaagcgagatgcgccgctgcgtcctgcattcgtccgtcatcggtcggtatgcccatcgatcggaatctgttcggatgagcgccggtcataatcggacatttcaccgatcggaagccgtccgttcaaccgccttgcatcagccgccgctcttcgccgtttcccgcctcttcaccgtccgccgtaaacaccgcagaaagcgttcgcacccgcaggcgtgaacgcttttcccgtgttccgtggttttttatttatcggtcttatcctcgaaatccgcgttgtaaacggtgtcgtcgccgtttcccgcgttccggaatccgccgggctgtgcgttgggatcgaatccgcccgcgtccccctgggcacccgactgcttatagagcttctcggacagtgcgtagaacgctttctcgagcgcctcggtgtccgtcttgatcgccgcggtgtcgccgccggtgagcgtcgtgcggagcttctccatggccgccttgacctcgctctgctcgctctcgggaagcttgtcgccgatctcgccgagcgtcttttcgctctggaagagcaggctctccgcgtgattcttcacatcaacggcttccttctgctttttatcctcttcagcgtacttctccgcatcgcgtaccgcgcggtcgatgtcctccttggacatattggtcgaagaggtgatcgtgatgtgctgctcgcgtccggtgccgagatcctttgcggatacgttgactatgccgttcgcgtcgatatcgaaggtgacctcgatctgaggcactccgcggggagctgccggaattccgtcgaggctgaagcgtccgagtgtcgtattgcccgccgccatgtcgcgctcgccctggagcacatggatctcaacggaggtctgaccgtcggctgcagtggaatatacctggctcttctttaccgggatcgtcgtgttgcggtcgatgatgcggttgaatacgccgccgagggtctcgattccgagagacagcggagtaacgtcgagaagtagaagatcctttacgtcgccgccgaggacgccgccctggattgctgcgccgattgccacgcactcatcggggttgattcccttgaagggctccttgccgatgaagttcttgactgcatcctgaacggcggggatacgggtcgagccgccgacgaggagcaccttgtctacctgatttacggtaagtcccgcgtcggagagaactctcttcgtaggctccatggtagcctgaacgaggtctgcggtgagtctgtcgaactccgcacggctgagcgtcgcctcgaagtgcttcggtccggttgcgtccgccgtgatgaacgggaggttgatatcggtggtggtcatgccggaaagctcgatcttcgccttctctgcggcttccttaagtctctggagcgccatcttgtccttgcgcaggtcgattccggcattctccgccatgaatttctccgcgatccagttgatgatgcggttatcgaagtcgtcgccgccgagacggttgttgcccgcggttgcgagaacctcgaaaactccgtcggatatctcgagaagcgaaacgtcgaacgtgccgccgccgaggtcgaagatcatgatcttctgctcattttccttatccataccgtatgcgagagctgctgcggtaggctcgttgattatacgcatgacctcaagtcccgcgatcttgcccgcgtccttggttgcctgacgctgtgcgtcggagaagtatgcgggaaccgtgatgaccgcctgcgttacgggagttccgaggaacgcttcggcatccgccttgagcttctgaagaattatcgcggagatctcctggggggtgtacttctttccgtcgatctcgacggtatgtccggtgcccatctcacgcttgatgctcgacacggtgcgctcggggttggtgatgccctgtctctttgcgacctgtccgaccatgcgttcgcccgtcttcgagaatgctaccacggaaggtgtggtgcgtgcgccttcggggttcgggataacggtaggctcgccgccttcatataccgccacgcaggagtttgttgttcctaaatctatacctattatctttcccataatgaaaatcctccgtatattttgattttgttatttgcattatatgatctcgccgccgggcggcgctaatcccgtttgattcagtttgcgaccttgaccatcgcaaagcggagaatcttgtctccgcggcggtatccggtctggagcacatccatgatctcgctctcgccgaactccgccgattcctcgtgaagcaccgcgttgtgaagattcgggtcgaacttctcgccgacctttccgaattcctcgacgccgagcttttcaagcgccgccggcacggatttgagtatcatcgcaactccctcggaaagcttttccgaatcggtgtactgcgatgcgcgcttgagattgtcgattatcgggagcagctcacgcacgctctcgccgactgcgtcggcatacatcgcgtcgcgctcctccttggagcggcggcggaagttgtcgtattccgccagcgtccgcaggtacttgtcgcccgcctccgcgctcttctttttctcctcctcaagctcgcgctcaagctcggctatgcgggatttgtgcttcttcgcttcggagccggaatgctccttcttatccttcgcgtccttcgcgtccttcgcgcatcccgcgctctttttatcttccgtatcaccggctgtgcagtccgcgcaggcatccgcgtctccggcgatatccttcttttccttttcgtccatcatgtttctcccttcttttcatccggtgaagaatccccgccgccgtcgccggagatcacatcgccgatcccctcggacagccggtcaagcaccgatatgacgcgcccgtaatccatgcgcgtcggacctataacgccgatcgcgccgatcggcttgccgttctccgtgaccgttttgaacacgagcgcggagcgatccattatcttaacggaattttcgctgccgatgtagacctgcactccgccgtccttctgatccgcggacgggagcgaggagggcagcagcttcttcagcgaatccttatgctcgaacagcccgagcagctcactcaggcggtcgttgtcgtagtaatcggggtaggaaagcaggcggttgactccctcgacctgtatctctccgctgccgatcgtgccgacggattcgaatatgccctttatcaccggaccgatcaggtaatcgtactcgcccatctcgcgctccgcttccattatgatcggaagggttatcatgtccgccgtcagtccggtaaggcgggaattgagcacggagacgagcttttccgtcgcctcgggcgaaatgtcgaacgaggagcggatgtgcttcgttctcaccgacgtgtccggcagaaccatcacgaggacgaggttgcggctgtcgaggcgcatcgcctcaaagcgcgcgaccgtcacgctcgagctttccggacggaccgcaagcgcggtatagttcgtcatcgcggacgcgatgcgcatacccgcggaaagtatctcgccgagctcgttcctgcgtgcgcgaagcgcactttcaagccgctttatctccgcggcggtaaagttgtagcgatcgacgagagaatcgacgtaaaatctgtagcccgcctcggtggggatgcgccccgccgaagtgtggggctgctcgagatatccgagagcctcaagctccgccatttcgttgcgtatggtagcagacgagtggcttatctgcttattctgtgtcaggtacttgcttccgaccggctcgccgttctgtatatgcgcgtccactattgctttaagtataagctttttccgctcgcttaatgcgccgttttccgcactcaccgatcccgcctccgatcacaggaattttacgttttagcactttcggtccctgagtgctaatctatataagaatttaccattttgccgcttttaattcaacgataatatgaatacatattgttaacattttgttaagcgcggttcggcggcaattgcgggaatacgcgaactgcaggaagctgccgccagagacggcaagccaagcgtaaagacttcctcgcggcgtcgaagcgatgcggggcgcataggaagagcgccgtctgacggactgtcgaatctttcgtctcctttgcattgttacggtttatacggcggcagccggagtccgttcccgttctctctcggggttgtcgcgggtgcaaaacgtcggattcgccattctttgccgataagacctcgctgctttgccgcagacgggatcccgcgtaaagcgggacgggaccggggcggagcacttgacttttcccgccgtgcgttagcgtaataatacgagctgtcgcctcatttgactcttccgccgtttcacggcatgcgcgttttccgaaagaaaaaggagccgtcggctccttttttcatattctgtatctgcggttcatgcgccgtcgccgtgcggctgatcactgaagagacaccgcggcagctgtcgtgccgattatcggatcaccgccgtatatttcccgagaagggcacacgggcggtatgacatcttcgattttttgagtccggggtctccggaatcgtcctcgcggttcacaaagcttatccccggcacggacttcacgaattccgacgcgatcgcctgatacgcgccgcgggtgtttctgtccgccttttcgatatggacgaaaagcgtgtccccggcgacctccccggcggtgaacgccctgatcccgccgtcaatccgcagcgcaagcgaaagaaatccgtagctgccgcggttttcgagcacctcgcggcagatatcgttttcggtcgcggcaagcgcttcgtccgatccgttctcggcgcggtaggcttcaaagaacgtcatgacctcgtgaatgttcgcgtcgccgatcggctcaaacaccgcatcgggatactcgcggcggaactgatagagatgattcctcttttctctcaggtgcttccccgcgtaggcgatgaagttttccgccggatagagaaagtccgcgccgtccgcgtcctgcgtcaccgccgcgccgaagcgctcggcgagatgcttcgcgctttcctcgtcgagaaatccgaactcggcgggaagcgagttttcccgcgcaaagtcaatgatcgctccgaccgcaccgtcgggatcgggtccgaacggacgtgtaaagacgtccctgccgcggtagcttgcgcgaagcaccgcggtttcgccggcaaaggcgattcgggtatcgaaatatctgcgccacatgagcaccgttccggcggtgctgtcgcagatccgcccttcgcctccgaggaggcggcgaaggagagttgagtcgtcaagtgtaacaggtctgaaatcaagcatactgtctgtccttcggaaaacggtaaaatgagcactccgcgcgtcagttctttgcgaaggagtcgatctcctcgccgcgcagcagcttgcccgtatcggagatcatcttctccacacggtcgatcaggacgtagaattcgccctttccgtttatcgtgacaaggcagcgcctcgtggaatacggatagaacgcgatcgtcgtttccttgcccgacagcgtcgtataggtgaacgaatacatcatattagagctgtcggctgcaagcgccgcgttctcctccgccgaaagtcccgtataatcgatcatttcgacgccgagcatcgccttataatacatacggaagtttttcaccatttcctcgggtgcgaaatccgtgccgtcgttcgaggcgacctcgagaacgtcgtttcccttcgcgtcctcggaatgcttcagcgcaaagcgcaggtcgtattcgccgcccttcactccgattgaggatatctgcgtgatatagtatccgaacgggtacggcgatatccacttgaacagatcgtaggagaggaattccgcggtatcggcagcgaccttcacgaccgtgtccggaacgatgctcgagcttgcgtagtaatatccgtcctccgtaagtcccgagaaaaatatgacgtacgccttgccgtcgtattcaaacgccacggtgtactcgggatcgtcgagaccgtattccgcgtacaccttttcgtccgcgccgatctcaacgacgctctcgccggagaagccggtcatcaggctgtacacggtccacacgcggtcctcgttcgggacgtactccgcgggatatgtcatcgccgcctcggcgagcgaatcggggttcttcttatccttctcatcaacgaggctgaaggagatgaacttttccttgccgtggcttatcgtgaaccggttgatctcgtaatacttgtttgtcggcgccgccgccataagcagaggattgacgtaatcctgtgcctgaagcaggatcgtcgtttctatcgaagtcgagagctcatagaccgcgccgcgcccgtcaaggcagatgtagtatccgtcgtcggtgagcaggcggtgtccgacgctgagcgtgtgagtctcgcccgccttgtccgttatcgtccattccgcgacgggggcgttgagcccgtactgctcatactcctgcgcgcttgagtcgatcttcttgcgcgcaagggggtatcccgcgatcgagataagctcggagaccttcgtcgtccggagcgagaggtgctcgtgtccctttatgcggaaatcgttgttcggatcgcggtagatctcaaaactgccgtattcgttctttaccgatatcgactgcacgttctccgccgtgatgcgggggaatatctgtatgcggtccgtcgtgtcgatcgcctcgccctgctgggtctcgatcggtacctttaccgtctcctccggctcaagcgcgggaccgagcacggtgaggtaaagcacggcgccgacggcgaaaacggcaacgagaacaagcgcaatgattattctgcgtcggtttttcatgagtgctttctcctgacgtaaacgaatactccggcggcagagatgcagacgggcagtgcggcggtgaacagcacggtccatgcgttcgcctgctttgtggttatggttatatcggtcttgtcgaacgccttatacggaatatccgtaagtattctctccctgcccattgcaagcattgcggagcgcagtatctcggaattcgcgtaagcgttcgaaagaagataatccgacgaggtgaatgacgccgagccgcaggcaaggacgtaggagtaatagttttcgttgtttatgataaccttgtcgcgcgacagggtcattatggtttcgctgccggaggagagagtttcctctccgcggcgcacctcggagcttgaatacgatttgagcacggggaacacctgacgtgttccggtaagtccgccgccctccttccagaggatatcgacgggcatcgcatagcggcataccgtcttcggcatcgagtcaagctcgcttatgtccgcgtagagcgaagcaccgagcgcgccgtcctcggcgctgtccttatcgacgtattcggcgatgaccgttatgccgtcaacgctcgttgcgtggtcgtaatcgcggagataggtgttcgagcggaacgatattccccattcctcaaggaattcgttcaggttgacgaggttcgccgacttttcgtaatcggcgaaaatcatgaagcagccgtagctgtcgaggaaggtgtcgagctttgcgatctcgttcgcgctctccgattccgcctcgcgtccgatgaagtcgtacagcggcgcgtcggcgatgattatacggcagtcggcggggatgtcctcgagcgaaaggtcgatttccctgacatcaaagcccgcgtcggagaacatcgtgtggatcgcacgcttttcgcccgaggtctcgccgtgccccttcgtgaaacagacgatcggcatatcggaagccgtgacctgatagattgcggacacgagcttattctctccgttgtagccccagatattctgatagttgtcgtcgaagatgaagaacgaatcgatcagcattacgcggaattccgtgccgctctcgacgatgaccgaggtgggggcgatcttcgtcgccgcgctttcggcatacggcttgaagaaattgtattcgcggtagacgtcgtggcactcgacgttgatgttgtcaaactcctgcgcgagaagctgcgcggtgcggtagacgtacttcgtgtattcggaataggttccctcgcttatctcgtccggctgcgccgcgaaatagatgttgacgggggaggtgatctcctccatatacttcttcgttgcatcggaaagggagtacacctccttttccgtcatgtccgcataccagaggtacttttcggaaagcgcggtaaatatcacgttggcaagcacgacgagcgcaacggtaaacacggttatcgcggtcgcggttgagccgtaacggaatttctttgacgcaagatatcctgtttttttcatatgacggttccttatctgtaaatttcggtcggattcggtctttcttctcagctccagcgtctcttctcatagacgcggtaggcgaggaacagaaagatcgcgcatatcgaaaggtagtagaacgccgcggaaaaatcgaatatcccgtttgtgaaggcggcatagcgcgcgtatatcgagatgaacgcaagcacctttctcaccgggtagaagtcgatgagcgaattcgaaagcgatatccccatgagcgcaagcagcacgccgatcgtgccgagccccgccgtaaactgattcgccgtgagagaggagatgaagatgccgatggcgatgaagcacattccgacgaagatcaccgcgatcatgcagccgaacgcgcgtccccaattgaattcaccgtacagggacagcggtatgaagtaaagcgcggtcacggcgatcgtgcagaagaagagcgtgaacgccgcgaggaatttcgccgcgacgatcgagaacagccccacgggggaggtcatcagaagctgctccgtgcgcgtgcgcctctcctcagcgaaggatttcatcgtca

SEQ ID NO: 763 - DNA, 32759 bp, Unknown
  16S sequences of unknown bacteria
gcacgccgatggtacttggctggagacggcccgggagagtaggtcgctgccgcatccttcttccccgcttgtgtaaacaagcggggcttttttgtttcgatggctcaatcagaatcgccccacacttttctctcgaaagcatggggcgatttgcatgcggctattcgtacaaattcggacagtcgatggcgtccagtgggacccagacgcggtagctctgcttcgtggtggtccattccacctgcgcccagtcgccttccaaacgcaggaacgataccttctgccccttgtccatcgtcagcgaatcgtaggcggcatattcttcgccgggaccgtagcgcgcaggcacagtgcgcagggcctttgcgtcgaagtaccagggcagagcatagaagatttcgcttgcatcctcgcacgcaaaacgcttgaggcccgtgtagacgcgcatgagttcgcccttccaggcaaattcgcactcgacccaggacacgccgtttgcatcctcctcgcatgtgagcacggttacgtattcgccccgcaggtcgaaggtgccagtctcacggtacttcgtgccgggaccgtttcgggtggagagcttgtcagtggccagcaggagcacgctttcgccgtcatagccggaggcaagggcgatgcagggcaggcacagaaccagccatgccgccgcggtgcacagggacagcagccgaatgatccgtctcatggaaaaaacctccttttgggttgtatgttaccatggatgtggacaatttgcaaatttgtgccagataccactcaaaactttttttggcaggatgttaccttttgcgcgtccaattgctctgtatagatgaaagaaaacgggaagggggatgcccatgagccccgatgaactgggccggcgcgtatgggagctgcgcgggccgctgatgcgcctggcctgtgcgattgtacgcaggcagcaggacgcggaggacgcggtgagcgaggcagtggtgcgtgcctttgaaagcttgcccgctctgcgttgcgatgcggcagtgcgtccgtggctgataaagatcactgcgcggtgctgctacgaccgcctgcgacgtctgcggcgggagacgccctgtgaggatccggagccgttgtgcgcgcccgtagaaccgcatggggacggcaccctggcggacctgatcgcccagctgccggccggccagcgggaggcaatcactttgtactactacgagggcttttcggcgcaggaggttgcgcaggcgctgggcgtgccccgccccactgcgtgcatgcgcctgtcacgcgggcgaaagcgcctgcggtggctgatcgagacagaagggagaaacgaaccatgaagcatgacgcatttgacgaagcgctgcgccgccgcgcacagcgagagaaatccgcgctctcgacacaggccgaagaacgggtggcgcgagccatccgggaggggcaggcccgcgccgcgtctcatgccagggcgcagggggagcgcgatacggctgccttcgtctggccgggggaggaacggcaggctccgcataagccgcgccgacgtatcacccgcctgatccccctgattacgggggctgccgcgtgcctgaccgccgcggcgctgtgggctgcccggacccctgtagatcgcgtgcacgaaagcgcctctgacaccggcctttcgacgcataatgcggcttttgaaaccgtgcttccgcttgcagacggaacagacggcgcgtccgccctcgcgccacaggccgaggctgccgcgctgcccgagcgcggtgtatggcgtgccgaggcccgattcttcaacgatacgcaggatatctggctggtgagttggtcggtggataccgcctccgagatgctcgagccaccggacgaactgatctggctggagcccggcgcaagctgtgtcgatcaagccgcctggcccgtagagggggagcaggagcagccggtctggcggtacacggcctatcgcgtgaccgccgatgtgctgcactggatggacggcgactggctgcgccccggcgaggatggctatgccgctcagcaggccctcatcaccgacgcctatgagaacggcgcgttggttctggctcccggaaactgggaaaacggcatggcaggcccgatggcgctcgtcctgcccgatgcgctgggaaacgtctctgcgctggaaacctacctcgctgccgggctgatcgtgcaggaaagcggcggggccgggcagatgggggagagccttgcgcagatcacggcccgcccgactgccgcgcccgcggcggacaaggccgcaggagcggcctccaccagccccttcacgctagccctgcaagccgcctgtgagctcacagccccaccgttttccggcgctgctcccatgtctgtgcggatgcccggcgtcaccccgacggcaaccgcctgcccggaggagttggcatgaacgcccggcctcttgccatcctgttggccgtgcttctgtgcgccgccgcacctgcccgcgcgcaggtcagccccaccacgggagccgaggttccatcaggccggtttctgccggtgctggtgagcgtgggtcatgggtacgggaccgcgcgcacagacggaaaaaacgtgcaggccgcgggcgcgggcaaggttgcgctctggggtttgcagcaggcggacatcgtctatgagagcctcttgtaccgggacgagcaaaagaacgccgcctccacccgcctgacgctcctgttcagcgacgcgctgattcgcggcgaggaggtggaatgcgggcccgtgcgctcgctgcgtgacgcctcggcttcgctgcgtgaggagtggcagggcgcgctggcctttggctcgacgatgggcgcgggctatctgggcgacgccgtggagcggctgaaggcggactccgccgcggccttcgacatagtggacatccggcgtggcggcctgggcgcccgccttcagggcgtgaaggccccttccaacctcagtgtggaggtaaatgccgtgcaggcgcgcgtgccggtggattcaatcgcccggcccttcgcttttttgcaggagtcggcgggaacggtttcctctcgggaggcagtgtcctccctcagcgatgtgtctgccgctgcgtctgtcagcctcgactggggcgacgcccgctacctgggccgcttcctctggaatgaggaggtgggcggctacctgcgtgaggttgcgggttggcctttcgcctgctatcccacagccagggcgcgtatgaccggggacgagggcgccatggtgcgcccggcatttgccaacgtcattgtgcaatgggtggtgtacgacgcgctcagccctacggtccaaaccccgctgctggtgggggagggcgcagcggacctgtttgtgggcggacggcacgtacaaggcacctggtcgcgggcagcgtgtgacgcgcgcaccctctacagggacgagtcgggccgggaggtgcttcttgagcccggaaagacttggatcgccctctttcctgctaatgcctcgctaatttttgaatgacgaacgttcggattctttgtttgcatgggtgtggaaaagcctttccacacctcattttttcgcttgcattgtgaatttttcaacaaatttatttttccagcaggaaaaatagaaagaagcgcgaatcttatgaatcagggtaacgttggaagtttacccggcaatacaactccggcatattgttgccatatcagtaccataaagggaggaacctgccatgagtttggatctctcgtacctgggcatcaccgccaccaaagaaatctaccgcaaccttcccgtcgccattttgacggaaaaggcgctcgcccgcggcgaaggcacgctgagcaacaccggcgcgctggtggtgaaaaccggcaagtacaccggccgcagcgctaacgataagttcatcgtcgatacccctgccgtacacgacgagatcgcctggggcaaggtgaaccgtcccattgacaaggccacctatgacgccatttacagcaaggtggtcgcctacctgcagaaccgcgaaatcttcgtctttgacggctttgccggcgcggacaagaagtacatgcagcgtttccgcatcatcaacgagctggccagccagaacctgttcattcaccagctgctgcgccgccccaccgaggaagacctggtggacttcaagcccgattacaccattattgcggctcccggcttcaagtgcatccccgaaatcgacgggacccgcagcgaggctgccatcctggtcaactacgaagagaagatggttgtcatctgcggcacccagtacgcgggtgaaattaagaagtccgtcttctccgtcatgaactacatcctgcccaagatgggcgtgttccccatgcactgctcggccaacatcggccatgacggcgacagcgccgtgttctttggcctcagcggcaccggcaagaccaccctgtccgccgatcccaaccgcaagctcatcggtgacgacgagcacggctgggccgatgacagcgtcttcaacttcgaaggcggctgctatgccaagtgcatcaacctctccaaggagaaggagcccgatatctacaacgccatcaagtttggcgcgctggtggaaaacgtggtcatggaccccgacacccgcgagtttgatttcgacgatgcttccctggctgagaacagccgcgtgggctatcctgtcgagtacatcaacaacgccgagctgtccggcaagtcccagagcgtgcccaagacggtgatcttcctcaccgcagacgcctacggtgtgctgccgcccatctccaagctggataagaaccaggcgatgtattacttcgtgagcggcttcacctccaagctggccggcaccgaaatcggcatcacctcgcccgtgcccaccttctccacctgctttggcgagcccttcctgcccctcgatccttccgtttatgccaacatgctggccgagaaggtcgaaaagagcggcgccaacgtctacctggtcaacaccggctggaacggcaccggcaagcgcatgaagctcgcctacacccgcgccatgattaccgccgcgctgaatggcacgctggagaaagcggagtttgtgaccgatccctacttcggcgtggccgtaccgaccacttgcgagggcgttccctccgagctgatgatccccgccaacacctgggaggataaggccgcttacgaggccaaggccaaggaactggcgaagagctttgtggagaacttcaagaagtacacccacatgagcgccgaagtggtagccgccggccccaaggctgaataatcgctccatgattcctggcgccccgcatgaaagtgcggggcgtcagtgtataaaaaggcaggcgaaggcgggtctcatgccggcaaaggggctgtttcctgacggaagcagcccctcatccgtatttgccagggaacgaaagaagaaaggaacgcccttgcgaggtgttcggactgccgggatcaggcaggacggcatggctatgcggtggacgccgggcatgcgggtagaagagcagggttgcgatggctgcggataaatcagcttttgaaacgccggcttgagtttgccgctgcaagggacacggggcaagaggcagccgctatacgccttcgctgcgaggaatcagggacattgtaggcccagaggatggaacgcatgaaatccaaggctcaatgaaaacgctgaactgctgaaacatccctgtcccgcatcgcagaggtcggcgctgtggaaagggagcgctccggcttttttgctgtcccttatgggatcatggctttgcagcgcaaagaaaaagagggggcggcgttgcgcgcgcccattcggttatggtacaatgactccgtgcgcgcacagcttgccgcgccacgcttgatacgaaggaggatgccgctcatgcgcctgatctcatggaatgtcaacggcctgcgcgcctgcctgaccaagggattcgcagactattttgcctcctgcggcgcggacgcgttttgcctgcaggaaaccaagatgcagcccggccaggccgactttgcgcccgaggggtacgcgcagtactggaacagtgcggaaaagaagggctattccggcactgcgattttcacccgaaagcagccgctgtcggtgcagatgggcattggcgtggaggagcacgaccacgagggccgcgtgattgcgctggaatttgaccggttctttctggtcaccgtctacacgcccaatagccagcgcgggctgacccgtctggagtaccgcatgacctgggaggacgccttcgcggactatctgtgcgggctggacaaacaaaaacccgtggtggtatgcggtgacatgaacgtggcccataaggagatcgacctcaaaaatcccaagaccaatacccagaatgcgggctttacgccgcaggagcgcgagaagatgacggcgctgctggaccgcggcttcgtggataccttccgcctgctgcatcctgacgagcgcgaccgctacagctggtggagctatatgcagcgcagccgcgaaaggaacatcgggtggcgcattgactattttctggtgagcgagcgcatcgcgcccaacgtgacgctggcggatattgacgaaaaggtgatgggcagcgaccactgtcctgtcattttggaactgaaagggatggagtgagcatgaagattcttttcgcatcggatttacacggcagcgcctcagcggcggaaaaggtgctggagcggttggaaaaggagggcgcggaccgcttctttctgctgggcgacctgctctatcacggcccccgaaacgatctgccggaccgctatgagcccagggaggtcatccggcttttgaacgagagcccgatcgtgcccctgtgtgtgcgcggcaactgcgacgccgaggtggaccagatggtgttgcaatttcccatcatggccgattacgcgctgcttccgctggatggcgggcattgcgcctttgtgacgcacggccacctgttcaacaccgaatgcccgcccccgcaccggccgggcgacgtgctcatccacgggcacacgcatgtgcactgcgccctgccgcagggggattacacctatctcaaccccggctccgcggcgctgcccaaggagggccagcccaaaagctacatgatctatgaggacggcctgttctccatccgcgcgctggaaacgggcgaggagctgctggcatggaggctgggacaatgaccagaacgctggaggaaagccgggcctttttcgcgaatgaccgctttgccatggaggcctgcggcatcaccatcgacgaggtgacggaggatggcgccagatgctccatgccgcttacccccatgcacctcaatgccggaggtgtggcgcagggtggcgcggtctataccctgtgcgacaccacctttgccgtggcggccaacgccgggggcatccttaccgtgagccagtgcgccgatatgcactacctgcgtcccggcgcgggcgagcggctctacgcagaggcttcgtgcgtcagcgccgggcgctccacctgcctctaccgcgtcaatgtgaccgatggcgaggaccgtcaggtggcggtgtgcatggtcacgggatttcgcaaggcgcctgtgaataaggcgtgaacatgcgaaaaaagccttgcggcaaaaggacgcttcgagtataatacagaaagtgctttatcattactttataggattggagagaagttcccatgcgcaagcgtgtcattctggccttcatgctggtattcgccctggtggcggccagcagctgctccctcatcatcaaggacgaggaagtggacaagcagacccccatcatcgaggtggtgggcaagacctttaccaaggccgaggtcaacgagcaggttgaagccgtgatggattacgaagaatacatgtattccatgtatggcatttcctatgaccgcacggatgcgagcaccatttccatggcccaggacagcgccatcgacgccatggtgcagcaggccgtgctggagaaaaaggccgcagacttgggcctggacgtgctcagtgacgaggaaaaggccgaggtggaggaatcggtggacagcacctacaccctctattccgacagtgtcaagagcgcctattttgccgatacggagctggaaggcgaggagctggatgcggccgtggaggccaagatggcggagcttgcctaccccacccgggaggaactggtggaaagcgagacgaacgccaaggtgctggagaaggtgcgcgatgaggccgtcaaggatgtgaccgtaagcgaggaagagctgcaggaggcctacaacacccatgtggagagcgccatgaccacctacggcaattcgccctccagctatggcaccgacgtgcagaacggcgcgaccatctactatgtgcctgccggctaccgctatgtcaagcacattctgattgagttcaccgacgaggacagccaggccatcagcgatttggaaagccagatcagccaaaagcagaccgagctcagcaccgccgaaacctctctggctgatctgggcgaggacgcctccgctgatgacgaagcgacggcccagaaccgcgcgaccctgagcgagacggtggaggcccgcaccgcggagatcgccgatttggaaagccagctggaggatgcgaaggaagcggcctatgccgccatccagcccaccgtggacgaggtggaggagaagctggctgcgggcgaggactttgacgccctgatggagcagtatgggcaggaccccggcatgcagacctctcctgccaaggagaatggctatcccgtgagtgcggacagcaccaactgggtgaccgagttccgcgatgccgccatggcgctggaaaatgtgggcgatgtgagcgaaccggtgcgcagtgagtacggcatccatatcatcaagtacgtcagcgacgcggtcgaaggtgaggtcggcctggatgcggtgcgcgacgcgctggagaccgaggtccttacccagaagcaggacgaggcctataccgccgccgtcgacgcctgggtcgcggaggcggacgcgaagatctataaggaccgcctgaactgattgggacgatcatgacaaagcggctccggggcatttgccccggagccgcttcaatttgtcgcctcaaagagaacgtcggatatacggaatgaccgtgaatgagggcgctttcaaaacgccgccgctacagctccgcttcctcccaaagctccgtgcctgtccccagccgcagggctgtgcggaaacccgcctgccgcgccagtgccgccgcctgtggaaaggcgtgggccagataccggcggtcgtggcagtcggaggtgagggtaatctgcccgcccagctcgcgccaggcgcacagcagttccagcgtgggatagggcgtggtcaggtagccgcgcgccatgcccccggtgttgatttccagaacgccgccgcaggggaagacgcgctccagcgcggagagcgccagacggcggtaggcggggtccgcctcgtcaaacagcgagagggaagcggcatatttgcgcagcaggtcaaagtggccgatgatctgcggccggtcgcgcaggagggaggttatctcaatggcgaaatagtcgcgcgccatggccagcccgtcgccatggtacacctcatccacatagcggcgcagcagcacggggtccccgtccacggccacgggcgcgccaccgtagctttcgcacaggtagtgcgccgagccgatgaggtaatccgcttcggcacaggccgcgcggcggcagtccggatgggccagcgcgtccagctcaagcccagcccacaggcgcggaaaaccgggctccggcgccgcctgcagggcgcgaagctccgcaaagtagcccgcctgcacgtccggggccatggaatagtccgggtcaaagccctgccaggcgtgccccgagaatcccaggctcacaaagcccaaagcgcgggccgcctccaccatggcggggatggcgtctgcgccgtcgcaccagcgggaatgggtgtgggcattgctcggaaacgtcattgcatgcgctcctgcttcacctttttgtcgatcacatggcggcgggccagctcgcgcaccacatcctccagcgaaatgcccatctccaccatcagtaccatggcgtggtagaccagatcgcccagctcgtaggtggtctcggccttgtcgccctttgcgccgccgatgagcacctcggtacattcctcgccgaccttcttgaggatcttgtcgcggcccttctcaaagagataggtggtgtagctgccttccttgggcgaggtcttgcgcccggcaatgacctccatcagagcggagagggagaaggggcgaatgtcctcactttcatacaggccgtcgaaaaagcagctctcgctgcccgtgtggcaggcgggaccggccttcttgacctgcgctaccagcgcgtcgccgtcgcagtcggcggtgagggaaaccagcgtctgcacattgccgctggtttcgcccttgcgccagaggcactggcggctgcggctgtaaaagcaggtgcgcttttcctccagggtgattttgaggctttcccggttcatgtaggcgagggtcagcacctcgtgggtcacatagtcctgtaccaccacggggatgaggcccttttcatcgaatttgagtcgggaaacgagcgtttcataatccatcgttgccatcctccacaaggcgcatgggtacgccgttttcgttgagccagcgcttgagggcgcggatatccacttcgcgcgaatggaagatggaggcggccagccccgcatccacgcaatcaaggcggaacacgtccagaaaatcctcgcggcggcccgcgccgccggaggcgatgatgggcacggacaccgcctcgcccacggcccgaagcatttccagatcaaagccccggcgcacgccgtcggtgtcgatggagttgaccacgacctcgcccgcgccgctgtccacgccgcgcctgacccagtcgatggcatccagccccgtatcgtcgcgcccgccgcgggcaaagacgtggaagcgcccgtccacgcgcttgacatccatgctcagcaccacgcactggtcgccgtagcgcttggccgcgcgggcgatgagcgaggagtcgcggatagcgccgctgttgacgctgaccttgtccgccccgcatttgagcacgcggtcaaaatcatccagggtattgatgctgccgcccacggtgagggggatgaacacctccgccgccacggcgcgcagcgcgtccgcaaacagcgggcggccctcggcgctggcggtgatgtcgtaaaacaccagctcgtccgcgccggaatcgttatagaagcgggcgagcgccacgggatcgtccacgtcgcgcagaccctcgaagttcacgcctttgaccacccggccgtttcgcacgtccaggcaggggatgatgcgccgggtcagcatggctgcgcctcccctctggcaatggccagcgcgcgttccagacggagctttccggcgtagagcgccttgcccagaatgcacccgtagaggcccatgtcacgaagcgccgcgatctcggtttcaaagctgaccccgccggaggcgatgacctgaagcccggcgatgccggacaggcgcgcatagacatcaaggttggtgccggaaagcgcgccgtcgcgtccgatgtcggtatagatgacggtggccacgcccgcgtccgcgagcttttggcagaaggccacgccgtccagatcgctcacctcgcgccagccgcgcgtggccaccttgccgccgcgcgcgtccacgcccacggcgatgcgcgcgccccagcgcgcgaccaaccgctcgaccatgccgaaatcctccaccgccacggtaccaaggatcacccggtccgcgcccagggcgagcgtggcttctacgtcggcttcggtgcgcatgccgccgcccacctctacgctgagcggcagcttgcacagctgcccgatgacggtgctgttctgagggctgccgtccttcgcgccgtccagatcgacggcgtgcaggacggtggccccggcctgcacaaagccctgcgccacggccacgggatcgtcgccgtagacggtcatgcggtcgtaatccccctgcgtcaggcgcaccacgcgtccgccccgcaggtcgatcgccggatagatcagcatgccgcatcctcctctcccatggcgaaggcccgcaggatgcgcaggcctaccgcgccgctcttttccgggtgaaactgcgtgccgcacacgctgccgcgcctgacggcacctgcgacggtgacgccgccgtaatcggagcttgcggcgagcgcctctccgcagccggttgcgtagaacgaatgcacgtagtagacgaaatctccctcgcgcacgccggcgagcagcgggtcatccgggcggttgaggtgcaggctgttccagcccatgtgcggcacctttgcgccgggggcgagaacgggcgcgaggggccgcacctcgccgggaatcaggccaaggcccgcgtgctcgccgtattcatggctcttgtcaaagagaagctgcatgccaaggcagatgcccatgagcggcttgccctgtccggcaaggtcgcgcagcagcgcatccagcctgagggcatgaagtttttccgccgcatcaccaaaggcccccacgcccggcaaaatgatgcggtccgccgtgcgcagcgtgttttcctcgcgcgtgacggtgcattgcgcgccgatatgtctgagcgagcaggtgagcgaatagaggttgcccaccccgtaatccaccacggcgatcatggcgcgtctcctcccagcgtacccttggtggagggaatttccccggcggcggcggggtcgatctcgcaggcctcgcgcagggcgcgggctacggccttgaagatgccctcaatgatgtgatgcgtgttcttgcccgtgagcagccggatgtgcagtgtgatggccgcctctcgcacgagggcgaggaagaactcctccacaagctcggtatcgaacgtgcccaccttctgcgcgggcaggggcgcgtcaaagccgaggcaggcccggccgctgaggtctacggccacaagcgcgagcacctcgtccatgggcaggaggcgctggccgtagcgccgcacgccccgcttatcgcccagggcggagcgcagcgcctgccccagcgcgatgccgatgtcctccacggtatggtggtcgtccacctgcgtatcgcccgtgcagctcacgcgcaggtcaaagcgggcatgggcggcaaggagggtgagcatgtggtccagaaagccgcatccggtgcggatgtcgctctgtcccgtgccgtcgaggttcagggtgagggaaatgtcggtctcggcggttttgcgttggatggtcgcgcttctcatgatatcgtcctttccgacagaatggcgcgggtttccagcacgaggtggcgcatctgctcccgcgtgccgatggtgatgcggacatgctccctgagcgccgggtcattccagcagcggatgagcacgccgcgcgccttgagcgcctcgtagtagccgcgcgcggtcagcgcgggatgggccgcaaagagaaagttggcacggctgtccgtcatggaaaagcccaggccgcgaagctccgctgccgtctccccgcgctggcgcacgacgctttgcacacagctttcgaagtaggccgtatcgcgcatggcctcgatgccggccagcatgctcaggcggttgatgttataggggtgaaagctgtacctgacgcggttgaggtcctcgatgacgggggcgttggcaagggcgtagcccagccgtgcgcctgccagcgagcgcgacttggagaacgtgcgcacgatgagcaggttggggcaggatgcaagcaggggcagggcgctttcgccgccgaagtccacatacgcctcgtccaccagcacgatatggtcgggattcgcgcgcacgatgcgctcgacctccgcgagcggaagggagatgccggtgggcgcgttggggttggccagcaccaccatgccgcccgtgccgagaaacggttccacgggcacggtgaaatcctcacgcaggggcacggcgttcgtgggtacgcggaacaggtttgcaaacacccggtagaagccgtagcttacggcggggaaggtgacgggatgggctccgtccgcgaaggcgaggaaactgaaccccagcacctcgtccgagccgttgccgcagaacacattgtccggcgaaagcccatatgtgtccgcgatggcgcggcgaagcggcagggccgtggggtcggagtagaggttgaggcgggagacttcctcgcggctgagcgcgtccagcacgcggggcgaggggggaaaggggctttcgttggtgttgagcttgacgtactcgcggccctggggctgctcgcccggcacataggggtcaagcccggcgagcgcgggaatgagaaaatcgctcatgaacggccctccatgcgcacggccacggcgttggcgtgcgcgtccagcccttcgcggtgggcaaagcgcatgacgtcctcggacaccttttcaagcgccccgggggtgtaatacagatagctggaccggcggcagaaatcatccacacccaaaggagaggaatagcgcgcggtgccgctggtgggcaaggtgtggttgggcccggccagatagtcgcccaaaggttcggggcagctgcggcccaaaaacacgcttccggcgttatgcaccatgggcagcaggccgaagggatcgtccacgcacagttcgaggtgctccggggcgatctcgtccgccagccgcgcggcggtttccaggctgtccaccacgaggatgcggccgttttgctcgatggaggtacgggcgatttcctcgcgcgggagcagcttgagctgccgctccacctccgctgccacggccctggccagcgcggcgtcggtcacggccagccatgccgaggaaagccggtcatgctcggcctgtgaaagcaggtccgcggccagatggacggggttgctgtttgcgtcggagacgatcatgatttcgctgggcccggcgatcatgtcgatgtcgcacaggccgcgcgcatagcacagctgcttggcggtggccacatagatgttgccggggccgacgatcttgtccaccttgggtacggtctgcgtgccgaaggccagcgcggcgatggcctgcgccccgcccgcacgcaccaccgtgcgcacgccggcgagctttgccgccgccagaatgggggcgggtaccctcccgtccggtccgggcggggtggccatgacgatggtctgcaccccggcgattttggcaggaatggcgtccatcagcacgctggaaggataccgcgccgtgccgccgggcacatagagtccggcgctggccagcggcagcacgcgctgtcccaccaccacacccggagagggcgtatccacaaagccggcgcgcttttgcaggcggtggaaccgctcgatattccccgcagccagccggagcgtatccagaaattccggctccacctgggaaaacgccgcgtccagctcctcctcaggcaccagaaggccgtcgggccgcgcgccgtcgaatgcttcgcaatagtccagcacggcttcatcgccgcgcagacgcacatcctccacaatggcttccactgcctgcgtcacgtcgcgcttgacctcggcggcgcggtccagaagctgggcggcgggctgcccctcataggttacaatgcggatcatgggcgttcctccttttgattcagctggtcctggatgcgggacagcagcctcgatatggccggttccttaaacttcatggcggccttgttggcgatgaagcgcgcgctgatgggcagaatctcgcgggtgacctccagattgttctgccggagagtggtccccgtttccacgatgtccacgatcacatcgctcagccccagcagcggcgccagctcgatggagccgttgagcttgatgatctcgatttcccggctctgcgcggcatagaagcgccgggcgatggccggatacttggtggccacgcgcagcggccgctggcggtcctcccggaagcccacgggcgcggcctccgccatgcggcatttgccaaagcccaggtccagcagctcgtatacgtcgcttccgccctccaaaagcacgtccttgcccaccacgcccacgtccgccgcaccatgctccacatagatggccacgtccgagggcttgaccaaaaggtaactcatgtcgcctttttcatcggtcagcaccagccggcggtcatcctgctccatggcggcacagtcgtagccggcggccttgaacaggcggtataccttgtcgccaagccgtcccttgggcaatgccacgttcagcatgcgccgctcacctcctccagcgccccgtcccgatagcgcatcgtgcggcccgcgcgcaggccggggggcggcatctgtgccgccagcacgcgcaggccctgcgccctgagcccctccagagcacgaaacacaccgggcgcctcgtcgcgcgcgctgtagagcaccagcacgtccacatcgtcgcccgcgggccgggcaagcacgcgctgcagctggtcaaggtagagggcaaagcccagaccgtcgcctgccttgtcgaacttgcgcatcagcttgtcatagcggccgccgctgagcgccacgcgcggcgcgccctccacgtacccctggaacaccaggccattgtagtaatccagatcattgagaatggaaaaatccagccgcacatgcccgcataagtccatcgcgtccagtgccgcgtacaggctggaaagctcgcccacggcctgtttcatgtccgctcccacggcgatatccgccgcgcggcgcagggtttgggtaaaatcgccgcagagcccgggcagctgcgcaatacggcctgcatagaagggcgcgacctgccactgggaaagctggcgagcgagttcgtgcgcgttcttctggcggatgaggcggatggcctgctcgcgctgcgagccgtccagccccgcatcagccagcagcccgcccgcaaagcccatgtgactgatatccagcacaaagcccgctccggtgagccgcaggctctcgatggccaggcgcagcacttcgcatgcgccatagagatctacctcgcccagcagctccacgcccagctggccgatctcggtaaactcgtggtcggtgggggaaaggcgatatacgctttcgtggtagtacagcttttccacctgcccccgctccggccgcgcccgcttgacgatggacagcgtcacatcaggcctgagggccatgagctggccgcttgcgccagtgaagctgagcacgctttcgctggtgagaaagctcttgttttccagataaagtgcgtactcctcaaagcggcgcataggaaagcgcgcatagccatagctttcatacaggccgcgcaggctgagcaccagacgctcctgggggctgagcacatcgggaacggacatgggacccctccttccgggatggtggacagtatagcacgctttaacactttagtcaagcaacgcaataaatttcttctttgcttgaactaagaaatatcacgccgaaaagaacagcgagtgaaacggtcgaaaaaggggcggccttgcagccgccccgattgttcccttgaaacgcccatccgccgggtcaggcttccggttccatcaggcccagatcgccgtccttgcgcagatagagcacgttggtgcggtcggtctccacgttgacaaacacgaagaagctgtgtcccaacagttccatctgcaaaatggcatcctccacgctcatcgggcgcaccgggaaggtcttatggcgcaccaccttgggagccggcccgtcttcgctgacggtttcgacgctcgcggcgtcgtactccagttcgctgggcttgaacgcatcctcgcgcaggcgtttgcccagcttggtgcggtgtttgtggatctgccgttccagcttggccagggcctggtcgatactgacgtagaggttgtcgtcgttcgacgcctcggcacggagcaccacaccttcaaagggaacggtgatttcacaggtgcggcggttattcttttcacgtgtcaggcgcacaaaaatttcggtgttgggattgagatagcgctccattttcgaagtctttttcaaaacgcgttcgctcacgccggggctgactaccatgtttttgccggtgatggtcgttttcatatttggaaactccttactatgtaatggggaaggatgtcaggcggaatgccttgcggcgctccggctgaaaccggaagaacgagaaaatgatgcgtgtgccaatggaaccacgctcctttccaacaagtgatgcgggcacggtcagcccgcaccatccggttttctgaatccaccttttccttgcccttgcttggtatattctgttcgacgcgaagcggtccgattcctgctgcaatgggggaaacatccaaagcatttacactttcgtcacagttgacccctgaaaatggaaagtatggcgcaaaagagaaaaagaaaatccaaaaaatatttaaaaaatgtgaacaatttggcaggctgatccgtcttataggatgaatggcagtggttttagcggcgaaggtcctccgggctttctgaaggagctgccgccgataacgatagaatatttttaaggaagcataggaatcagggaggtagaagatcatgaaaaaacgtcgcatgcggctggcggttctgctgatggcggccatgatgctctgtggactggccgttgcagagcctgttcatgagcatcagtggagcgcatggcagaaaagtgcggatcatccgagtcaggaaacccgcacctgccttgaatgcagcgctgttgaaacacgggaacatgagtggggcgcgtggatcgatcagggcgacggcacggaaaagcacatctgcaaaaactgccagaaagaagagattcgcaagattgagacgcctttggaacccctgggcgacgacgttggcgacgagggcggaggcgccagcttgctgaagggggacggcacaggcacggacccgaacgcgggcacaggcacggacccgaacgcaggcgcgggcacagacccgaatgcaggcacgggcacagacccgaacgcaggcacaggcacagacccgaacgcgggcacaggcacggatccgaacgcagacacaggcacggacccgaatgcaggcacgggcacagacccgaatgcaggcacgggcacggacccgaacgcaggcacaggcactgatccgaatgcaggcacaggcacggacccgaacgcgggcacaggtacggacccgaacgcgggcgcgggtacaggcacggacccgaacgcaggcacaggcacggacccgaacgcaggtgcaggtacaggtacggacccgaacgcgagcgcgggtacaggcacggacccgaatgcaggcacaggcactgatccgaatgcaggcgcgggtacaggtacggacccgaatgcaggcacaggcactgatccgaacgcaggcgcgggcacaggcacggacccgaacgcaggcgcgggcacaggcacagacccgaacgcaggcacaggtacggacccgaacgcgggcacagacattgagaacttgggtgaggatccggatgaaggtccgatagtcaaacaggcgcagatacagatcaacctggttgtggactccggtgaggcaaaggccggagatacgcttacgtatacggctaccgtgaaaaacgacggtacggctgacgctcagaatgtaaaggtcagcttcacactgccgggagaactccaaattgcagaaacgtcctacggcggtctccaggctgaatccacgcttgcgcagctgcaacagggagaggaggccaccgtctggctcaaggcaatggtgctggagagcgccgtccatggtacaaagctgacggttacggcttcggcggacggaatggtttcgaacgcacaggaaacagcggttttggagcatccgcaacttacgctggcctgcattgcaggcagcaatacggctacggaaggcgaaacgctgcaatatacggttacgcttgccaacaccggcaaagggccggctgccgatgtggacgttgcgattacgctcccgcagggcgtcgagaacgcgaccccgacggcgcctgatggaacttcctatgcgggcggcatctggacggtacctgcactggcagtgggcgagagcctgtcgctcgtcctgcaggccacggtaaagggcggtatggctgatggaacggacctgaccgcacaggcccaggtgacgggcgtttccaggaggctggccgatggcagcgtgtcgccggagatgcttgcggcgcccattgcagccagcgcgccggtcactttgtccgcgcccaccctcgccatcgggctggctgtggacaaaacatcagccgccacgggcagcgttgtgaactatatcgttaccgtatccaacaagggaagcgctgcggccgataaagtgggcgtaacggtcagcctgccggctgccaacctgcagctgggtacggttacgcccaaggaaggtaccagctgggatggaaacgccgggaaatggaccattccttcgctggccccgggtacggagagcaccctgaagctggaggcggtcgtgaccgccgttcagccgggcgaaaccgtcacgggtggcgcctcgattgtggaagccggcggagcagccatgcctgcgcctttgtcggcgagcgcggccttcgcgggtgaaaacgccgcggtccatctctcgatcaccaaaacggcggaccgtctcggagcacagcccggagaggagcttcgctatacgctggtggtcaccaacaacggcaaggcggccatcagcagtatccaggtgagcgacaagctgcccgataagctgctctttgcgggcaaggagctcagccagggcacgacctatgacgaggccaccggcctgtggaccattcccatgctggaagggggcgcgcaggcgacgctggtgatcaaaaccgtcgtgctggatgctacagtgggcgtaaacctggtcaacacggccgaaatcatcagcgtggctggtgctgaaccggccgtgcatcccacggcgaccgcgtcggtgcttatcaatgcgctcaactatggcttcctcaccgtcaacaagacggtaacaggcagcggggccagcaagcagcgcgacttccccttccaggtggtctttacgaatgcggcgggggcggctgtgcacggcatcggcatatatgtgaagggcaacgaaacccatacctttgatacggcgtctccgctcacctttgagctgcgtcatgatgaaacggtgtggattggcgtgcctgcgggcctgagctacaccgtgacggagacggataccaagggctacacctgcacctggaaaaacgaaaagggtgttatcacggccaaccagctcattcaggcgacctttgtcaacgaacgccagcggaacaccgaaattcccaagaccggctatgccgatcaggccccggacgcggacggcgcacaggaggcgccgtccgtggcggcggacctggcggacgcctacgcccagaacgacgatctggtgggctggctcaaggcgggcgagggaattgacctgcccgtggtgcagtccgacaacacctattatctggaccatggcttcacgggcgaggaggacaggaacggcacgctgtttctcaacatgaacaaccagctttttccccctgacgacgtgctgctcatccacgggcataacatgaaggatggctccatgttcggaacgctccccaaatttgagcggtatgactacgccaaagagcatccccttgtgacattccagaccatctacgacgaggagcccgtttactatgtgccggtttcggtgttcaacgcctccatgctgccggaccattcccgttatttcgacattacgcagatcgtctttcccgacgatgaggcgggggaggtaacggattcctccacctttcgccagagcagcgcgttcaaagcctatctggacgaactgcgggcggtgtcactgtgggaatcgcccgtggatgtgaatgtggatgacaagctgctcatgctgattacctgcagctacgacctggaggacggccggctgatggtggtttgccgcaggctcagggacggggaaaccccggaggaggttgccgggctgtttgcaacataaccccaatggcaaaaacagctcttttctgcgcgcagtgcgtgggaaagagctgtttttggtataaacaaaagcgcctcgcatgctgcgaggcccttttctggtacaccatcaggggctcgaaccctggacaccctgattaagagtcaggtgctctaccaactgagctaatggtgcttatccgccagccgggccgctttcgtgaagcggtatcacaaccagcgaagattattatactccatcaatcgagaatgtcaacccccaaaatgcgaaaaatttcaattttccgcatccgcccgttccgatggaaacaaccgcgtactttctccgtccataaaggcaggcgtaaacgcgctgtccgcggattcccggctttgcagatacccctccagccccagcgccaacatataatcgcgcacgcgcgcatattccctggccgtcagacgccggtccagtcctggcagattgaccccgttcatgggcgtatactggcgcatcaggctcacaggcgtgccggatggcagctcctctgcgatcgcatccaaaatgcgcaggctttccgaggtgcgcaggggaagaatcaggtgccgaaccagcgtgccgctttgcatcaggccgtccgcgtcatagacgggcgcgcccttggcctggcacatggcgcggatggccgccattgcaacgggaaaatagtccggcgcgccggccagctgctgcgcggtttccgcgctgaaatacttgagatccggcaaaaacacgtccacgaaccgggcggcggcctccaccagttccaccgtttcatagccgctgctgttccataccacagggatgccgggcctgcgcaggcgcagggcctcgaagatgaccggggcgaaatgcgagggcgtcaccagattcaggttgtgcacgcccagctcctccacccgcgcaaacagttcgctcagttcccgcgcgttcatggcccgtcccaggctgtggtggctgatggattcgttctggcaaaacacgcatcccagtgcgcagccgctgaaaaacacggtgccgctgccccgtgtgccgctgatgcatggctcctcccacagatgcgccgccgcgcgggcgacgaccggcaacgtgcccatgtggcaatagccctcaccccggtcaggaccgcgcatggcgttgcaccgccggggacacaggttgcatagggccatgggacatcctccttccgcgcctgggcgctctgagaagtgtagcacagcgccgcctgactgtaaagcatcgaggcggcgcacgcacaagtttttcaccacatacggcaaaatgcttgtatttccaaaaacgttgtggtatactgcatattgcctgttgttgcaggctgtttctggcaacgtatcgacccagaagaaagaagggtttttcgtaaagagtgggtatcgctttcctctcctttcatgcggcgcgttccggagggacgcggcggcgccggagggcgtatcccttcgggccacgctttgcggttggcaaagcggcatggggggaagggcatgggcgatagcataccgctctttttgattgcttttttgcaacgggcatttcagtatgaaacggatggggtaggaaggtatggcgaaaagcaagggcgcgcgcggcgcgggccagtctgccgtgggagaagtggagcggcgcgcatgcgctgtagctgaagaaatgaacctggagctggtggaggtcacgctgcaaaaggaaagccgcggcaagtgcctgtgcgtgtacgtggataaggaaggcggcctgtcgctggacgactgcgaacgctaccacaagcgcctgcagcccatgctggaggacgtcgattacgacatcatggaggtatccagccccggcgcggaccgccctgtgaaaacccggcgcgattttgaaaaacacaggggagagctggtggaggtaaggctctttgctgcgcgcgacggcgcaaaggcgtttcgtggactgctgaccgccatggacgacgccaccgtgaccatcactggcgagacggagcagccgctggtgttccagcggcgggaggtggcggtggtcaagcccgtcatcgagctggatgaggatgattttgccgacgttgagtttgacgccttgaatgacgaagaatagagaaagcaggggaacaccatgagatcgaccaaaaagaaccagcaaagcggcggccaggcggagattatcgcggcggtcaaggcgttggccagcgaaaaggatatcagcgaagagatgctctacaacgccattgaggaagccctcaaggcggcctacaagaaaaacgtctcccgcgaggaaaatgcacccaccaacctgagcgttaccctggatcgcaccaccggcgtggcccaggtattcgcccgcaagaccatcacggatgaggtggaggaccccgccaatcagatctctctggaggacgcgctgaaaatccgttccgactatcgcatgggcgatatcgccgaaatcgacgtgacccccacgggctttctgcgcaccgcggcacagacggccaagcaggtgatcatgcagcgcatccgcgaagcggagcagggcaagatctacgacgaatattccgaaaaggaaaatgagatcctcaccgccatcgtccagcgcgtggagcccaagggcgtctatgtggaactgggacgcaccgagggcattttgcccgacagcgagtggatgcccggagaggaataccatattgacgaccatatcaaggtctatgtactggaggtcaaccgcaccggacgcgaaatgctgcgcggcccgcaggtgcgcgtcagccgcatccatcccggtctggtgaagcgtctctttgagatggaggtgccggaaatcgccgcgggcgtggtgcagatcaagtccatcgcacgcgaggccggcagccgcaccaagatggccgtacactccaccgaggtgaccatcgatcccgtgggcgcctgcgtgggcccgcgcggcaaccgcgtggaaaaggtcgtcgccgagctgaagaacgagaagatcgacatcatcaagtggtcgccggacccggcggagtttatcgccaatgcgctcaatcccgcgcacgtgctgagcgtctttgtggcggaaaacgaaaaggcctgccgcgtggtcgtgcctgacaaccagctcagcctggccatcggcaaggaggggcagaacgcccgcctggccgccaagctcaccggctggcgcatcgacatcaagagccagagccaggctgctcagatgttcgacatggcgatggacgaacccgcgcccgaggagcccatgggcttccaggcttactacgaagagcccgcgcccttggaggagctgcgccagtccggcctgccggagctgcgcgatattcccctggatacggaccccgacgaggacgacaccctctgatgcccggctcgtctcatacagaaggagttgtgaaccgtgccgccaaagccgcgtaagattcccatgcgcatgtgcgtaggctgccgcgaaatgaagcccaaaaaggagcttctgcgcgtggtgcgatcgccggaggggctggtcagcctggaccccacaggcaaaaagcccggccgtggcgcatattgttgttataacgcggaatgcctgcgccgggccctcaggcagggtcagctggaccgccagctggaggtcaggctgggagaagaggtcaacgcgcagctgacgcaaaccatgcaacagctgctggcaagccgggaggcgcagccgtgaaccatgagatcgaaagccgcgtaacttcctttctggggctgtgcctgcgcgccggacggctcaccaccgggcaggaggcctgcgtggagctggtccgccggggcggggcggcgctggccctggtggacgggggcgcgtctgccaacacgctcaagcgtctgtcggacgcatgccgcagccatgatacgccgctctacgcactgtcgcccggcgcgctggggcatagcatcggaaagccttcccgcatgaccgtagcggtcgcgccggacggcatggcggacaggctgctggaaatgctcagggaccaaccccgcctgtgaggcggaaacgatcgagcggcaatccctttggccgccggtccaatacattgcaagattatgcgggggtgcaagcggtacaatgaccaaagtgaaactcaaggatgccaccaaggagctgctcaagggcgcggaggatatgctgggcagcgtgtccaccatgcgcaaaagcgcagatgagctggcgcaagccgcccggaagctggaaaatcagtttctccggcaggaggagcagcgccgcgcggaggagaagcaggccgagcagcagcgcctgttgagccagcacgccaaggcatataccatgcccgatatggacgaggccgaggaggcgcccaaggtggaagcaaaagcggaagtcaagcccgtggcacccaaggaagaagtcaagcctgccccggtggcggagaacaagccggcgcctgccaagccggcggaaacacccgcggcggcacagcccgcggcaccgtccgcgcccaagccggcttcggggacggcgcgtccggcttcgcagcccacgcaggccgcagcggcccccgccgcagcgcgcccggccccgcagcccgcgcaggcttcagcgacccccgcggcagcgcgcccggcttcacagcccacgcaggcttcagcggcccccgccgcggcgcgcccggcttcacagcctgcgcaggcctcggcgacccctgccgcagcgcgcccggcagctcagcccgcgccccaggccgcgacggctcccgccgcagctcatccggccccgcacgccaccgcgcctgcggctacccggcctgccgcacagccgccgcgggccatgcagggcgctcagcctgcgcgcctcgctcagggcgcccaacccgcgcgtcccgttcagggcggtcagccggcccgtccggcgcaacctgcgcgtcccgctcagggcggtcagcccgccgcacgtccggccgcgaacccgcagggcccgtatggccgtcccgcaaatcctcagggtccctacggccgtccggcgaacccgcagggcccgtatggacggcccgcaaatccgcagggtccctatggccgcccggcgaacccgcagggtccgtatggccgccccgcaaatccgcagggtccttatggccgtcccgcgaacccgcagggtccctatggccgtcccgcaaatccgcagggcccctatggccgcccggcgaacccgcagggcccgtatggccgccccgcaggcagtcagggcggaccccgtcccatggggggcgggtttggcaaccgctccggcggtccgcgccccccgatgggcggacgcaagcccgcggtagaaatgacgccttccgttgagaaggaacgcgtcagcaactacgatcccaacaagaaaaactacgtgcgccagcacgatcctgaacgtgtggcccgtaaccgcaagcagctcgcgcgcgagaatttcaacgggctggatgatgatgtggtgcgcggcggccgccgtgcgcgcgtgaagaagcccagcgcgcagcagctcatggcccccatcaagattgaaaaagcctacatgaccgccgaaaccatcaccgtcaaggacctgaccgagcgcatcggcaagcccgcgggcgagatcctcaagaagctgctcctcctgggcgtgatggccaacatcaacagcgagctggactttgacaccgccagcctcgtgtgcagcgatttcggcgtgacgttggagatgaacctggccaagaccgctgaggatgacctggccgagaccgattttgaggacgcggaggaggacctccagccccgtccgcctgtggtcaccatcatgggccatgtcgatcacggcaagacctcgcttctggactatatccgccactctcacgtcacatcgggcgaggcgggcggcatcacccagcacatcggcgcctacaccgtcacggtggagggccgcaccatcaccttcctggatacgccgggccatgaggcttttaccgcgatgcgcgcacgcggcgcacaggccacggacatcgcgattctcgtggtggcggccgacgacggcgtaatgcctcagaccgtggaggctatcaaccatgccaaggcggcaaatgtgcccatcatcgttgccattaacaagatggataagcccgccgccaatcccgaacgcgtcaagcaggatctgaccgcatacgagctggtgcccgaagaatggggcggcgataccatcatggtgcccgtgagcgcccataccggcgagggcgtcgatacgctgctggagatgattctgctggaggcagacatgctgcagctccgcgccaaccccaaccgcatggccaagggcgtgatcatcgaggccaagctggataaggcacgcggccccgtggccaccgtgcttctgcaaaacggtacgctccacgtgggcgacaacatcgtggccggtatggccagcggccgtgtgcgcgccatggtcaacgaccgcggcgaacgcgtaaccgaggcgggaccctccatgcctgtggagatttccggctttaccgatgtgcccagcgcaggcgacgacatgatggccgtggccgacgatcatctgggccgccaggtggtgcaggagcgccgcgacaagctcaaggccgcacgcgcagccgcctccagcaaggtgtcgctggataacctgttcagccgcatcgaccagagcaagctgaccaacctcaacatcattatcaaggcggacgtgcagggcagcgtggaggctgtcaagcaggcgcttgaaaagctgtccaatgacgaggtcaaggtgcgtgtgctgcacagcgccgtgggcgccattaccaaggatgacgtcaatctcgcctccgcgttcgacgccatcatcatcggcttcaatattcgccccgacgcctccgcgcgcgaagctgccgaacgcgagggtgtggacgtgcgcctctaccgcgtgatctatcaggctatcgaggatgtacagaaggccatgaagggcctgctggagcccgaatacaaggaggtcaccctcggccatgccgaggtgcgcaacaccttccgcatcaccggcgcgggtaccgttgcaggctgctacgtcaaggacggcaagcttcagcgcaacgccgaggcgcgcctcatccgcgacaacgtggtggtgtttgagggcaagctctccagcctcaagcgcttcaaggacgatgccaaggaggtcgccgagggctacgagtgcggcgtgagcttcgacagcttcaacgacatcaaggaaggcgacgtgatcgaatgctacgtcatggaggaggtcgagcgctgagggcgctccctccccgccgcgtgaccatacgtttttgaaggaagcgatccattgagctatcaacgcattgaccgcatttcagagcaggttcgccgcgaggtggaccgcatcatccgcgatcgcctgtccgatccgcgtattcgtggcaccttcagcgtgacgcgggctgaggtgacgcgcgatctgcgctacgccaagatctacgtcagcattctggaggaagccgaccgcgcgcccatgatggcggcgctgaaaaaggcggcgggtttcgtgcgccatgagctggggcagagcatgattatccgctatgcgccggaaatcctctttgaagaggatcacaacatcgaatacggcatccatatcgcatctgtgctcaagcaggtgcgctcggaggaagaaacgaacgatgaatcaagcgacggtcaggaataaccccgatccgcggcagcaggtgctgtccgccgttcaagcggcggacagcgtcttgctgttttgccatgtctcgcctgatggcgatacgctgggcagcgcgctggcgctcaaattgcgtctgacggcgatgggaaagtctgtgcggctgctcgtggacggagaagtgccgtccaatcttgcctttctgtcgcgcatgggcgcggtggagggcccggaggccgcggccgatgcggctgatctggcccttgcggtggatgtgagctgcaaggagcggctgggcgcgtgtgccccggcttttcttgccgctgcgcgcaccgcggtggtggaccatcacagctccaatcccggttttgcccagatcaactgggtggatggcgacgctccggcgactgccgtgctggtgtaccggctgctggaggccatgggtggcgccctttcccgcgaggaagcggtctgcctctataccggcctgtccaccgatacgggcaatttcatctacgagagcaccagcgccgagagctttcgcatgatggctgcgctcatggaggcggggctgcctctggcggagtatgccaggcggttgttccgggtcaaggaactgcccttcgtaaggctgctgggcgagacgctgccctccctgcacttgatttgcgagggcaaggtggccggaatcacgctgaccgccgctcagatgcgtcaagcgggcgcaaaggcgggacataccgatggtctggtggattatgccatcgatctggaaggggtagcgatggcatacttcgcccgcgagacggaggatggacgcgtgaaggtaagcctgcgggcattggagccctggcgcgtggatcaggtggccgagcgctttggcggcggcgggcaccggttggccagcggcctgaccctggacatgcctctcgctgaggtcgtgcgggtcgtggaaggcgcgctgacggaggcgcttgggagcgtgaatgcatgacgcaggtaaaaccgctgtgcggctttctcaacgtgcttaagcccccgggcatgtcctccgcacaggtggtaggatgtgtgcgccgtctgctgggcggggtgaaggcgggccacgccggcacgctggacccggaggcagcgggcgtactgccggtgatggtgggaaaggctgcgcgcctgtttgattatttgcaggacaaggaaaaggaatatgtggccgaggttgccttcggggtggccaccgatacgcaggatgcgcagggcgtacccattgcccatggagaccgctggccggatgaagccgcgatcgccgctgccctcccgcgtttcaaaggaaaaatcctgcagacgccgcccatgtacagcgccctgaagcaggatgggcagcggctgtacgacctggcgcgaagcggccgggaggccaacgtccccgccagagaagtcacggtgtatgcgctggaccttacggggcttacacccgaacatggggcgcttttgcgcgttcgctgctccaggggattctatgtgcgtaccctgtgccgcgatttgggcgagacgctgggctgtcccgcgcatatgcgctttctgctgcgcatacgcagcggccctttcgggctggatacggcctttacgctggagacgctcgcagaaaaggccgcacagggaacgctggccgggtgcctgcttccgcccgaaaccggccttggggccatggccatggcgcaggtgccgccggatttggaaaaggccgtgcgaaacggcggccacgtcccatggaatcgctttgccgcacagggcgtaagcgcggagcagccttttggactgcggctgggggaggcgctgctggccgtggcgcagcgacagggcgacgaggtcaaggtgaaaacctggcttgcggaatgagcaaatgaggaggacaacagatgcagaccgttctggacggccgctatgcggccgaccgcagcgtggtggcgctgggtatgtttgacggcgtgcacatcggccatcaggtattgcttaagaaagggcgcacgctggccgatcggcagggtgtgccgctggtggcgtgcacctttatggaccatcccctgcagctgatcgcgccggacaaatgcccgcccatgctgaccacctttgacgagcgagttcggctgatggaaagcctgggcgtggatgtgctttacgccatgcccttcgaccgttctgtgatggatatgccgccggaggactacgtcggtcacctggttcgccagttccatcccacggatgtggtatgcggctataaccatacctttggcaagaagggcgagggaacgccggccctgctggcggcgctgggcgatgcgctgggattttcaaccgcagtggtgcccaaaatcacgctgaagggacaggaggtcagctctaccgccattcgcggctggctgcgccagggagacgtggcccgcgcgcgggcgttgttggggcgcccctatctgcgccaggcggcgatagccgctcgccggggcgggcgctgggagctgtttatgacgcccaacggcaagcaggatgtgcccaggggaaactaccgggcgctgtgctccgatggggagcatacatggcctgtgctgctgcgtgtggagcgagaaggacgcgccctgtgcagcctgcctgcgggtacgaccctgcatgatgagctggagatccgctttctgacatccctgtcggtggactcatgatctc

SEQ ID NO: 764 - DNA, 2311 bp, Unknown
  16S sequences of unknown bacteria
catagtgatcgtacagctccttctgagaagccactgcaaagctgggggtaatgatggacagtgcatctgcgccaagctcttctgcgcgcttgctcatgcggatggtctctgcagtggtgatgcagccagtgccggcataaacaggcacacgacccttgacctgatcgatcaccgttgcgaggatttcttctttctctctggcagaaagggcgtatgcttcgccgttggtgcccagcgggaagattccatgcacaccgcccgccagcagacgctctacctgcttgcgcagctcttcatgattgacggtctgctctgcgtcatcgttcatcggggtgattaccggagggataatacctttgatatcgctagtcttcataatgtgctctccttttctgttttgttttttctatgatgtttctatatgaaatgaatgcttacatgacttcctgatacagcttgcgtgcatcatctgccgtaacagggcgcatattgtttaccagaagccgctgcacctgcatgcccgcctcgaccagtccttccagatcctcggccggaacgccgaactccttcaggctggtgggaatgtccaggtgcttgacgatgtgctccagacgagcgatcatccatgcggtcttttcttccactgtggtgcaggtcttttcctcatggcagcagcggtcataagcaattgccagccgctcgcgaactgccggatgctcgctgttgaagcgcatgacgggtgccagcaggatcgcatttgaaacgccgtgggcgatatgatacttgccgcccagcggatagctcagggcgtggactgcagtggtgccggaagcggtgatcgccaggccgccatagtaagcggcgatctgcatccggttcttctccgtcatggcctcggggtcatcgcaggctttttcgatgttgttcaggatcagatccaggccttccagcgcatacagatcgctgaagggatttgccttgttgctggtaaagcactcgatgcagtgtgccagtgcatccacaccggtagctgctgcgatcttgcggggcaggttcttgatcatgcgtgcatccagaatgacataatctgcgatcatgttctcattgacaatgccgaccttcagttccttttccggtacagccacgatggcattgggggtgacctctgcgccggtgcctgcggtcgtagggatgagcacgatgggcacgcacttctgtgccatgccggggttgtccagcagctccttgacgccgtagtcatccgtcaccagtacgctggccagcttggcagcgtccatcacgctgccgccgccgcaggccacaatcaagtctgcaccggacgctttgaactggtccaccagtttctgcacggccatgtagctcggctccggaggcaggtcatccagcacatagtattctgcacctgccgccttgactgcattttccggcagggcaaacagtccggcgccttcaattcccttatccgtgaacattgccactttttttgcgccccgcgccttgatgatcgcggtgatgttgtccattgcgttctcaccgccataaactgcatgcggcattttcaggttatactgtgtaagcatttccaaaaacctccctgctgttttgatccagctcattccgttttgttccatgcgatctgatccgcaagacagatcagcagatcatcctgtccgaacccacccgactttgtaatgacatggcgggtgcatccattgtaagtaaagcgtgccagaaccacgcccgattccatttcacacaccggttccagctcgtgcacgccaatgcagttcatacattgcagcagcgtatctccgccggtcagcagcaacgttccaagatgcgggcttgtaaaaatggcacccagcagatgtcccacactgccggagatccgcacccggatcgtcttacggtcgatgccaagtgccgcggcataatcagcggtgagctgattgctgcctgcatcgttcgtttcaatgatgcagtgaccattggacgccagcatcttttcgattttgctcagcgcttcccgcccatgctggctctcccagtaaccgggtgtcagcttctggtagggcgtcagccgcattcttgcaaacccggccttttccgctttatccagctgacgcagtgtaatggggttcacacttccgcagagcaccagcagccttggatccagccgggggatctctgccgggatcccggccagcccaagcagccggggaagcaccgctgcaaaccccgcgcagcctgccatgatctgcggtgcctctccggcaaacagacagcggcc

SEQ ID NO: 765 - DNA, 13192 bp, Unknown
  16S sequences of unknown bacteria
gggcgggtcgcgggggatggggcgcgggactgcgacccgccgaaagatgagccgctgacccatggttatggttagcggggctatcggtttgcaggaaaatggagggcgttcccctcccccgaagcgggggaggttgggagggggcaaatgtgtcacagacaccttttaagcccatctgcgtgcagtatggatttggatgtttcgtaaccgaaaaatccaaatccgtatccagcgcagcagggcgaccgggttttcagggcgcagccctgaatgacttttggttacttttcttcacagaaaagtaacgccccgccggcaggcgtacagattagaaccttttgtaaaacttgccccgccgataggcgagtagaaattgtgattgaaacccgcttcgcggggggtggggcgcgggactgcgactggccgaggacgcgcccccgccgcaggcgtgcttaatcgaggtgccagatgtcccgggcgtagtcgtggatggcgcggtcggcgcagaagatgcccgcgccggcgatattggccaagctcatgcgctgccagcgcagcgggtcattgtagtagagctccgccgcgcggtcatccgccgccgagtagctctcaaaatccgcggccgccatatactgatccacagtgcgcaggtggttggccagcatccagaagctctcggggctatcctgccgctccataaattccagcagccgctgcagctcgccgctgcgggcaatggcatcggcgggacggtagccgcgctgcttcatctcctccacctccggggtgctcatgccaaagatgaggatattctccgggcctacctgctcggcgatctccacattggcgccatccatggtgcccagggtgatggcaccgttctgcatcagcttcatattgccggtgccggaggcctcggtcccggccagggagatctgctcgctgacctcgctggcgggcatcagccgctcgctcatggaaacattgtattcctccaggtagacaatcttcagccggccgcgtacatcggggtcggcatcgatcatggcgcccaggtcattgatgaagcgaatgatctttttggccaggtcatagccgggggccgccttggcgccaaagagataggtgcggggcttaaactcggcatcggggttcgccttgatatccaggtagtgcttgaggatctgcagggcattgaggtgctggcgcttatattcatgcagacgcttgacctgcacatagaacagcgaatcgggattgacggtgatgccgcgctcggtttgcaggtagcgggcaaaatccgccttgttctgccgcttcagctcacccagctcccgcaggcttgcctcatcatccaggtaggcgcgcaggccggtcagcagatcgaaattgtgcagatattcctccccgatgcggtcgcggatatagcggtccaggcggggattggactgcatgagccagcggcggctggcgatgccgttggtgacattgccgaacttctccggcatcaggcggtagaactcgtggaacacatcgtccttgatgatctggctgtgcagcttggaaacgccattgacatagtggccgcccaccacgcacaggttggccatatgcaccttgccgtcccgcaggatctgcatcttttccacctctgcgttatcacagcggaattcctcccgcatgcggatgttccagcggcggtcgatctcctgcacgatctgatagatgcggggcagcagctcgcggaacagggtgatatcccacttttccagtgcctccgccatgacggtatggttggtgtaggcaaaggtctgctcggtgatctcccagctcttttcccagctgtagccgcagtcgtccatcagaatgcgcatcagctctgggatggccagggtggggtgggtgtcattgagctggatggcattgagctcggcaaagctatccatggtgccgtagcgctccatatgggtgcgggtgatctccgccagggaggcgcacaccaggaaatactgctggcgcaggcgcagctgcttgccctcctggtggttatcattggggtacaggatcttgctgatggtctcggcacgggcggtcttgcggaaggcgcccaggtaatcgccgttattgaagcactccatatcgatgccggggctcttggccttccacaggcgcagcacgctcacggcctcggtatcatagccggaaacatacatattgtagggcacggccagcaccgtttcgtaatcgatatactgctgcatcaggtggccctggtcccagtgctcctccagccgcccgccgaatttgacctccacggcgtgctcctcattggggcgcagccatacctcgccgccgggcagccagtaatcaggcagctcggtctgggcgccgttcaccagcttctgcttaaagatgccgtactcgtacaggatggagtagccggtgccgtagtaaccatcggtggccatgccatccaggtagcaggcagccaggcggcccaggccgccattgccgagacctgggtcaggctcgcaggcaaagagccgctccggcgtggtgccaaaggcggtcagcgcctcggtaaagggctccaccagccccaggttatacaggctgtttttcaggctcttgcccatcaggaattccatagaaagatagtggatgcgctttttgcgttcggcggtggtcttggcgcggtgggcacggcgtttttccaccatcaggtcgcgcagcaccagggccgcggccttatacagctggtcatcgctggccagctggggctttacctccatcaggtactccagtttattttccatcgccagacggatctgttcagcagtcatatcggtatctctcctttggtgtgagaatagagttttcaccaagcttattatacctattttttcggttttttcaaccgctccattgtaaagtttgttatttttccatcaatacagtttttctctttgcaggctcggctttttgcgctataatggaggcatagaaataccttaggaggagagttatgagccgctacaagatcaatattatggagcaccagtattatatcaataccgaccgtgaccctgcctgggtaaaaatgcttcaggagcgcctcaacgggcagatcgatgagatccgggaggggtgccccaatctttccgcctttgatacctttgccctgctgaccatgaacctgatggatcagctggccaaaagcgaggaggccgccgccaacctgcgccagcagctgaccaactacctgcgggaaagcagcgccgtgcgtgcccccggcgacgactaccgccgggccggacagatggacttccgggactatgacgagaatgacgaggaattttgagcgaaatggaaaaacacgctgaaatactggcgcctgcgggcggcgaggcgcagctgcgcgccgccgtcctgtgcggcgccgatgccgtttatttggggctgcgcggctttaatgcacgcgcgggcgccgaaaactttgacgaaaacaccctgccgcagaccgttggctggtgccatgcccgcggggtaagggtctatgtaacgctgaacaccctggtgaccgaccgggagctgccccagtggctccattccctggatgcggtagccgcagccggggtggatggcgtgctggtgcaggatctgggcctggctaaaatcatccggcagcggtaccccaccctgccgctgcacgccagcacccaaatgaccatccacaacctggcgggcgcccgcctgctggaggaaatgggctttgcccaggtggtgctggcccgggagctttccaaggaggagatcgccgccatctgcgccgggacaagcatgcggtgcgaggtctttgtgcacggggcgctgtgcatgagcgtttccgggcagtgttacctcagcagcgtgctgggggagcgcagcggcaaccgcgggcgctgcgcccagccctgccggctggactttaagagccacggccggggctatgccctttcgctgaaggacctgaccctgaccgaccgcctgcgggagctggaggcgctgggggtggccagctttaagatagagggccgtctgaagcgccccgaatatgtggccgccgccgtgaccgcctgccgccagtccctggccggagaagtgcccgacctggaaacgctgcagtcggtattcagccgcagcggctttaccgacggctactacaccgcccgacgggaccttaccatgttcggcacccgcaccagggaggatgccgccgcggccgccgcggtgctggggaagctctccgccctgacccgcaatgaagtgggccgcctgccggtggatatggtgctgacgatggcccccggagagccggcgaccctggccgtgaccgacggcacccacagggtggaggtcgccggcgaggtaccgcagacagccctgacccgccctaccgatgaggagctggcccaccgggccctggaaaagtgcggcggtacgccattctatctgcaaaacctgacctgtcatatcggggaggggctgatgctgcccctttccgccctcaatcgcctgcgcgcggccgcgctgactgccctggccgaagcccgcagcgtggtggtgccctacccgcaggcccctgccgcagccggggagccggccggtagggcgcgccctgcgggcgcgccccagctgcgctgccgcctggcggcggcagcgcaggcaacccccgccattcggcgggggggcggccggctctccctgccgctgcatgagctggccgagcgcccggagctgctggaaaccggcgcggagcgctgggtggccgagctgccgacattctgcgccccgcagcaggaggaagccgtgatgcgcgccctgcgcaaattgaaggagcagggcctcaccgctgccctttgcggcaacctcggttccctgctgatggcccgggaggccgggctgcggattatcggggattacgggctcaatatcatcaattccccggcggcgcagcaggccgtggcgctgggctgcgatgagatcaccctttccttcgagtgcgagcgcaatgccgcccggaatgtcgatagccccatccccatcggtgtcatcgcctacggccgcctgccgcttatgctgctgcgcaactgtcccggcaaaaccgccgcgggctgcggggactgccgcggcatcaatcacatcaccgaccgccggggagaagatttcccgctgcaatgccagaaccgccagtacacccacctgctcaatccccggccgctgttcctcagcgaccgcctgccggaatgggatttctgtgattttctcaccctgcgctttactaccgaaaccccggccgagtgcgacgaggtgctgaagatgtaccagaccggcgccgccccggctgggtccttcacccggggcttatactaccgcacattaaaataaggacaccagtaaaaagcagcaaccgctcatttcgataaaccattctcatattatttcttcaggaggcccttatgcccaaaatccgcatccgctatctcagcgataaaatcgaaaagctccgctacatcgatggcaaaagcgactggatcgacctgcgcgccgccgaaacggtggagctgaaagccggtgaatcccgctacatccccctgggcgttgctatggtgctgccccaagggtacgaagcccatgttctcccccgcagctccaccttccgcaattacggcattctcatgtccaattccatgggcgtagtggatgaaagctactgcggcgatgaggatgagtggaagatgccggtctatgccacccgcgattgccgcatcgaagcgaacgaccgcattgcccagttccgcatcatggagcatcagcccgccatcgaatttgaggaatgtgaaacgctgggcaacccctcccgcggcggctttggctccaccggaaagcagtgatccttatgaagaaaaacagccaaatgtcctcctcgctggccgtcggcatcctgctggcgctggccgggggctttatggatgcttacagctacatggcccggggccatgtctttgccaatgcccaaaccggcaatattctgctgttcgccgtcgccatctcggagggccgcccggccgatagcctgcggtatctgctgccggtggtcagctttgccctgggcattgccctggccgccgctatgcgcacccgctttggccacatgagccgcctgcactggcggcagctcaccctcctggtcgaaattctgatcctcttcggggtcagctttttcccggcgggacagcatctttgggccaatagcctcacctcgctggcctgcggcatccaggtgcaggccttccgcaagatagagggcaacggcattgccaccaccatgtgcatcggcaacctgcgggccggggtgcaggccctgcatgaatatcacatcgcccatgaccgggaggagctgcgccgcggggcgctctatttcggcgtcatcctcttttttgcgctgggggccgtggccggcaatctggccgtgggccgctgggggctttccgccatccggtgggattgcctgctgctggtgctgccccttttgatgatgctctccaagcctgatgaatccaaggaggaaaccaaatgaaagttttagtcgccgtcgatctgcagaatgactttatcaatggcgccctgggcaccgccgaagcggccgccatgctgccccgggccgagcggaagatccgctcctttgaggggctggtgctctttacccgagatacccacaccgaagactacctgaacacccgcgagggcaaggcactgccggtgccccactgcatccgcggcagccacggctggcagctggccgcccggctgctgccctacgccagcgaggtcattgataaacccacctttggcagcaccgccctgggagagcgcctgcgcgccctgaatgaggatgcccccattgaatctatcaccctcatcggactctgcaccgatatctgcgtcatcagcaacgccctgctgctgcgggcttacctgccggagatccccatcattgtagatgccgcctgctgcgccggggtcaccccggaaagccaccgcacggcgctggccgccatgcgcgcctgccagatcatcattgaaaacgaaccgtctgtataagttcccgccgggagcgggggcgccgcaggcaagccgccctccgggcggcttcagcggtcgcagaccgctggctccggcctccggccggagcgcctgcggcgccctgcccttccgcactgtcctactctccccataccgccggctttgtccctccagggcgcggccctcttttccccctgcacaatccaccaaaggagaccccccatgaaagaactcatccttgccagctccagcccccgccgccgggagcttctctccatcatcacccgccgctttaccgtgcagaccagcgactgcgatgaagccatcgcccccggcaccggccccgtagatgccgtccgggagctttccctgcgcaaagcccgggccgtatgggcacagcagcccgatcaacgggacctcgccgtcattggcagcgataccgtcgtctatatcgatggtgagatcctgggcaagccccacagccacggggaggccgccgccatgatctcccgcctggccggccgcagccataccgtctgcaccggggtcaccgtcatcaccgcggaggagacccgcaccttccacgaaaccaccgaggtccacttctaccccctcaccccacaggaggtggcatggtactgctcgttggaggagccctacgataaggccggggcctacggcattcaggcagccggggcgctgctggtgcagggcctcaccggcgattacttcaatgtgatgggcttgcccatcgccgccctggcccgcaccctgcgggagatgggcgtcaccgaagccctttcggaaaattgaatccgcgcatagaaaccggctcccgcccatctgggcaggagccgtcttttttatcctcttatcttgcttccagcgtttccgcgtccaccgtttcgggggtagatagcttctcgccgtactgctcggccatatactcccgcagcagcggctggcggcgcgcttcctccagcggcaggaacatcggcagcccgtaggtcttggtaccatccgctgccgtgcgcaccaagctgaggtacagacagtcatcgctgccggtattggggtaggtccaatccgccagcgccagcagcggctcggcctcctccctgctcagcaggatccccgcttcgtacgcagcctgactgaaaatctcagtctccacaccgtaccacagcggaaggatgacccggccggtgcccactacatcacagccccaggcagtgacgaacatgctgtcccactcggcagggatcagatagccttccaggccccactcccgcaaaagctccagcgtgtgggtgtagctctcccccaccggcaccgtaaagctgctgtaaaagtccttttccgccggctggtggctgtacttttcgtccagctcactttccaggtagaggtagcacaccgtccttctctcctggtcgtagtaatccatcgccttttccgccagcatatccagccgcagggccgccaccagcgccgccgtgtcataatccgtttcggtcagcgcggttttatgaaagccggtcgcatcgcacaggtctatctcccggtaggggctttcctccgccacccagtagtacagcgggttggtcctgctctggaattctggcgtatcctccaacgcggcataggccgccagcagggcatcaccgccgtaggcatggtacacccgcttcatcacccggccgtcgttaaaggtgtattccagctctattctgcccatatggttttcaccgctcaccccgttctggtcgctttcggtcagcaggcggtgcagcgccgtggcagctttcagcgcctcggggccccgcagcgtcacctcaccgatgctgtcgtagctgtagtagatggcatgattctctccctcgtagctatgcagccgttcggcctcgttcaggtaaacattattgtaccgtccgcggtaatccagcgtcacgctggccagccgttcggcggccggcacccttttctcaaagcccagtcccccggtaaagagaatcccggcatacagcaccgtcacagccgccatggccgcgcccatcataatgcttccccgcttcatgcccttaaagcctcggcccaggatcagctccacaaagaagtacaccgccagagcaaaaacggcgatccacagcagcatggtaccccggctgtccgccccggagatcatcccaaacagcgtcccgaagcccagaccccccacaaaggtagcgatgaaccggaacaccccggctgccaggccctcgcggcagcggctctcggcgcgctcgctggggcggcgggtatacagccgcacggcagcccacagcagcagcaccccggccgccagccagatggccattgccgcgtacagccactcaccgtaggtggtgtagctgcctatcatggtcagcaccggcgtcagcacacaaaagatctgccacttcatatcgtagttccagccggcaaggtagctttggcacatcacggtatgggtcaggcacagtaccggcagcgccgccaggaataccccggagaacaaaaaggtatcaaaggtggagcccacctgcgtggccgccaggtacaccataacaataatggcaaaggccgtgacataccagcccagcaggtccagcgccacaccccccaggtggaaggctgctcggtcgggcgtcatgccgtgccggatgccggccaaagcagcggtcagcagggtattggcggtcataggcagcgccacggtcaaaaagttggccagcacatggcccagcagcagttgcccccgggtgaccggcaggctgtggtaaagatccaccgcccggcggttgtgcatatagcccaccccggaaagcgccaggataaagctgcccgccagccacagcagacataccgtccccaccgctatgcccacatacaggccgccccggtcggccgtgctgatattctcatacacccactgtcccttttcttcccaccggcggaacatcgccagcaggtacggcagcggaatgccgatgaacccgatgagcgccaggtacaccatattggagatatttttcttcaaaagcccgcgcagcagactgccaaagcggttaggagaggatgttgctgtaatcataacccgccgcctccatttctccgatgaatacttcctccagcgtcatgggcagcgcctccgcaaagagcggccgccgcgcctccagcacggccagggtgtcctccgcggtgccccgcaccagcaggctcaccagcttgccgcgttcctttttatccaggatggcaagccccgtcgccgcccagtccaccgggtggtcataggccgcctgcacccggcagaagcccagcttcagcacatccaggtctttctcaaacagcagccgcccggcggaaagcagtcccacctggtcgcacaggtcctccagctcccgcaggttgtgactgcttatcatcacggtggcgccccgctccgctatctcctcggccagcagctttttcaccatcagccgtatcaccgggtccagcccgtcaaaggcctcatccagcagcaggtaatcggcatggcagcacagcgccgccaaaagcgccgcctgccgccgcatccccttgctgaaggtggaaaggggctgatcggtttgcagcggaaagcacccgcaaagggtgtggtaggtctccatggaaaagccggaatacagcccccggtagaagcttgccaggtcctccacggtgctcttgggcgggaaatacaggtcatcgctgagatacaaaatgcgatccttcgccgcgatgttctcaaagatatcctcgccctccagcgtcacccggccgccatcggggcggtacaccccgcacatcagccgcatcagcgtggattttccgctgccgttgggccccaccagtccatatatgcatccccgccggatctcggtattcagcccatccagcgcggttttatcctcaaacctttttaccaggttttctgctcttaacatcactcgttccctccgtagcatcgctccaccagcgcttcggccgtggttttctccacaccggccagccgggcctgccgcagcgcttcccgcagctcggcttcggctcttcggcaggtcgcttcggcggcgttttcttccccgcccacaaagcagcccttgccccccaccgtgtaaataaccccctcgctctccagctcctggtaggccttctggatggtattggggttcaggcccgtttcggcggccagggcacgcacactgggcagccggctctccggggggaatacccccatgacgatcagcccggtcatctgctccttgatctgctgatataccggtatccggctggtcgggtccagttggatcatggctctcacttccttctctcacttcgttgatctcccggctttgtggggggctctcccccgcaggtttcctgcagcccgccagtctccaccgcgccccgcagtctccggcctccggccggagtgcccgcccggccctgcgggccgggcgggccgacgccctgcccctgcgggggcagggcgcccctgcggggcgcggcttgccgggctgctgcgtattttcatcccgcctcactcacgccgagcggatcatcacgctctcccggaacagcggcatcatcatgtagcccttcgccttcagcgtatcaatgatatctggcagggcctccagggtggcggcactgtaatcgtgcatcagcatcactactatcttctgctcccccaccgaggagaccgcgttctgataggccttttcggtggtcagtacccccggcagaccgtcgccggtgtagcagttccagtccacatagcccaggccgtcggccgccagcgccgccgcgatggcctgttttttgttcccggccgtagggctccctccagggaaccggtagatctccggggtaacgcccaccgtttcggtcagccacttctgctggtcccgtatctccttgatgcagctgtcggcactttggtacaccgcctttattttgtgggaatagctgtggttggccaaggtgtggccctcccgtatctcccgctggatctgcgccacatggtccggccggtgccgcaggaagaaggtggcgtgcacccccttctccttcaggatatccagtatcgcgtcggtagtgttgtcgtacggcccatcatcaaaggtcaggtaagcgattctcttatcgctctccccagcccttatctgccgctccagctctcccagcagccggaagccctcgtccttctgcttttgtatcgcctccggcagagccttctgctccgcggtctcggtacgcagggcctccacctgggcggtcagtccctcattctccgccgtgatcgtctccagctcctgccgcatggtgtccagccgcccaccatccgggtcgatcatccgcaggccgcccgccaccgccgccaccaccatcagcaccgttatcagtcccggcagcaaagcgcttttcttctgttttactttcactttggtttcctccctcagccggccagtgtcgcctccagactctctttccataccttccagctttgcagtgtctcattggcatcgccgttctgctcctgcagttcattcagctcgccctccagcgccgttttttcctccagcagcgcctgttgcagctccctggcactttcatattcactttgcagggcactcagttctcgtttttcctgccaccagccagccatgccccagtaccccaccgccaagatggccagcaccagcgccactgccgcgatcgtccgtttcattggtttctctcctttgttttctgttttctcgttcccgcgtcttaactgtattagtacagatagtacagtttcatcttatcatgccgcccctcccctgtcaatgaacattccgtaaattgtcgaagccctgcggggccagttttttccgcctgccggcgggattccctctcggaaaaatatagtcccgcacccgcgcaccgcgaccccctttataccaaatttcatcttgccttcggcggcgcggagccttttgcaaaggcatagtaagcaccgctcgccgcggaggcgttccttttg

SEQ ID NO: 766 - DNA, 2378 bp, Unknown
  16S sequences of unknown bacteria
gccctgtaacccatctcccagcagcagggcggatcgttcctgctggccatacctcttgagcgtctcggccgccttttccagggggttgggatgaatatcgcaggcatatccgaaaaccgcttttccatccatcagaagacgtgtaatcaaatagccgtgatctgtcccaacatcggcaatccggctgcccgggcggacgatttgcgctaccgccgccaacctctcatccaaaacaatcacgctctatccccccttctgctttctttttattgtacgataaaaagcgaaggagaacaaggggcgcttttgattatccatataattttaaaaatgaattatatttcatatagtatatttaatgtcaaaaaccgttggcgcccactcgttcctgccatagtcatgaccacccgtgacaacgggtggcatgaccaagccctaaaagggcataatgcaggctgagcctaaaggctcactgaacgatttgccaaccgcatagttttcacaggccgccgctaaagcggcctgtttttatgcctcggtattcttgtcacccgtaaacgggtctatgtattccttgagtgttatctggtctgatgctatgtcttcctgtagttgattacggatatattccgcgattgctttcttattccgtcccaccgtatcgacataatatcctttgcaccagaattgcctgttgccatacttgtactttaaattcgcatgcctgtcgaatatcatcaagctgcttttccctttgagatatcccataatctgtgatacactgtacttcggagggatactcaccagcatgtgaatgtggtcggcgcacgcatttgcttctataatctctatccctttatgttcacataacttcctgagtatctgccctatatctgcttttattctcccatagattacctgtctgcggtacttcggtgcaaagactatgtgatacttgcaattccattttgtatgcgctaaactgtttatgtcgttcacctttgaatgacctccttcatgttgttgctgcggttggcaaacccgcttctattttaacatgaaggagtttttatttcctactcatcggcttccgccttttttgaaccatgggcatagcccatggttttcggattacaaaaaagcaccaccccggcaggtaccgggttggtgcttttgaaaaacgccattatctttttcgataaaaatcaggatccgctctcggcacgggtgagctcgatagcttctttccccgtcatatgctcaatcacaatctctacacagcataaggacgccttttcccgtttgatttcccgctcgaccgtctctttgtcttcatagtatttcaaacccagagccctcgcggcgtgaaacatttcctcttcggcttccagcaccctggcttttccaaaaaggattacgcttctaaaataggtggtcaattcttctttcaccacatcatctttttcgatgacgcacagcgaaaccctgccgcaccgcttgatcgcgtcaattttatggccggatttggcgccgtgaaaataaattttcccatcagcgtatacataattgataggtaccgtataagggtagccgccgtcgcccaaaactcccagaaccgccgtctttccagattttagaatagaaattgtttcttcctggcccagttgctgcctgtatctcctcattttacggaacatcgccatctcctcctgccctttttataaaaggtatttttccttttttaaaatagcataaaatcctttaaaataccattttatccttcttgcgctttgcaaagccaatatggcaggtacacaacctcctccagaatcctggaaaaatgaccggtaatccctgttttttgttctatgccaccggctccccctggtgaacataggtttccaggcgtttggccgccaaagagctgacaaagaccgctgcatactgcagcacagtcaaaatgagaatcccccaaatactgccgtgagtggttttcggcatcagcatgacgagcagcacacctgccacccttccatagtctagaaagaagcttttcacggtggaaaactctgccgattccgtattggtcggacaggtcttctgcaccacgctgtaatagatcccattgcctggggaaatcaaaaaattattaaaaaacgcattgatgatactgaacatcaaaattgttgccacatccatccgtacaaacaggatcagcgtacaggccagcatggttgtcacgccgccggtcatatatcggatccgtgtggcgggcttgagccgcttgcccagcacccagtaagcaaaaatggaaaacagcccggtcaacagcgtattgacgccaatcaacgcctcactttgaatcagctcaaacaaca

SEQ ID NO: 767 - DNA, 32759 bp, Unknown
  16S sequences of unknown bacteria
cgaatacatagaggtttccgaggaagtggctgacgaactccgtacgagcaggcggcgtgaggcggcccatgccgagcgggtgcgctacaacaaggcgttctattctttggactgcgacgatgggattgaatacacagcctgcctgcatgaaccgacgccccaggaacttctggaccgggtggagctgtttgtccggctctggaacgctctcaactcgctgccggagatccagggccgccgggtagacgcccatctgatcctcggcaagagtttccggcggattgcccgggaggaaggcgtgagcaagagtgctgtccgggattccgtttactgtggcctggagagtatgaaaaaatatctgagaaaaaatttctgatttgaccgtccgtttggccctattttctggtggtatatgagaggtagtttttgacctctccacagcagaacagcggtggccccgagtatatggggagcccagcggcgggtgctttgcatcagcgccgcaagtgggacaggccatcccacggccacgatccgccagggcaggtctggccgcctgcctctccgggccgccgactctgctgtgcggggacgccgcgccgagaattgctgtcttatgacaggccaaggaaatgagcgcggcgtccccaaaactttaggaaggaggcagacctatgaactgcaaccctgaactggcggctctgctctcacagccgtggagcaacaacgcctgccgtggctatgtcatctatgcgatggaacactgtggcttttcccctggtgacatccggcgtgtggtggcagaactccatgaggtttttgacttctgtgggctggaagaggcccagcagcacttcgagaacagcccctactaactgcgagacaacttgtcccatagtggagcaaggcggaagggcggcaccctggcggtgccgcttttctgcgtttccccattggacatcggggaggcagagtgcgttgttttattccgtgaagggaggacgaaatggctgctgaaatcaccagagaggaatacacttaccagattgaaaaccgcgtctttatcgtgacccccgtttacaaggagaagggcgaaccgctccgggatattctgctgaagctgatgctggctgacattgagccgcgctgaccgtccgggacatccttaacactggccgtgagcagaggtataatatttataggataaaacctcttgtttgacggcagaaaggaggatattttgaaacagtcaagcaagaaattctctaccggaacagccgctctctactgtcggttgagccgtgatgataatatggacagcgagtccaacagcatccagaaccaaaagaaaattctccaaaaggccgccaaggacaaaggctatacggacaccatctttttcgtggatgacgggatcaccggcaccaccatgaagcgtcccggttttcagaaaatgattgctgcaatcgaggccgggtatatctcagcggtgttcgtgaaagacctctcccggttgggccgcaactacattgaggttggcaagctcaccgaggaatttttcccactccatgatgtgcggctggtggctgtgtccgacggcgtggacagtgacgagggtgaggatgatttcacaccgttcaagaacattatgaatgaatactacgccaaggacatctccaagaagcgccggatcgtcaacaagatgaaaggcaacgccgggattccgctttctccgccgccctatggctacatcaaaaacccggacgaccctcgcttttgggtgattgacccggaggccgccgccgtggtacagcgcatctatcagatgacgctggagggcagcgggctggcggaaatcgccgccgctcttggagcggatgggatcgtcgaccccacctattactggcggagccggggcgtcaaccgctccggcagcaaaagtaccgtggagcccaccaaatggggccacaccaccgtcaagaaaatcctcaccttgcaggaatactgcggcgatgtgattaacttcaaaagttactctaaatcctataagatcaaacgccgcattgaaaacccggaagaaaaccgggccatcttcctcaatgtccacgagcccatcattgaccgtgccacctgggaaaaggtgcaggctctcaccaaaggcacccgccgcaagcggccccaggtcacccaggagcccagcgtgttctccggctatctgaaatgcccggagtgcggcggcaaccttaatttccacttcaaccagggcaaccacgacatcaagtttttcagttgtcagaaccacaactccgggctccgcaaatgctcgtccacccattatattcgtctggacttcctggagcgggtggtgctgtatgaggtcaaccgccttgccgccttttccagtgagtacgaggacgatttcatcaaggccattatgggccgctccgccaaggttgcagaaaatacgagggtaagaaaacagcgggagctggacgggctgctggctcgggacaaggaactggatatgctctttgagcggctttacgaggacaatgttgccggtaaaatcgatgacgccagatttgctaaaatggcaaagcggtatgagcaggagcagggtgaaaacggcaagcggatcaaggcgctgcgcctggaactgaaacaatccgagagcaagcgcatggacattaacgatttcctcaccaccgtccggcgctataccaacgccgctaagatcaccaagcgcatggtgggagaactcattgaccacattgacgtatatcaagcggaaaagcaggacggcgttaccacccagcacgttgtgatccattacaactgcatcggtgcctttgatgtgccggaccgccggaagataccggaggccgacattatcatggaaacgagaaagggcgtagcagtcagctacgccccggcggtgtaaaggtggtgtgggatatgagagtatttctctattgtcgtgtcgcccatgacgattctttcgcattggaacaccagcggttcctgctccaactctacgcaaagcaggcgggatataccatcatcggcgctgcggacgaatacggcagcgggctcacattagaccgcccggcgctccagaaggtgactgaggccgttatcgctggcaaggtggatgtggtgttagtccataaccttacccggataggccgggagtgggggatgacccaacgctacattgacctgctcacccggcataaggtaaagctcctgtgcatccgggatcggctgctgttcgacgaaaacggcgcggccccaattttgacaataaaaaatgcggagtgtcctttgtaggatactcagatcctataaggacactccgcatggtcggagtagcgggactcgaacccgcggcctcttggtcccgaaccaagcacgctaccaaactgcgctataccccgacaacgcaagaaatattttaccgtatccggcgtgaattgtcaagagcggatttggaaaatcccgccggatcgctgtaaaattttcaaacggcctgctgatcttcggtttcttctgtcagacgcacctgctgtgctgccagacaatccgcacagattccgctgagcagcagctgacggtcattgaccagaaaaccagtggtgcgcataacattccggtccagctccgagatcaggtcgtcctccagatccaggaccttgccgcaccgggtacagagcagatgggcatggggatcagtacggatatcgaaccggtctccgctggtcggtgtggcaatccgccgcaggacgccctgctccaccagctgattgaggttccggtatacagtacccaggctgatgttgggctgttcctttttcacgcagttgtagaccatctccgctgtggggtggttcagtttttcattcaaggagttgaggatgctctccctctgacgggagtatttcatagtcgatcacctaaaaacaattatagttatgattcttattattgattataatactatatcccaggcgaaaagtcaattcccactttgtgcggatgcaaaaaaaacggacagaccggaatctgtccagtctgtccgttttcagttcggatcagaaattgatcttactttacgatctcgccgtaaacttcgcccttgcagttggcagcattggcctcatcggtatcgatgtgaacaacagttgcatagttggggcttacacgaactactacatcaccaaagatcaggtttctctcctgagtgtcaaccttcaggcttacaacttcgccgttggttacgcccagctcagcagcatcctcgggagtggtgtggatatgacgcatggcaacgatcacgccctcagtcagctccacttcgccgcagggacctaccagcttgcagccagcagaaccttccagcacaccggactcacggatcggagcatcaataccgatggaacgggcatcggtcatggacagctctacctgggtctgctttctggtggggcccagaaccgatactcttgccagagtcttcttggggcctacaacatcaactctctcttcacaggcgaactgaccgggctgagagaggtccttcttcttatgcagaacggcatctgcaccgaacagtaccttcaggtgctcatcagtcagatggacatgtcttgcgctggtttcaacaagaatcttctttgccataatacgatttcctccatttcaaaaaccacggcaattcctgtcgcggtgatccttaatttctcggaacacccctattatacaacatctcgcacagcccgacaagtcaatccgaaaatcctgtcggtgattttacaaaaaatatacatccgcttccaatggatcagagaatctgtgcgttttgttcctctgcgatgatctctgccagcctgcgcagatcctcttccatcatcggtttataggagggattgcgcagcagagctgccggatggaaggttgccatcaccaggcgtccgtcccgctcccggatctcgccatgctgtcttgtcacccggaaattggggtcaaacagctgctgggcggcgatccgtcccacacacagaatgatcttcgggtcaatgagctccaggatcttgtccagccagggacggcaggccaggcattcctccggcatcgggtcgcggttctccggcggacggcacttcacaatattggtgatgaacacattccggttccgggaaagtcccacctgttccagcatctggtccagaagctgtccgctgcgtcccacaaagggtttgccctgttcgtcctcattgcggccggggccctcccctacgatcacaatccgggaattgggaacccctgcccccaataccgcctgggtccgtccctcacacaatccgcagttccggcactgctgcagatcctcctgcatctgccggagtatggctgtccgtgacataacctgcctccttatcaaaacgatggattctgcagaccagtatagcatatcccggcaggaaaagtcgatggatttcccgaaaaaagcccgcttcgggtgacagaccggcggggtttggaataggatggaacatcatcggaaaaggaggataccaatggaatacaaactggagtgcccgggatttttcctgcgcactgaaacctgtaccggtccggtgaaccggtttgatgccgccgccctggcgccggagcggcagaccctcgcgctggagggactgccgatggcggcttctgtccggctgctgggccttctggcagaccagctgacccggatggaagtccggtttcagccagtcttttcgccggatttccccggagaacccgaagccctgctgatcgggcctctgctgatcctgccgggaacactgctcaccgatcccgatgcccggctggcagcctgccacctgccgctggcgcatccctgccccagccgggaagccctggaacagacagccctgctgcgctcccatcgggaacggctgctccggcagggacggctctatctgctcaccggcgccgccgcccgggaggaatgccgccaggcggtctgccccgatacggacccccgcaagatccgccgtctgggggaacggctcattgcccaggagtttgcccggggcgaaagcggcaccgtccgggaggggtggcttaccgcagtgggcgccgccggacagcagatcgccgccgccttccccgcagactggcgcatcctgcggctggaggacccctacggcgcctttgcccctgaactgctcagccagctctcggctgccgcccgggaataccgtcaggagcagctgatctgccgctgtccgttggcgtcggacggcaccatcgagcacctgttcctgccggcgctccggctgggcttcgtgacctccaaccactttcacaccttcccggatgacccccagcgggtcatcaatgcccgccggtttgtgagtgccgggacactccgccgggaaaaggccctgcttctcgaccgcaagcgcctgcagcgccagagcctgaccggggcagcccgcagtctggcggaagccggttccctcagccgggagatggacaccctgctgctgggcgaccccggcgatctgtccggggatctggcccgggtgctggcagagctggagcagtccggggtcttgtaaaaaagcgcctccctgtgctacaatcaggccagagaggtgataccgatgcggggaagcatacagaaactgacactggcaggacaggagatctccctctacctgccgcccaaggcactgcgcaatacgccctgccgcctgctgctggcagcggatggggaactgctctttgagatcctcacccagctggcgaatacgctggaagcccggatggcagaggagaaccggggtctgatcctggtggggctgcacagcgaaaaccgggacgccgactacaccccctggcctgcgccggggtttgatgcggactatcccgattttcccggcaaggccggagaatatcttcagtggatcgaccgggagctgctgccggcactccgggcggagtggcccatctccgaccagcccggcgatgtgggaatcctcgggttttccctgggcgggctgctggcctcctatgcgccctatgtgtcccccagcttcggctatgccatgagtctgtccggctccaactggtacgaagggctgatccccttcttccgggaacatgaccccctcaccgactgccggttcttcctgtcctacggacgggccgagggtgcggggaagttctcgatgcagaaggacgccgccgaatgtgccgaagccgccgccgctgccctgcgcagccgcctggggggagaccatgtgatggtgaccagcgacagcggacgccacaccaccaagcgggtggcccggtacacagcagcgctggcctggttccagctctatggggaactcccggaatagcaatctgacctgtcccggctgggatggaacccccaaatcagccgggacagtttccggctcaattcatatacagatgggataattccgacaaattattccatattgtgctgtatttcagatttcaatccgaaatatcgaacatatttatacagattgttattccaaaaaatgccctggttctgctggaagcagccgttccacaaccctccccgccgggcgacgattcagctcccagcgacagaggttcccagcgtcggctctccatgacaagcctcacgcctttacaccagaacggcggttttcgagggaaatcccagccgcccagacagacgcaaaaacagcccggcagatgttccgggctgtttttttgcgggaaatcccgctacaaattgtattatcgttacagaattatacagatcaggccgctgcagccctcgttgatgatccgttcgatggtctcctgcagcttgatgcgtgcgtcgccgggcatccggctgagcttgttgtgcagcccttcgttgaccagctcatgcaggctcttgccaaagatgttcgactgccagatcttctcaggcgagtcctcgaactccttgagcaggtacatgaccagatcctccgactgcttttcgctgcccacgatgggggccacctcggtggtgatgtctgcccgcatcaggtggatggacggcgccgaggcacgcagccgcacgccgtaccgtccgccctgcttgacgatctccggttcgtccagggtcagctcgtcaatggacggcatgacaatgccatagccggtggcgttgacctgatcgatggcgtccttgatcttgtcatactcccgtttggctgccgccagctcggtgatggactgcatcagttcctcttcgttttcaatctccagcccggaggtctcccccagtaccttatagaagaggccctcgtcgatgttcatgcggatgcgggcggcaccctccccgggcagaacctccttcaccgacgcgtcggtgacatactctgcctcacagagccgctgggcacagccggcagcgtcccggatatgggtgatgcccctggctgcctcggtgacgctgtcgaagaggctccggcgcagccagtggtccgcgggcagtgagagaatccaccggggcatctgcacggcgatctcccgcaccgggaactggtacagcacctcggtgagcacccggacaatgtcctcccgcccgagatccaggcaggacagcgccagcaccggtacgccgtactcctcctccatctcctgctgcaccttctgggcctgttcgctctgggggtccatgcagttgagcagcactacaaagggcttgtggatctcctgcagttcccggatcacccgctcctccgcctcccggtattcctcccggggaatatcgctgatgctgccgtcggtggtcaccaccaggccgatggtggaatgctcattgatcaccttccgggtgccgatctccgccgccatattgaaggggatttcggacgggaaccagggggtcatcaccatgcggggcacttcgttttccacatagccgatggaactggggacaatatagcccacacagtcgatcatccgcacccggaaggccgaaccgtcctccaatgccacctccactgcctcctcgggaatgaacttgggctcggtggtcatgatggtgcgtcccgccgccgactgaggcagctcatccaccgcccgttcccgccgggcttcgttctggatgttggggatcacaaggttctccatgaatttcttgataaaggtggacttgccggtgcgcaccggtcccaccacgccaatataaatatctccgccggtccgttcggcaatatcctgatagatggtctgatgttccaaaatctcttctcccctttcccggttatcgtaccgcggggatcagcagcatgccttcccctgccgcgccgtcatcggtcaggccgttctcttccagaatggctgccggcgccgtgctgtaccgcttggcgatctcccagacctgctccccgggctccgggaagtagagggtcaggcagcctgcgccccgctgtttgaccggtttctgttcctgtactgccgcttcagtgatgagccgggctgtctcctgcagcgccatggctgcatctgccttcacctgggcccggacattcagtccgccggcggtccgggagctgtcctgcagctccacccggaagtccgcaagctgctcgcccacagtgccgtccaccgggatctcctcgctgaagtccgccagatgctcaaagtactccggttccccgccggtctgcaccagaccggcgaaccgcacccgcccggtcagacgcaggcttccctcgccgccggcggcactctgctccgccagttccgcccagaggtccatcacctcgtccgacccctcgggcagcgggatctccgcctcaatgggaatattccggtgcaccggctccacgccccgcagcagctggaagggacgggtctcctgggtggtttcgtaacaggtggagaagcagtcggtcataaagctgtcggtttcattggccatcgcccagatccaggcggtcaggctcagttccacactggccatgggctgctcatccgccgccaccgaactgagcttggcatcggtccagtccacggtgaagctcaccgaacagatggcgttctcatcggcgccttcggcgtccaggatctcgctcaccgggatctccatctcctcccggtagagtgtcccgtccggcccgatgagcaccagctcggtcacagcgtccgccttggctaccagcttgccgcccactgccttgaaggtggtgtcccccacacgggaggtcgcccggagcagggcagcatccgagggaatcccgtccgacaggcgctcttcgccccgggcggtgaggctgcgggtactgcaccgcagcagctgtccgcagcagaggggacggcaccggcactgcattccgctgccctcggcccagtgcagagcctgggcctcactgggcgcggtgacacggcagtgcagcgccacagccccccggatctccagcctgcccgaattcacagcccggcagctgaaatatcccggataggactgcaccgcgatctgcggtttctgcggggcccggcgcagctccactgccttggtataggggagcttgaccgtgaccgacgcaggacggccctcttccgacttatagaatacccggcagagcgctacaccgtccacgatcagtctttccccgctcaccactgcctgatccaccgaagtttccacacagcagcgcagaatccggctgatccggggatagtaatccgccagcagcatatcgctctccactgcctgttcggtatttatatcaaggatcgtttcgttgacagtgatcggtttgcgttccagagaaagctccataataacaccctttccttaccagtttactgcttcacttatattcaacggacagccggtttagcaccggatacggcaaaaaagctcctccagtggggaggagctttgggaggaggcaatgccgacaggggagttcagcgggcactgtccgaccggacgcccagcagtacccgaaggattgcgctcaggaatctggggctgcggtaaaccatgattttcactgttatcacctcgattgcattatcgtttcaccagaccgatgaccaccacgccgatcaggaacaggcacaaaaagaccagaatgacattgtatgtacagagcagtcccagcaccacaccggctgcaaaagccagcgccgctgcggtaaagcaccgtgccagatccccgccggagccacggcagcccatggtcattccccctttctgtgcgttctaccccattatacgcagcagaccggggaagtgttaccatgtaaaatacgccggctccgggagaaatcccgaaaccggcgtatgaaaagccagatttacataaaccgcagatagcggatcagcagatagtttgtctgggtgaaatagtagagaaaattcagcgctatgagtgcgaagctcacaccgaagtcccggaaatcccggcggtacagggtgtaaaagaccacacccagtgccaatactgccccgagaatgccggtcatggacggcacatcgggaatgggattgaccacatacaggcagtaggagtggaacagccgggcaaacaggatgcccatatccatattccgggtcaggaagcccagcaggaagagcagtgccggcagcaccacatagaggtagaccagccactgccacattttcttcagttcaaagggtttcttctcgctcacagccaacttactcctttccagattcctcttgtgccgacggcggtaccgaagtggcgcctccccgctccttgagcagcgggatcagtccgtcggtacaggtcacagtgccgtcggtttcgatccacatcacctctgcgccatgctgttccgccagcgcctttccctcctccatgggaaggataaacagtgctgtggagagcatatccgccaggcccgaatcctcacagacaatggtcaccgagctgaaccggtcagcgggcatcagggtttctccgtcaatgatatgatgcaccttgacgccgtctaccatataatagcgctggtagtcgccgctggtcaccaccgagatgttgttggcaatcaccgagtccacataatcccccgactccatcgaggcggacgggtcctggatgccgatgacccaggcggtcttgctgccgtctgccggggcgtccatcacccggacattgccgccgctgctcatggcaaaggaggtgaatccatcggcatagagcttctgggcgatctgttcggtggcatagcccttggcaaccgcgcccagatccagcgaggcctcggggtcagtgagatagactgtccctgcctcccggtcaatgaccaggctgttgatgtcagtgtgctgggcagctgcttccagttcctccatgggcggcagttcaccgttctcggtgccgatgtaccgctcccggtactcatgccagatctccagcaccgatcccatgcagacattcacagctccctgggactgctcctcccattccacacactgctccagcaggtcgatgagcggctcgtccaccttgaccggagcaataccggcattgtcattgatggtcttgacattgttcatgccttcatagctgttgtagcggtcaaagagctgattataatagagaagcagttcatgcatctcttcggaatagcggtcgaaatcctcaccggtatgggtatagcccacattctgcacaatggtatcaaaggtatccatatacgagatccggtaacggctccattccggctccggttctgagccggcaatacatccggtgagcagcaggatggaagccagtgccgcagctgtaaattctcggacggtcttgaaagtcatcagatcacagttcctttattatagcagtatttgtccggctgtccggagaggacaagcagacttataaataattataccgcagactgtcacgactttcaaaagaaaaattacgcggaaactgtatttttttgctttgaaatgcatagcaaaactgctattttttcgtgatatttttattgcaataatgacaaaaaattgtccaagtcgtacagcaaagccaaatttgcttgattttaggacacaccttcgttataatttatacagttgatggcaccttgttggatgccatggaatgaaattagctttatgctaagggaggatttttacaatgaagaagattgttgctattactctggctctgctggttctggctggctgctcctctgagacctacacctctggtctgggtatggtaaactccatcggcagctccaagtccgctactgaagaggccgctggtctggctcaggctgacgttaccgcagcttctgtaatgctggactccaagggcaccatcgtaggcatttccttcgatgttgttcagaccaaggttaacttcgatgctaccggtactatcactaccgacctggctaccgagttcaagaccaagaaggaactcaaggaagactacaacatgaagcccgcttcccccatcggcaaggagtggtatgagcagatcgacgctctggagaagtacgctatgggcaaggctgctgctgacttcgtagctacccccaccaaggctaaggacgagcaccacactgctgttccggatgtagaagacctggcttcttcctgcaccatggacatcggcgacttcctggctgccgctgagaaggctgttgccaacgccaagtaagttttcttacgatttcaaaaaagcaccggatcactccggtgcttttttatatccgggagtttcccgatctctggccccaaccataaaaagcctctctgtcccgctatggggcagaggggcttttttctcagtggctttgcttcattgccggactccgctttatgcttcttccgcagtcacccgttccgcgaactcggtgttcaccagatcgtcataggcgacccgttcctccagctgaccggcctgctgcatgatgtcctggagcttttcaaaccccggacggctcatcaccggtgtgtgggcccaggcatcaatggccttgtagttctccaccaccgaaaccagcacttccaggtcggtatcagcaaagtagggctgcagcacttccgccacctcttcggcagagtgctcctctacccacttctgtccccggtatacagcccgggtaaagccctcaaagagttcggggtcctcctcgatcctgctgccggctgcaaagtaggctgtaaacggcacctcgccgctggcctcgcccaccgatgccaggatatagccctggccctgcatctccatggcagaagctgtgggttcaaagatggtgacatagtcgccggtgcctgccgcaaaggccgatgccatcagcgaaaagtccacgctgtcatcaaacagcacatcttccccgggggtgagcccgtgttcccgcaccacatattccagggtcatatagggaacgccgcccttccggcccggcagcagatggctgcccttgagatcctcccactggaagtcctcatcaggctcccgacccaccaggaaggagccgtcccgctgggtgagctgggcaaagacctggggataatcctcccggccctcgcccatcacatagatggccgcttccggcccggccagaccgatgtccacactgccggacagcactgcagccatcaccttgtcagctccctggcccacagtgagctccaccgagagcccctcctccgcaaagaaaccctggctcattgccacatactgtggcgcgtaaaagaccgaatgggtcacttcacagacatcgatggtgcgcaggccatcggcttcctcctgggaggtacagccgctcagggagaccatcgtcagcacagccagcatggctgccagcacacgaacacacttcttcaaactccatcagctcctgtcatacaatacaaaattcagtcagcgtctgcgcccccgcagaacccggttctccaccagggtgatgcagcggtacatacccactgccatcagcgccagaatgatcacaccggtcatcaccagatccagctggaacacctgcccgccatagacaatgaggtaccccagtcccgccttggacaccaggaattccccggcgatgactcccaccagcgaaagcccgatattgatcttcagggagttgaagagcaccgggatattggcagggaatacaatcttccggaagatctgctggcggctggccccgaaggtttctgccatgcggatcagttccgggtcggtggaacggaagccttccagcatttccagtacagtaacgatcatggagatcgccacagccatcacaatgatcgcctctgtaccggcgcccacccagatgatgatcaccgggccgagggcaattttgggaagggaattgaggaccaccagatagggttccaggattttggaaaccagttccgactgccagagcaggatcgccagcagcaagcctccgaacgcaccgatgacaaacccggtgagggtctcatagagtgtaacggaaaaatgcatgaggatctgattgtctgccagggagaagagggtatccagaatccgggagggactgctcatgataaagctgtcgatccagcccagccaggcagcaatttcccacagcagcaaaagtcccaccaggacgcctgcccgccagagggtaatctcctgtttctgccgccggacctgccgcagataggctctgcgctccgccgagagctctgcgccggcggtcgtattgccgcccggaggtgtgcatttgtggttcatcacgattcacgcagctccttccatatctcgttggagtattcattgaaccggatatcgtcccgacgctccaatggagtgagatccccgagttcaatggtatggatctgtttgatccgggccggacgcacactgaggactaccacccggtccgacatactgacgctttccggaatatcatgggtcaccatgaccatggtctgcccttcccggcgcaggatcgagtagatatcatcggtcacagtcaggcgggtctgataatccagtgcagaaaatgcctcgtccagaaggaaaatttccggcttgactgccagggtacggatcagtgccaccctttgccgcattcctccggaaagctgggaaggatatcggtcccggaaatcccaaagaccataggtccttaataatcccctggcatattctatgttttcaggggtcagacggttccggatctccagacccagcaggatgtttttatatatggtacgccattccagcagattgtctttctgcagcatgtagccgatttttccgccagggccggtgatgggttctccatccagcagcaccttcccctccgacggacgcttgagccctgccataatggtaagcaaggtgcttttcccacagccgctgggccccacaatgctgacaaattccccctgggaaacagtcagactgatattctcagcagcagtgagttccccatccggcgactgataccgggctgtgacattctgcatggtgagaagttcccgcattctcatcacctcactgatttgtagtaaatttgcagaaaagttcctgcacagtccattatatggctggaatttcaaaaggtgagaaaaacgcccccacagtcccatgggaactgtgagaggcgtttgaagaaactcctgatttacttgtcatcaaagccattgggatggtcccggtgccacttccaggccgaggccagaatggtatgggcatcgctgtgctgcggtacccagcccagcacttcccgggccttgcggttggaagcgatgagcactgccggatcgccggcccgccggggcgccagcttcaccgggaagtccacaccggtcacctcccgggcggcttccacaatctcccgcaccgaaagtccgtgctcactgcccaggttgaagatctcgctcctgccgccccggagcaggtattccagtgccagccggtgagccgaagccagatcgctggtgtggatgtagtcccggatgcaggtgccgtcgggagtgggatagtcggtgccgaagatggaaacgctctcccgcttgccctgtgccgcctggagcaccagcgggatcagatgggtttcgggggtatggtcctcaccgatgagtccgcctggagaggcgcccgcggcattgaagtaccgcagggatacatattccaggccataggcagtatgacaccagtgcatcagccgctccatcgccagtttggtctccccgtaggtgttggtgggggacttggggctgtcctccacaatgggagtgatctccggctccccatagactgccgccgagctggaaaagacgatcttcttcacatcatggcgctccatggcccgcagcagtgccacggtggcacagaggttgttttcatagtagagcagcgggtccttcatgctctcccccacctggctggctgccgcaaagtgcagcaccgcctcaatggaatgctccgcaaagacctggtccataaacgccggattggaaatatcccccacatagaggggtgtatcccctaccgcagcccggtggccccgggtgaggttatccacaacgatgcagtcaaacccggcctgacgcagtccctccagacagtggctgcccacatatccggcgccgccgcataccagaattgccatctttttcagctccttcttattcgacagatttcttcctttagtatagcgggttctgtcagccgcttcaagggaatttgtgaaaatcccgcaaaatgaaaaaactcccccgcacatcggaatgcgggggagttttgaacagatctgtctgttaccgacagtcagaaccggttaccgtccggtgctggggttttccttgtcaccggtggaggaggaagtctcgtcctcggcgccgtcagcagtcagcagctccgattcaatgtcctcaaaatcataccagatcttgtgaacagtaccgatctccagaccgttgatggtataggtcacaccgttcttgcgaaccttcagagtgatgtcctcacccttcagcgcacgggccacactggccgggaagtaaggcaggccagtggcgttgaactcaatggtttcgccttccttgccatcctcgatgagcttggcaatcttgtccttgagctcgtcccacttctcgttgccgtagtagtcggagtattcacggctggtgctgggtgtgggatcagggttgggtgtgggggttgtgggctttgtgccgaattcgattgcatcgttgaatgtagtcattgcggccttcagcttagaaacggcagatgtaattgtatcagtttcaaaactgccgctcaatacgctttctgcttcagaaatagctgtgttcagggcatcgtatactgcctgtgtaacccacagcttgccctgctctacttcatcagcactatctgcaacaatagcactttccagaagcttctttgcgtctgcaacagtgttcttcaggggagctgggtcatttttggctgtaccatcttttctctggccttcaaaagtggacttagcgtcattcagagtagtaactgcctgttctacttcttccttggaggcatcttccttatctacaacagcctgtgcagtcttgattgcatcagtgaatgtttcaatattagcagcagttgcccatttatttgatgtggctacatctgctccattctcgctggcaacagtggcatccagaagagcctgtgcattggcaatagcagccttcagagcagtcttatccacagtttcagaagaaggtgtaccgaatacgctgttcttccaatcagggttatccttgatggaagcaggcagtttgctttccagactatcaatattggagaacgagttgccctgcagattgaggttttccagcttgctgaaaccgctcagatctgtgagaacgctaatcaggttgtcgctgagatcgagagtttccagactggtcagaccagaaatcttgctcatatcctcaatgttgttgccgctggccttcaggctggtcagtccagcgggcaggccggtaaggtcgcgtaccttggtattggacacatccaggttggtcacgctggtaggcaccttggaaacatccgcaacagctgtgccggatacattcagggtcttcaggttggacaggccagacagcttggacagatctgcgagagaggcattatccgacagatccagggtatccaggtttgcgagactggacagagctgacaggtcctgaatcttgttgccggacagtgtcagactttccaggcttgtgagcttggacagaaaactcagatcctgtacctggctgccagtcacagtcagctccttcaggccggtacagttctccaggcccttcagtgcgaccaggctcgggctgtcaatggtcagggtttcgatagcagcggcctcgtccactgtcagctttccatccttgctgccgccgcccaatccatctccggcttccagcatagcgttatagagcttgctctcccatacatcgccatccggatagcccttgatgatttcggtatcatctgcaaatgctaccgaggccgtcgaaacactcatcatggcagcaagcagcagagctactatctttttgttgttcatttcattctctcctttacagtttttcgtatgcaagtctgcatctccaacctgcagacctgtatacagtaccgattatacccccccggatttacgcgtcaacgtggggatttgaaattctacatcctttgcttgcaaattcagtgttttaaatgaattgcgtaaaatataattatattagttgttttgtccaatatataacatattattgtgtttttcatttttctctgtcacttatacacaaagcatgaaaattctgtgaaatccatccgggttctgtggtaaatcgcccatatctgtgctatactcaaggtatggaaaacaggtttacacaccacccctgaaatgatcaaaaaaggaggatattatgagggaaatcagtgtatttgatgtggttggccccaatatgatcgggccgtccagttctcacaccgccggtgccctgcgtattgcgctgatggctggcaagatctccaaaggcaagccgaaaaaggtaaaatttatcctgtatggctcctttgccatgacctataagggccacggtaccgacaaggccctgctggctggtattctgggcatgaatactgaggattaccgcatccgggattccttccgtctggcggatgaggcagggattgaatatgaatttgtcccctgtaccgaaaacaagggataccatcccaataccgtagaagtggtcatcaccaatgaggaaggcgttaccacttccattctgggtgtttccatcggcggcggcaatgtcaagctcaagcagatcaatggcgctgacatcagcctgtccggcaatctcaccaccctgtttgtacagcagtatgaccgtccgggtgttgtggcacatatctccaagtgtctgaacgatcacaatgtcaatattgcgttcatgaagctctaccgcgacaataagggtgaaaatgcctatactatcatcgaaaccgatgaaaaacttgatgagcgtctggtagacgagatccaggcaaatcccaatatcaaaagtgccattgtcattgaactgtaaggaggggtattactatggatttttcgtctgcagcagaactgcttaaaatctgtcaggccagtgggattccgatctcccaggccatgatcgaccgggaaaccctctatctgggtgccgatactgtaaccacctattcccggatggaacattcctatgaaattatgaagaatgcggtccacagtgccgtcactgaagatatccgctccattggcggactcatcggcggcgaagccaagaagatggacgcctatcgtgccagcactgtaaagccgctctgcggttcggtgatctccaaggccatcggctatgccatgggcgtgctggaagtcaacgcctccatgggtctcattgtcgccgctcccactgccggcagctccggtgtcattcccggcgtctttgtggcgctccaggaggagtatggcttcaccgatgaccagatggtccgcgccctgttcaatgccggcgccatcggctacctcatcacccgcaacgccaccgttgctggcgccgagggcggatgccaggctgaagtgggtgctgccagcgccatggctgcctctgccgctgtggaactcatgggcggtactcccgaacagtgcatgagcgctgccggcactgccatcaccaacattctcggcctggtctgcgaccccattgccggactggtggaagccccctgtcagaagcggaatgccatgggcgcttccaatgccattgtggcggctcagatcaccctggctggcgtgggcaacctgctcccgctggatgaggtcatcgatgtgatgtactcggtaggccggagcattccctttgagctgcgggaaactgctctgggcggtgtggctggttctcccactggctgccgtctttccaagcagatcttcggctgatccgcacagaatcgcaaaaaagggaaaggaccggttcctttccctttttatttttccaagaacggaggattgccatgtttgacccctttggcgccattgaaacactccggtccctggcagaatcggacagccagatccgggctgcggcggtatccggatcgctcaccgatccccagagtacaccggatctcttttccgactgtgatgcggtctttttcgtccgggatctggaacgggcaaaaaagaccgactatcccgccctgctggcaccccggttcggcggactggtgatctgccagtgtcccgatgccatgggtgcggaagcgggttcggctccctggtttacctggctgatgcagtttgaagaaacccgcatcgacctgcgtctgctcccagtggaacgggctggctggtacaatgccatggagccggggctcaccccctttctggacaaggacggcctgtttgacgggctggaacccaccggacacagtctgttttccctgcgccgtccgaccagccgggagtttgccgactgctgcaatgagctgctctggaccagcctctatgtggtcaaggggctctgccggggtcagctggaatatgccgtctggcacatgaatcactgtgtcctgcctgagctggtgcggatggtttcctttgatcgcggctttgactcggattacgccgtttccctgggggctggcaacaagtacctcccccggctcctgctgcccggcgagcttgcccgatggcacagtctgtatgacctctccggccccgaaagctgtgccgctgctctgatgctcagcctgggactgttccgccggcactgtacctctgccgccggaaagctggggtatcccataccagcggaactggaccgggtcgaacagcgctgccgccgtctgctgaccgaataccggctgttctgagccgctaaaaaacacacctcctgtctaaacagcgccttgccgggccatattatcggcaaaggactgctctgacaagaggtgtgttttattttgtacaatgtcattatctgctgcgacagcgcttccagtctgtatgaccggctgtgcgctgtccggcactattttgaaaccccggtctttggcggagaggagcgtccgctcaacctgctggaaaccggtcgggtctcccagatctccgcacaggccccgatcctgatcctgcccaaggctctccatgagccggtcatcgggtccggagcggtattcgcagtcatcgccaattcggacttcttccaggccgaggagctccgccgccagtttcccggagcccagatcctcacctgcggaatgcatcagcaggacaccctgaccttttcgagctttgacggtgaacaggcagtcatcagcttacaggcggcactggttactctgggcggacgggaactcctgccgcaggaatttccgctcttccgccgggaggacaccaagcgctttgatctgctggcctgtgccgccctgctgctcctctgcgggaagagcagtcagctgccagggatcacattgtagggagaatcactgggcagccgcagcctgttcctcctgggacagctggtgcagataccgcacggcatagattgccagcggaatcatagcgccgacccaggccagcgggctggcaacacatacagccacaaatccgaagctgccggtaaaggccagcgccaccacggtacgcatggtcagttccatcacgccgccgaaggtggtgataccgccctgacccagtccctgcagagcgcatgaccatcactgccaggatcgcatagagcgaaccgttgatcatcaggtaggtgttggcaaggtcgataacctgaatctcaccggcgcccacaaagagggcaaccagtttcttgccgaacaggacgatcactgcgccgatcacaatgctgaacccgcccgagagcaggccgcacttgagaatgccctccttgatgcggtggatcttaccggcgccatagttctgggcggcgaaggtggagatccccacgccaaaggaaagggccggctggatcgccatgttatcgatcttctgggaggcagtgaaggctgctacatagaccgagcccaggccgttgagggcaaactggacggcgatctgacccagggcgataaccgacatctggaagcccataggcagggacagtgccagagcatgggagaccgaatcccaggtgagcttccagtccgagccatgcaggtgcatctgcgggaaccgccggagcatatacaccaggcaggccacacccgagagaagctgggcggcgatggtggcataggcagcgccttccacattcatgcccacattgaggatcaggaagtaatccaggaagatattgatgatgcaggccaccaccagaaagaccagcggggtacggctgtcccccagggcacgggagatattggatacatagttgaaaagcatggtggtgccggtaccggcaaagattacgatgaggtaatcataggcctgttccagaatctccgcgggagtgttcatggcaaccagaatggtgcgggtaaaggcacagctgacaacggtgagaatcacagtggcagccagggagagcagcgcaccacaggcaatgccccggcgcacgccttcctcatcgccggcgccataacgctgggccacacggatggaaagtccggaggtaaagccctgtgcaaagccgataatcaggaaggtgatactgccggtacagccaacggcagccagggcatccacaccaatggtacgacccacgataaaggtatctgccatgctgtaaaactgctgaaaaatgtttccgatcagcagcggcagtgtaaagaggatcaaaagctgtacaatgttcccggaagtcatggaacgctgtttcatagaagtaagtccctccgattctaccaaaaactcaggcaattttgctaaaaaataccgatcatttttaggctgttttcttatttacgaagtattattatattaaaatccaatggatagtcaagagcttttttgaacattctgccaactttaacatgactgaaagttgtatgttacaaagcaacaaaaaaccggcgcgtctgcccattgcagcgcgccggttctctgctgttgaagcaccctgtctgctgactctttggtcagctgtcagtcaggggactttcagctatttcggcttggtatcccggatcgggttacttcatgcccttctcgtaggactcgatcatcttcttgaccatctggccgccgacactgccggcttccttggaggtcaggtgaccgttatagccatccttcaggtttacgccaacctcgttggcagcttccatcttgaacttgttgagagcttccttagcctccggtactacgggacctgtcatagttacatacactccttattctttcttatcgttccggtacagctgccgcggaccttgttgtccgcagaacctgtattccggtggaatcagcgtcgctcgctgtttcctgtattgttatgtgcagtcccgcccggttcaaacatggaatattctggttgattcatcatctggaataaaggagcagttgtccattgtggagatacatcgcttcgctcattcaaagcaaaaaagcatatattttctgcgctgtccccctccccatccggctcttttttcagagagtaccggcactcggttcatcaaattgccaataatctgagaaccatttctgttacagtctgtttttcacttcaatctgtggtttttagtttaaatcaggattgttataaatttgtccaaaacggcgtttttccccgaaaatctcgcggtttgtgttcaaattttgttcaaattataccttgacaataatttgacaaaacactatgcttagagccgaaagagaggtaagaaaaatgtcttccactgacaagaaacaaaacgggctgcagaaaagcctggcactgatctttgtctacacagtagcgacaggttccattttcacctatgtcagctactgggattcggtgttcttcagctactgcggtcccggcacattcctggcattcgccctcatgactctggcgatcctgcccattgctctggtttacagtgagatctccccgctgttccacaccgccggcggtgaactgatctacaacaccgtcggattcaaccgccatgtgggattcctggcatcctggctcattatggctgcctggatttcggttcccccggctgttgtcatggcgattgtcacctttatcagccgtacctttggcctggggctcaccttcgggcataccatgatcatcggcatcatcattctggtggctgtcttcctgatgagcatgcaggatattcagttcctggtcaaggctcaggcagtctgcctgttcgccaacatcaccactaccctgctcaccggcgtactgctgctcttctcaggccattggagctttgccaatgtcgccaacctgttccagaccaatctggaaccctccgccggcattcccggatggatcatcggtatggcgctgctcatcacccccttctttggctttgaaacagtgccccagatggtcgaggaaggcgacttccccacctccaataccaagaaggccatctgtggttcggttctcacctgcggtacgatttatgtattcttcttcttctgcgtggctggcctggattccttccagaccctgctctcgggcgatgcccagaacggttttatgaccatcactgccatgcagaacctgctgggctggaagatctggcctctgatctatggctgtgtttccatcctcatgggtatgaccgcttcgatccttggcttctggatgtccactgcccggatgctctactccatgggtaagaagaacttcctgccggagatcttcaccaaggtcaactcccatcagcagcccatcctgcccaacctcttcctgctgggcatcagcctgacctttatcctgctgcagaacgccactacctttatgaatgacttcttcaacctcatgtcctttggctgcgcttgtgcatacgccctcaccatggtttcggcagtgcgcatccaccgcaagcaccccgaatggtacaaggacaacaagaatgtcgtcaagggcggcgattttacccggattctggctatggttatcatgctgtccatcgccttcttctgcaccctgggtcagggccgtggttcctggatctccttcggcgtttatatgggcgtcggcgttgtgatctggctgtggatggttgcaatccgctggaaaaagtcgggcgttatcatcgaaactcccgatggagaacagcagttctgagtttatgattccctccggggataaaagtatgatacaatattagaaacgggaccggagcgtcttgataatccggcccggaataagacaaggagtcgattaaaatggctaagttggaaggaaaagtcgcactgatcaccggtgctgccgtgggtctgggcgaaggcattgcagaagtgtatgccaagtatggcgccaagatgtgcatggtagacctctcccccgaagtggaaaagaccgctgaccgtctgcgcaaggaatatggcgctgacatcatcacctatgtgggcaatgtggctgacaaggctcagatgaaagaagccgctgccatgactgcggaaaagttcggcgaaatcaacgtgtgctgctgcaacgctggtgtctgccgtctggctcccttcgaggagttcaccgatgagatgcgggacttccacattgatgtcaacatcaagggcgtctggaacacctgccaggctgtaatcccctacatgctccagcagggcggcggcaatattgtaattgcctcctcggtaaccggcgacatcgttgccgatgccggtgaagctgcctacgccatgaccaaggccgcgctggttggcctgaccaagtgcctggccgtggaatacgccacccggaatatccgtgtgaactgcacccagctcggctacgccagaacccccatggtcgagaagatggctgtggaatccaaccccgaagatcccgagagcgcaatccgggatattgcggttggcgttcccatgaagcgtctggccaagcccaccgaggtcggcgagctgtttgccttcctgggcagcgatgaatccagctacctcaccggttcccagatcgtcatcgatggcggcagcaccctgcctgagaccatgagcatcggtaccaactgattttctcacaatccctgataaaaaacacccccggaagcagaaatccgggggtgtttttgttctgtctgaaaacagcggcagacggctgtgaaactccactgccagccgtgctgggcctgccgccgcaggcagttccatcgctccgaccgctgcctgccgctctgatacgcaaactcacaagccaacttctgagaataggcgctcatgcacggaatcggagcttaatccccgcagtttggtttacgccggaaagaaaccagaaaccggaaatgtccggcgcaggtcggcctgccccaatcctcagggcattctaagccggacaaagctgcggtcaggccggcgcaccatgtgccgggtatgagcccgcacacaatgggaaagttctctcctgcatacagcagctgactgcacacagcgccagcacaagtgcaggaagaagtaccgcgcgcaatccgcatggagagagcggcgctctatcagctgcgaccgggagcagaggacatgggcttctccatcaggcggcaccctgaaaccgaagcacacgccctccaccggacactgtccggcagcgtatcacaatgccgtccgggacaaagtgcggcgccctgtctgccgtccggagctgtctggcttccgggattgtgctgtatccgctgcccccggcataataaaaaggactcccgaaaaacgggagtccttttttacaggctgatgaaagccttactttttattggcgacatagtcgggacgcttcttggcaacccgacggcggatgcgtgccttctgcagcacatatttcgccagttccttttcctcaggagtcttggcttctgctacctttgcacgggcagcttccttttccgccttggcctgatcggggtcgatctcctcggcccactcacaggagctcaccagaatccggaccagctcgctgctcacatggacaaagccttccgatgctgctgcgtaacgggtctgaccattctcggtatggatcttgatctcaccggtctcgatggcagctacatagggagaatgtcccttgagaatgcccacatcgccttcggtggaacggaatacacagttatccaccaggccttcaaattttctgcccatgggggtaacgatctccagttggtagagagcggccatacgctactccccctttacctttgccagaacatcgtcaatggtaccagcgaacaggaaagcagattccggaacgtcatcatgcttgccttcgatgatttccttgaagccacggatggtttccttgatgggcacatagcggccctggaagccagtgaactgctccgctacgctgaagggctgggacataaaacgctgtaccttacgggcacgggatacagtgagcttatcctcatcagagagctcgtccatacccagaatcgcgatgatgtcctggagctccttatagcgctgcaggattgcctgaacctgacgggctacattgtagtgctcatagcctacgatctccggggtcaggatggtggatgtggaatccagcgggtctactgccggataaatacccagggacgaaatgtcacgggacagtacggtagtagcatccagatgggcaaaagtagtagccggagccgggtcggtcaggtcatcggcgggcacataaacagcctgaaccgatgtgatggaccccttcttggtggaagtgatacgctcctgcagctcacccatttcagtagccagggtgggctggtaacctactgccgaaggcatacggcccagcagagccgatacctcagaacctgcctgagtaaagcggaagatgttatcaatgaagagcagtacgtcctggttctgttcatcacggaagtattccgccatggtcagaccagtcaggccaacccgcatacgggctcctggcggctcgttcatctggccatacaccagggcggtcttattgataacccccgactccttcatttcattatacaggtcattgccttcacgggtacgctcgccgacgccggcaaataccgacagaccgccgtgctcctgggcaatgttatggatcagttcctggatcagtacggttttgccgacaccggcaccaccgaacagaccaatcttaccacccttgaggtaggggcagatcaggtcaacgaccttgataccggtttccagaatctctgtggtaccctcctgctcctcaaagctgggggcttcccgatggatcggccacttttctgcttcaaccggggcgccgttatctacgacctcacccagtacattgaagatccggcccagggttgcgttgccaaccggcaccgagatcggcgcaccggtatccacagccttggtgccgcggaccataccgtcggtcgagctcattgcgatgcagcgcacaacatcgtcacccagatgctgtgctacctctgctacaatcttcttgtctgccatttctacttcaatggcattcatcagattgggcagagtgccgtcggcaaatttaatatcaagcacaggaccgtttaccgcagtaactgtgccgacatgctgctgactcatctgcaaaatctcctccttcttttactatttctatcattcgtgtgaaaaaccttgtttcccttattaccgaagtgcctcgaatccggaggaaatctcggtgatctcctgggtgatggctccctgacgggcccggttgtatgccaggctcagcgagctgatcatctcttcggcattgtcgctggcagcttccatggcggtacgccgggctgcctgttccgatgcgaaggattccgagatagcgccaaagatcatgccgcccacaaactggggcacgatccgggccatgacatccccgatggacggatcaaattctgctgcgccaaaggtatctgccgggctgtggccttccagttcctccgctgtaaaggacagcggcaggatcttgcggcaggccggcacctgggacagcatcgaagcaaattcagtatacaccagcaccacttcatccgcttcaccgctgcggaacagatcggtgagcaggcgggccagctcaaagctgcgctccagatcaatggattccacagccgcgtactcctggaatacccgggtttcataggcacggcggctgaaataatccaccgcacgcttgcccaccgggattaccagggcagtttcggggtccatctggctctctgcaaagcgcaggatattcacattgtagccgccggccaacccacggtcaccagcaattactacataggccttgcgccggacttcccggggacgggtatacagattggtcttgtctgtattgccggctgccatggcacaaatggtttcgtagagggtattaaaataaggtctggcagtttccacacgttcttttgcacgacgcagtttggaagatgctaccagctgcatcgcctttgtgatctgcatggtgctttccacactcttgatgcgccgcttgacatctctcataccggctcctgccatgttctctcctcctctgccaaacgatttacttgatcagatcgaacggcttcttgaactctacgatggcatcatacagcttctgagctgtttcgtcatcgaggttgccggtggtctgaatgctcttggtgatctccgggaaacgggtgtcgatatagctgaacaggccgttctgcagggtctggatatcgcttaccttgacatcgtccagcagaccatttacaaccgcatagataatcataacctgatgctctacgctgataggagtattctggggctgcttgagcacttccacgatgcgctcaccattggccagacgggccttggtatcagcatccagatcggaaccgaactgggagaaggcctgcagttcacggtactgggaatagagcagcttgagcgaaccggctaccttcttcatggccttgatctgagctgaaccgccgacacgggataccgaaatacccgggtttacagcgggacggacaccggcgttgaacagctcggtctccaggaagatctgaccatcggtgatggagataacgtttgtggggatataggcggaaacgtcgccggcctgggtctcgatgatgggcagggcagtgatggaaccgccgcccagttcatcactgagcttggctgcacgctccagcagacgggagtgaatgtagaagatatcaccaggatatgcttcacgtcccggcgggcgccggatcagcagcgacatggcacggtaagcgaccgcgtgcttggacaggtcatcatagataatgaggacatccttgccctgctgcatgaagtattccgccatggtaacgcccgcatagggagcgatatactgcagcggagccggttcagcggcagtagcggctaccacgatggtataatccatggcaccggccttttccaggctgtctactacacgcaggacggtggagttcttctgaccaatggcgacatagacacagatcatatccttgccgcgctggttgataatggtatcaataccaatggcagtcttaccggtctgcttatcgccgatgatcagctcacgctgacccttaccgatggggatcatcgagtcgatggccttgataccggtctgtaccggctgatataccgagcggcgctcgataatgccataagccggagattctacggggcggatatctgccgcctcgatggggcccttggcgtcaatgggctgacccagggcgttgacaacgcgtcccagcagcttctcgcctacggggacggatacgacacgaccggttctgcggacagtgtcgccttccttgatattctcactgctgccgagcataacagcagagatgctgtcctcttccaggctgagtgccattgcatacactccgccttcaaactccagcagctcgttcgccatacacttatcaagaccgtgcaggcgggcaataccatcgccgatctggacaactgtaccgacatcatccatatcgatcttggtgcgatagttcttgatctgttccttgatcacggcactgatttcttcaggacgcagctgcattgtc

SEQ ID NO: 768 - DNA, 7680 bp, Unknown
  16S sequences of unknown bacteria
cgcctcgctcagatgcgggatgatggcagctgagaagccaggcgcgaggatcatcgggatggacatgagcttgagcacgccgtaattgatggcgccggtcacggcgatgatcgtctcgctgctgtcgccgtgcatctgcaatccctggttgatgaagaccgtgttgatgaatgaatcacaatagcccagcgcggccgaaagcatataagggaaagcgatcagcacgagctccttgaagatctctttcttctccatcttggagacggactccagcccgccctgctcttttgccttccggcggaattcccgcatctgcttgcggtcataaaacttcatgtgcaggatggcgatgatcgccgatacgctggtggagatgacgccgaagtagacggcccatatgcggtccgtgttcagcacatagaccgcgaaggcactgaacgaaagcaggaagcctacacgcacgagctgttccagcacctgggaaagcgaatagatctccatatgcttcagtccttgataaaagccgcgcaggctggacaggatcgggacgaagaacaaggcgaaggagatcaggatcaagacgatgcgcatcgtctccacgctggcgccgccattgtccggcatgacgagcgcggccagcggggtggaaaacaggatcacgatcagcatgccgccgaagccgcagacgcacatgagcgcgctggaaagctttttcacgacgagcgtcgtcacatagtcatcatgcgccatatacttggcgaccagcgtcgcgatcgcaaagggaaaccctgccgtacagatgttgagcagatagctgtacagctgataagccacgccgtaatatgcgctgttgagatcactgcctaaaatagcagaaaacggaactgcgtaaaacaggccgatgaatttagacaaaaagatgcccgcagatccgatcaatccgctgatgataatagactttctccgtctctctgcttttatcgaattcatttcataccctcatttcatcctcactgatcagatcctccccatccatgcgcaggtagatctgataggtatttgcctgactgctgtcgcgccactggatcagcacgccgatctgttccggcacggccttcagcgtgcctgacatctcgatcgtactgatgtagccctgttcctcattttcctgaaacgggatcacgttccagctttgttcctcatcaaagccgaatgaagagatcgtgcccgaagcgtcatcgagcacggccacgacagccttgatgtcatacatggagacactgaacccgctcgctgaaaacgtgaacaggacatcgtcttcctggctcttcagcgatgcggcatagtcaaagggaacctccgcgctgacctctgtgcttccttcgtggatcgtctctgccatttccctgagcagatactgatcttcatgaaagacgggcgcttcgctgcatccgctcagcgcggcgaggatgagcagggcgatcagcagtcttttcattctatcaccttcgcctgaaattataacatttcatggtatttccgtctatttatttcagacacataaaaaaatgagtgaaaaggtcttcccttctcactcagatcgccgcctcagcgtgtcttgcaggcaaaagagctgcatgcggtctcatgggagcagttgggctccacacagttgtcgcagcatacagagatcgtctttgcatgacagcgctgatccttctggaacttacaggagttcacattgcacaggatttctgtctttgcgttcatcgtgtctcacctccacaccagctagtatgcggcgatcatccaggtttattctcatacaggatcatcgcgctgaaacaataatattgttcttcctgggcagcggcacagcatgtgcgaaactgcactgagcggacctggatatctgggttttcctgaaagaagcggttgatgtcctcctccaggtcgctctcatgctcctcgtcaaatatcttcactttcatctgctcaccgtgttcattgtgccatgcagcgggcgcggatgttgtcataaagcggccagaactgctcttccagcacggcggcgtttcgttcgctgagcggacacagcggcagccgcaggacgttgctgcatcgctcttgtctggccatgagatatttgagcggcgcaggcgaggattcgatgaagcagagggccgccagcttgcgcagcatggacacgagctcttcatcaggctgctctgccgcctgcttcatggcgcgggggacaaggtgggaaatgacggagatcactccgtccatcccctcttgcatcgcgtcaaagcagctgtcgtcatcaccgctgaacagctgaaagcctggtacggtgcggcgtaatgccagcacctcctcatagcagcgatccgcgtatttgacggcgcggatgttcggacatgccttgagcagcgcgcgcagcagcgcaacgctgatgcggcttgccgtccgcttgggcacatgatacagcatcaccggcttgtgcgtgagtgcgcaggctgcctgaaaatggcggaacagcccctcttcgctgggccggctgtaatagggagtcacgagcagatagccggagagcggatatttttccagcctgcagatggcagcgatggtcgtggccgtgcaattggtgccggcaccggcatataccggcacacgcccgccgcactcatgaagcacacagtcgatgactgcctctttttccaccatcgtcagcgtcggtgtctcgccggtggtcccgcagacgatgaacccgtcgatgccggcttgcagctgatcatgcaccagcgcgcgcaatgagccgaagtcgacagagccatcctcatggaaaggcgtgatcagcgcggtcatgacctgtttcatgatgccgcctcccggaagaccggttgaagctgcttttcctgcgccgccgcctcgatcgactctttcatcagatgccagcaggaggtcacgctgcgcggtttatgcagcggatcatcctgcatcatcggcatcaggaacacatgcttcgcggcagacagccgcagcagattggcgccgctttccccgatgaaatcattggtggaaatgccgatgagcacaggccgctcattgcgcagcatcgctttggcggccagcgtcacgctggtgtcatatatgcccatggagagcttgctgaccgtgttggcgctcgccggtgcgatcaccatcagatcatgtgccttcatcgggccgagcttctcgctttcgacgatggaatcgatgatcgcatggtcgctgagcttttccagctccgcccggaatgccgatcgttcaaagaagcgggtggatgatgcagaaacactctcgctgatgacaaaggtaatgtcatattcctgatgcagccaatacagttcgttgaggacattgcggtgattgcagaaggatccgcagatcccgaatacgatctttttcttattcattcagcaccttcttcacatagtcatacagattggcgccggcgcttcgccaggcaaagagctctgggatgttgccggccttgagataagggatctcatagcgcttcatcagccgttcgtccaccgtcttcacgctggcgatgtcgatgaccttcgtctgctgcgcccacgcgcgcagatgctcttcccgaagcagggcggccggcgcggtctggatgatgaaatccccgcacgctccctttacccattcctcgaagctgcattctccaggcgtcatggtctgcgcatggcggacatagcggatccgcacgccgttttgggcaagcatccttccgatcgcttccccgcatgcgccttttccgatgatgtccgcgctgatcaggctgaccgagcggtctagctgatccagtacatagaacagcacgccctgcgcggtcagctgtgcgttgcggcggacataggcctcatcccgcatatagtagtgcttaggctgcgggcatgccgctgatgatcaaacagtcttcccgcaggcatgcccagaagccatcgggcagcgcgatatgctctctgtccatatactctccccttctcccctgtacgccatgcagcggcaggatcagggcatccagcatggaaaggtcgagcgtctgcagatcctctctggcgacacaggtatggctgtgtctcgccagccttcggacctcctccatccttcgttcgctcccccatactgacagaatcatttgacccctccttccctccatactatgaacagggaaagcgcttgtccgcgaaaatcgcaggacagatgaaaaaaaccgtgatatcgagagcatcaggcgctattcgatatcacggcgtgatcatcaggcgaaagtaagcacgtagtagttgcgctttcctctcttgatcaggatcatatcgtcgaccagcgcgctgcttgcatcgatcactctggtctcatcctgtactttttctccattgatctggatagatccgctcttgatccattccctcgcttcacgcttgctggaagcgatcttggccgaaacgagcgtgctggccagatccatggcttcgctgacctgcaccttttccatggagctcagggcgtcgcgctgctcatctgcgctcagctcgcggatattgccgcggaacagcgcattggtgatcttcagcgctgtctcataggcgtcgctgccatgcaggaaggtcacgacctcacggcccagcaccttctgcgcttcgcgcaggtgcggttcgttcttcacgcattcctcgaggcgctcgatctcctctttgtctaagaacgtcaatcgtttcaggtactcgatgaccttggcgtcctccgcgttgaccaagaactgatacatttcatacgggctcgtctttttcggatccagccataccgtaccagattctgtcttgccaaacttcgtgccgtccgccttggtgatgagcggcatggtcaggccgtagcactccacatcggcgccatgcttcttgcggatcagctcaagtcctgaggtgatgtttccccactgatcctgtccgcccagctgcagggtgcagtgctttgtctcatacaggtgcaggaagtccagcgactgcaggatcatataggaaaactccgtatagctgatgccgctttccagacggcgctttaccgtttccttgttgatcatgtagctgacgttgaagaacttgccataatctctcagaaagtcgatgatggtgatgtccttggtccagtccaggttattgaccatttcaaagccgaacactttgctgatctgcacgtgcagcgcttcataattgtgctcgaggacttctttggtgagcatgttgcgctcgccgctcgctttagggtctccgatgaatccggtcgcgccgcccaccagcatgagcgggtgatggccgtgatcggccagacgctttgccgtcagcaggctggaaaaatgcccgatgtgcatgctgtctgcggtcgggtccgtgccgatgtaaaacgtcatcccgccttcattcagtttctgttcaagatcaggactggtgacattgtcaatcagcccacgccatttcagttcttcaaaaagtgtcatcttcatcctcattctccttcaataaaaaaacgcccttgcataaggacgtgttgcacgcggtaccaccttacttcatcattgtcatgatgcgctcttgtccataacgcggacggacggcttcccttttgcgaaagcggctccgaggtgtattccacaagttcgctgatgtcctttcagcagccggacactctctgcaacagcttgcatgtgtactctttctcttcatcgccgatgggtatattatagcctttcctcatcaaaaacacaacgggatgggcgaaaaaaagcagatcatcctgcaaaagagcaagcaggatcagtctgcttgctcttggtgtttattttgcgacgatgttgacgaccttgcctttgacgacgatcaccttcaggatgttctttccttccagctgccgcttgacgctgtcgatcgccatcgctttttccttcatgctctcctcatcgatgccggcagggatcatcatcttgccgcgcaccttgccgttgacctgcacgatggcttccacttcgctctccaccagtgcctgcgcatcataatgcggccaggatgcataggcgatggtgtccgtatggcccagcacctcgtgccagagctcttcgcccagatgcggcgcgaagcaggcgaacatcttgacgaagccttcggcatattcgcggtagatgtgctctgccttatagcagtcgttgatgaagatcatcatctgtgagatggccgtgttgaggttgagcgtctcgatgtcttcgctcactttcttgaccgtcgcgtggtagatcttatccagcgcatgatcattctcatcgctcagcttgtcgtactctgtaaacagacgccatactcgatcaagccatcttctggatccgtccagtccggtcgtgctccaaggcagggatgcttccagcggccccatgaacatctcatagacacgcagggcgtccgcgccgtgggatctgacgatctcatccggattgacgacattgccgcgggacttggacatcttctcattgttctcgcccaggatcatgccctgatggaacagcttctggaacggttccttggtcggcacgacgccgcagtcgtagagcaccttgtgccagaaacgcgcatacagcaggtgcagcacggcgtgctctgcgccgcccacatacaggtctaccggcagccagtgcgccagcagctcaggatcggcgatggtctcatcgttgtgcggatcgatatagcgcagatagtaccagcagctgccggcccactgcggcatcgtgttggtctcccgctttcctttgacgccgtcgatctcgacattgatgaaatctgtgcagtgcgccagcggagactcaccgttttcgttaggcttgaagttctgcgtcgccggcagctccagcggcagctcatcgatgtcgaccgtgcgcatcgtaccatcctccatgtggatgatcgggatcggctctccccagtaacgctgtctggagaacagccagtcgcgcagcttgtacgtcgtcttcgcgcagccgcattcatgctcctccagccatttgatcatggtgtcgatcgcttcctgcttgcccaggccgtcgaggaagccggagttgatgtgcacgccgtcctcagtgaaggcctcctgctcgatgtttccgccttccagcaccgggatgatctccaggccgaatttcttggcgaattcatagtcgcgggtatcatgcgccggcacggccatgatggcgccggtcccgtagctggccagcacatagtctgagatccagatcggcacttcttttccattaactgggttgatcgcatatgcgccggtgaagacaccggtcttatccttgttgagctcagtacgctccagatcggacttggattcgcaggccttctgataagcctgcactgcttcgcgctgcgcctcgctcgtgatctcgttgacataaggatgctccggcgccatgacgcagtaagtcgcgccgaacagcgtatcgcagcgtgtggtgaacacggtgaattccttgttggtgtccttgatcttgaagatgacattggcgcccttggatttgccgatccagttgatctgcatctccttggtagactgcggccagtcgcacagctcaagatc

SEQ ID NO: 769 - DNA, 4459 bp, Unknown
  16S sequences of unknown bacteria
actcggcggcaggctctgtctcggcctcgacgataacgcttttttcctgcatctccttttcagcgatgaggtcttcgatgttctccttggcgcgcatcaggtcttcaacggacatggtatcaaagcccgcggaaggggtcttgacattgatgccatggcggcgcaggaaagcgtcgaccttttcctcgttggccttatagaggcagaagcccagcgcgcttgcgccgacaccgatggcgatccccttgacgagagggcagttagtaaagcagttgaacatggtgatttcctccttacaaatagatcgttctgttggtcacacgcggaacctgagggcgcgaggcagcatcatttccgcgccgcgctgcaaaaggctggcggcaaaggccttgccgtcccctccgccgcgcaagggggtcagcgtcgtcttctccacgccattgtgcacgagatagacctgctcgcgcggggcgtgggggatgaggtggcggccaaaggtcagcacccaggcgacgaggctggcgcgcacgccgttctctttgccgatggcgttgatgaggtagacgacggacatcacttccgggtcgaagctgccgcgcaggtgcagttcggcatagccgtgctctgtgacggcggccaatgtcgcccctgcggacagccagcggctgaagcgcgtcagtggcgaagcggccagcgtcaggaccccatccgcggcgatgcagccaagcgccagcgctccgctgggcggcaggcgaaaacccggctcttccgagcgctttatgtgcagaagcgccgcgcccgttttgcgcgcgtagaccgctgccaggcgcgcgatgagcgtttccacgtccaccgcatgctcgtcaaacaggcataacagcgtgccaacgcgttcattgaagcggcattcgtgcacaccgggcagggccgtggccgcctttgagcagtccacgggcttttcgagccgcacgcgcaagcggcccggcaaggcgcaaagcacctccagatgcagcgcgccgcgctcgtttttcacagcatttccctcctctctgtcggtgggaagaacatcagccgaagcgagttggccaccacgaggatggtggacatgttgtgcagcagggcgctcatcatcacagagatgccgctggcagcgccgaggatgaggccgacggaattgacgcccaccaccagcgcgaagttttcgcgcacgatgcgcatggtggcgcgggaaaggcggcgcaattcggggatcatcatcgggtcgtcgcgaccgatgaccacgtcgctggtctcgatggcgatatccgtggacttgctgcccagggaaacgccgacgtcggcataggccaatgccggggcgtcgttgatgccgtcgccaaccatcaccacgccgttgccctgcgtctgcagcttgagcactgcctcggctttctgctcgggaaggagctgggcctgatagccgtccgcgcctaccagctcggccacagcgcgcgcctgtggctccatatcgccggtaagcagttcgatatctcccacgccgtcgtagcgcaggctgttgatggcacggcgcacgttctcgcgcggcctgtccatggcgtagagcgccgcgatgatgcgcttgtccacgcccacataggtcgcaatggcgccctctatgggcttgatggcttcttccgcgcgcacgccgttttccgccatgtagcgcaggttgcccacgcgcaccacgcggccgtccacttccgtgctgctgccgcgcgagacttcggtgacggtctcgccatgggcggggatctccgcgcccagcttgcggccataggcgaggatggcgctcgccagcgggtgcgcgctggtctcctcggcggccatggccagcgagagcgccgcgcgctcgtccatatcgtgcgcgtacatgcgcatggagaccacctgcggcctgccctcggtgatggtgccggtcttgtcgagcagcacggtgttggcgttgctcatctgctcgatgtaagcgccgcccttgatgagtacgcctttgcgcaccgccgtgttgatggcggcggaaaatgccgtggcggtggagagcttgatgccgcaggaatagtcgatgaccagcattttcagcgctttttgcgggttgcgcgtcaccagccacaccgtgaggcacagcaggaaattgagcggcacaaggtagttggaaaagcggtcggcatagcgctggatgggcgcttttttcagttcgcttgcctccaccatgccgacaatgcgggagaccacggtctgatcgcccaccttggccacacggatgcgcaggctgccgctcttgaccaccgtgcctgcgaagacctcgtcgcccgcggtcttttccgccggttcaaattcgccggtaatggcgctctggtcaatgaccgccgcgccggagctgatcgtgccgtctacggccagcttttcgccggtgtgtgcctccacctcgtcgcccggccggagcctgtcgatggggcagcgctccacacggccgtcgggcagcactttccaggcgttctcatcctccacggagagcatcttcttgatggaagagcgcgtgcgctcgatggtgtaagaagtcatcatctcggcaaggtcggaaagcgcgaggatcatcagcgccgagttggcgttgccgagcagcaggctggctacgatggaggtcaccgtgagaaagtcggcgttgggccgcaattcccggcgcagcccgcgcgcggcgccctttgccatcggccaggaaagccccaggctgatcagcgcctgcacgctggtgaacttgccaagccgccccgaccacggcgcgccgcgcagcgccgtattgcccaacagcagcgctcctgcgttgaccgccaagcggcgggcgagctggcgggtggacatgcccgcctccgcgtcctcgctcgtggaagcgccgtggcgggcgcgcatggcgtccatggcaaagcgggcgagtgccatttccgcgtgttcctgcgcggcctgggcgtccaggcgctccgggtcgtattcaaggagcacgctttcgacgactgtgttgacccgcacgcggcgcatgcctccaaagcgcgccagcgcctccgccagcgcccttccgttatccggcaggaagcgcagccctgtcgcggtcaggcgcaaccggcccggcaggctgtggcacacccgagccttcatccaattttgattcgattcccgtttcaacatattacaagccctcttttgttggaactgaggcgctccctgcctcctggttttccttctcggcgcggggcagcagcatggtcagccgcctgcgcgccaggtggacgagttccgcttcatccacagccttggaccagtccttctcccgcgccatgcgcaggccctcttctacaacggcgtctacccagcgcaggatggctgcggaagaagtcatttgcgcatcatagaggatgagtatggtaccgatgcgggcgttgacgcgtacttcgcgcacgccggcgagcatgcccagtatatcctcgatgtaatgcagatatggcagcgctgccctgggcagcatctcaaagcgcccgaagcgcaggcgcagccgaccgggtaggtcacactccaccgatggtttcaggcataagcggatgaaactatccctgaccgacgccattgccttcgcctcccagtatgtccgtcgcccaccagagaagcgtcatcgctcccggcacgcccgcgccgcggcgcgccatgcgcccaagcccgccggcagccaaggccacacccgcgagcgtgcgcgcgtcgaacaggccgtccgtaacttcgcggatgccgcgatccaacgcgccgaagccggttttcaatcccttggcgacgcggcaggctgtcggatgcgcgatctccgcatccaacgccatcaggcgtatgaccgcaccctcgatcaccgccgccccgacctgcgcttcgtcataacaaatgagcgccgtggccgtgcgtggattgagcgttaccgaatggactgcgccggtagcttccaacgttttcttcatggtgcgcgccgcctcttcttgtcgggcaatggcgggaataaacaggcgcaaacgtccgggcagatgagagcgcacttcagccacaccccgaaaagagggaaggacgtcctttccctgcctgacaaggctgtatgccgcgcttcccgccgctaaagcaacccaccagatgcttttcatgattcctccttgcacacagaattagctatggctaacttgtgggtttagaaacagttgaaaggcttttgcccctcaactgccattcattttaacctctaaactttatcattgccatacgagtatggtaaaaattgtttgacgcgtgcaaaaaggtggaaatggcaaaatccgtctgaaaacgattgtcttcagacggatgatggtggagcataggagattcgaactcctgacctctacgatgcgaaagatgattt

SEQ ID NO: 770 - DNA, 11822 bp, Unknown
  16S sequences of unknown bacteria
catgctgtatattgccacgggcagcaaactgctggtagcaggctcggctgctgtgggggcaggaggcgcttttgtggcatataagatgttttctcatgtgcgcgtgcgcgtagcgctgtgggaaaatccttgggcaatgtatgaaaagcaaggctatcaggttgtgcaggggcttattgccattgcaagcggcggcctgtttggcctggggctgatgcagggagcgccaaagtctatccctgcggcgcatacggactatatctttgcggtgatttgctctgaatttggtatcttatttgggctggcgctattggtattctatttgattttcatcatcaggggggccatcattgcgatggactgtcgcaacagtttcgatgccctggtggccattggctgcgtatctatgctggcattgcaaagctttatcatcataggcggggtcacaaaattcattccgctgacgggcattacaatgccgtttgtgtcctatggcggtagcagtattttgtcttgctttttcatactgggcatacttgaggggcttgcggtgaaaaacggagatgcggacgaggtagagtttgcagaatggaacgagcaacaggaagcctgggaagatgactattacgatgaagatgagtacgactacgacggctatgaaaacgattatggctatgaagaagagccctattatgaggagcgctcctataccagcaggcgcaatagacagacagagccggagccgatgaccagacgagaggccaaacgccaagccaagcaggccaaggcacaggcaaaggaggattataagcaagccaagcagcgcgccaaagagcaagcgaaacggagaaatcggaggccgagcagatgaaggagttaagaggacatattcggtccgtgctcatcggattcatcgtattgttcctcattttgggagcatacatcggatacagcgttaccacaaacggaaccagatggtttgtatcgtcctataaccctgtattgaagcagcaaaaggagaatgtaaaggctggttctattttggatcgtaactatgtggtgctggcggaaagcgacgatgacggtgaccgtatctacaataaggacgctaccgtgcgcaaggcaatgagccatacagtgggtgatccctatggcatcgcctcggccggcatcgaatcctttcatgcaaagtacctactgggcttttccggcaatatctttgaacggatctatcaatccatcacgatggataagcgcatcggagataatgtcgtctgtacggtagatagcaagctggcttcgtatatctacaataagatgggcgatagaagcggcgccgtggtggtgatgaattataaaaccggggagattctggcttcagtgtctacgccggggtttgatcccaaaaccatcaaagagccttcggaagacgatgcgggaagccagctggtaaatcgggcgacgatgggcagatatacgcctggctctgtattcaagctggtaacggcggcagctgtgctggaatataaaccagagcttgccagcaaaacatatacctgcacgggtgaagtcgattacggagaggacggtagggtaacctgctctggcggcgctgtgcacggagaactggatctcaatggggctgttacgaaatcctgtaactgtgtttttgcacagattgcccaagaccttggtcggaacaatttgaaaaaaatggcggaaaagctgggatacaacgaggattttctctttgatgatctgatgatctatcaatccagctatgacgttagcgacgcccgggatatcgattatgcttggtcttccgtaggacagtataaggatacggctagccccatgcacgtttgcatgattacatcggccattgccaacgatggcgtgatgatggagccaaagctcatcaagagcgtgatgaactatcgcaactttgaatatatcaaaatgaccagcaatacctaccgccgctgcatgagccagcaaacggcagagcagctacaggagatgatggtcaacgtcgtaaaaaacggaacagggaaatctgccgccgttaagggcgttacggtggcagggaaaaccggtacagcagaggtatcggacaataaggagaccaagccgcatgcatggtttactggctttatccaggacgaggagtatccatacgccatcgttgtcatgattgaaaacgcgggcggcggtggcagccaggctgcccctattgcggcctctgtattgaaaaaaaccatggagctgatcaaataggatgaatgataggatcgaggcgatcttaaaaacactgccggatcatcccggcgtatatctaatgaaagataaggatggggaaatcatttacgtcggcaaggccatctcgctgaaaaatagggtgcgccaatactttcattcccataaaaaccatagcagtaaggtgattgctatggtgcgtaagatagaggatatacaatatattttggtggatagcgagatggaagcgctgatcctggaatgcaatctcatcaaaaaataccggccgcattataacatcctgatgaaggacgataagcaatacccttatatgcgcatcgacttttccgacccgtttgcacgggtggaggtcgtgcgcaaggtggaaaacgatggcgccaaatactatgggccttttttaagcgccgtggcgcttaccgacgtattggatgccgtggcgaaaaactttccgctgcgcacctgtaaaaaggatatagcaaaggcgagggccaggcatgagcgcccttgcttaaattatcaaatcggccggtgctctgcgccgtgcgcaggcaagatctccgaagaggagtacggggtgctgctggaacaggtaagcgcctttttgcagggaaaatacgataccctgttgaaagaattgaaagcggagatggaaaaatgcgcagagcagatggaatatgagcaggccgccatttggagggatcgcatccgcaatgtagaacgcgtgatccagcgtcagaaagcggcggaaaccaatttgtccgaacgagatgtgctcgccatcaagcgcttggagggtgatgccatggtgcagtgctttggcgtacgcgatggcaagctttcccaaagccgccagttcctttgggaggatgtggatcaggaaacggacgctgagattttgttggcgtttgtaaagcaatattacgaaaggcaaacgcacatccctagggaaattttgctgcccttcacgttggaagaacaagaacttgtgcagcaatatctgtccgggctacggggccataaggtacagctattggtgccgcagcgcggcgagaaaaaacatttggtggaattggcagagcaaaatgcggcggaaggcctagagaagcgtaagctgcgccgcgagcatcaatatatgcgccacgagggtgccgtcaaactgttggcagaggaactgggactatcccgcatgccgcaccgcatggagtgctttgatatctcgcatacccagggcgtggacaacgtggccagcatggtggtatgcatcgatggaaaaccggctcgtaaggagtatcgtcgctttaagacaaaaacagtggagggcgcagacgactttaagagtatgaacgaggtggtaaaacgccggttgctgcgctccatggagccggatgaagcttcgcaaaaggcctttggcaatttgccagatctcatggttatcgacggcggcagggggcagctcaacgcggcgctgcgggccatggatgaggtaggcttgcacattcctaccatcgggttggccaagcagctggaggaggtgtatgtaccggagcgggatgaaaccgtgatgctggatcgaaaatctccggcattgcacgttttacagcgcattcgcgatgaagcgcatcggtttgccataacataccaccgttcgttgcgcgcttcgcacgaactgacaagcgcgctggatgaaattcctggcattgggccaaagcgccgccgccagcttttgatgcagtataagaccatcgaccagatcaagcaggccagcttagaggatctgttggcggtggagggcatgaaccatgccagtgcagaggctgtatacacgtgggcgcataaggatggacaaaccacggacggccacagtataatgaacaaaaatgcagcgcagcaggcgcagcgttaaatcgcgtctgtgtgtttggtaggaggaaaatgtacgatgcagtataagttgttggcattggatatcgacggaaccctggtaaattctgagggcaagattacggcgcgggtcaaacaggccattcggcaggcagtagacgcgggttgccatgtgatgctcgctaccggccgcttttatcgcgggatgatcaagattcaggaagagcttgggctgacggtgccgtgcatggtctatggcggtgcgcagatcgtggacaacggcaaacgcttgtatgaagtatccattgatcctgaaacaacttatgagtgcatgcagtgggccaatgaaatgggtttgtatgtgcagacctatgagggagacaattacttttttgaaaaacatacgccgtacagcgacctatatgcaaagggcattggcatagagggggaggaaatgccgggtatgacgagccggaaggatctagcttcgccgaagatcctcggcattgatgagccggaccgtatccgagaattgcaggatattgcaagggagaaatttgccgggcgtttgcaggtggccatttccaaacccaggtatttggaaattaccaatccaaaggtaaacaagggcattgcgttggaatttttatgtaagcattatggcttgaaaccggaaaactgcatcgccatgggggatggcaccatcgatgcgccgatgatcgaatatgccggcctgggcgttgcaatggaaaatgcggatgatatgaccaaatccgtggcaaacttgatttgtcctagcaacgatgaggatggggttgcttacattatagataagtatatcctaggaggcgaaacagcgtgaaagccaaagacaagggcgtaaatgtacagacctttgccaagtatacgcatatgcaggtggcgtatgccggcagggattggttcaacgtgcatacatccgatttgaaccggcccgccattcagtttgcaggatacttccagtatttctctgcagaccgcgtgcagatcgtgggcaatcaggaaatggcgtgcctgcgcacgctgcggccggaggaagtggatggccgcatggacgagttcttttcctataaggtgccgtgccttgtcatctgcaacggcgatcctgtgccagagatgctgatgagaaaagccaaggagaatggtgtgccgatcttctgctgtgaagaaagcacaagcaagacttcgcacatcgttgttgactttttggacaatgtcctggccccggaggaggctattcatgccaatttgttggatgtgtacaatgtcggcgtgatgatccgcggcgaaagcggcatgggcaaaagcgagctttccttagagctgattaaaagagggcatttgctggtcgccgatgatatgacggtgatacgcaaagtaaacagcaaacggctggtgggctatgcgccggaaacaacgcgcaacctcatcgagattcgcggcctgggtatcatggatgtcaagcagctgtacggcatggcaacggtgctggaaagaaagagcatcgacattgtgatcgatatggaaatgtgggagaccggtaagatgtacgatcgtttagggtttgaccggcattacgataccatcatgggcgtgagcgtaccgcattatgtgatgccggtacgccccggtcggaatttggccgttgttgtagaggcaacggcgatggattaccgggtgaagagtgccgggtttaacattgaagaggagatcaaccgcaggctggaaacgccatgatctgataaaagtgcatatcatcccctgttaccccatatcttaggatacgggcagctttgaagggggaggtgaaagggcttgccaaaattgaaacgtgcagcccttttttgctgcattttatttgtcgcggctgcggtgttgtggccgggcctttggaatcagcccttgcagcatcagcagatcagccaatggattcggggcaaaaagctggcctatcaggggacgttgcaggtttggtacattcccggccatgcaagtggaacgggcgacggaagcaaatgggcaaaagccaggctcgataaatttgagaagaacaatttcggcattttttatgaaatgcagatactagacacgcaaggcatgcaggccaagctttccgcagggcagagaccggatctcgttttttttggcagcgaacaggctgatgttgtagtgccattgctgcagcaatgcgaacagacggcgaagctggcgccggcttggcaggacaaaaccgttgaacaattggcttggccggtgttttacagcggctatgcgattttggtcaatgagcaggcgttatattccgtcggcctttctccgccgctggatatagaggatatggaccaagcttatctgcagcaggttcagcaggcgctgccaaacgccttcgcctatgagacaaagcaggcgggcttggcagcgatgggtgcgcagatgaatgaacagacaagacaggcaatcgtgcagggaggttctgggacaagggcacagttcctcaaagaggagatcgccttctttgcttgccccgcttccacttggtataccatagaagggttgagcaatacgcaaagcgttccctcttaccaggcagtgccattgtccaatctggcagtagaagcgcagtatgtaggcgtgatgaaaaccgaggatcaggccaagacaaaggcttgcaatgcggccgtggcttatttgctatcccaaaacagccagcaggcattggaggatattggcgctttacccgtaatctggacagatgagccgatgcaggcccagggcagcataacgggcgccctttggcagcatagagaggaaaaaaacatgcgcgttttagacaaagccgagtcgatagaaacgttttttgccacccttcaggcctcagggtttgacgatgccgcacaatggctgcgcaccgcttgcaatacaccataaatccgtgtaaaatgaaatgaaatacatttgtaacttttcgttggttgaggagacgtgatgatatgatccaagcagccgttttgcaaaggctgcgggcagtgttgccggcgcggaatattttggaaaatgaacccatgcgcttgcatactaccttcagaattggggggccggcagacgtactgtgcctgccggaaaatgacgagcaggtcgcgcagacagtggcgcttttgaaagaagaacagataccgttttacatcgtaggaaacggcagcaatattttggtaaaggatcgcgggttccgtggctgcatcgtaaagatgctgcatcagggccgggagatccgggtagatagggaggccaaaacgctatatgcgggcgccggagaaacgatgatgtccatcgctgtacgctgtgccaaggaagggctggcaggtatggaatttgccagcggcattccgggcaccttgggcggtacggtgagcatgaatgcgggtgcctatgaaaaagagatgaaggacattgtgaactctgtgcgtattttgacgcaggaaggggagattaaagagatctccaatgccgagatggcctttgggtatcggaccagtgcggtgttgaaaaacaattggatcgtgttgggcgctaccttgcaactacagcaggatgacccagttgagatacaagcgcgcatcgatgattttacccaccgtaggcgtacgcgtcagccgctggaatatgccagcgccggtagcacattcaagaggccggaaggcttttttgccgctaagctcatcgacgacgcaggtatgaaaggctattctgttggcgatgctcaggtcagcgaaaagcacgctgggtttgtggtgaataagggaaaggccagtgcagaggatgtgctggtgctcatgagccggatccaggcggctgttaaagaaaaatttggggtagacttaaagccggaagtacgcatcataggggagtaagcatgatagagatccaggcagatctgcatacgcattccgatttgtccgatgggaagggtacgctggaagagaatgtagaagcggcttatcgccaggggcttggctgcattgcatgcacagagcatgggccgcgccatatgaaggcgggtatttcaatgcggcagttgagcgaactgcgccgccgggtggacaggctcaatcagcagtatcaaggaaagctgacagtgcttatgggcctggaatccaatttgatctccctagagggcgagctcgatgtgccagaggcatacagggagtattttgatattcttttaatgggatttcatcttagtgcccgccctaccacgctatcggaatgctggatgttccaaattgccaacccgagggcagagcagaggtatagcgagcgctaccgccaaaaagcaacggaggcgtatttgcgcgccattgaaaaaaacaggtttgatatcctcgttcatcccggcctgcattggccattggaatatcaaaagattgcagaggcatgccaggcatacggggtggcgatggaaatcagcgcacgtcccaaacatttaatttttaacgaaaaacaaacaagacaaatggccgaaacaggcgtacaatttgtcatagacagcgacgggcataagccggaggagatcggccgtgtacagagtgccatagattttgccgagcgggcagggctagggctagagcagatcctcaatgcaaagggaagggagcttccggcgttccggcgcggataaaggaggggatttttatgcggtgtgtattggtaacagggctgtccggagcagggcgttctacggcgttgagacagttggaggatatgggttatttctgtgtagataacctgccaccgcagatgatggccacctttatctccatgtgccagtgtgagaatatcgaaaaagtcgcgctggtggtagacagcaggacgcgtatgttttttgcggacatctacaaagcgatggacgatttgaaaaacatgggtgtgcaaatggaaattttatatctggaaactgcagacgaagtgctgattcgcagatataaagaaaccaggcgtaaacaccccatgggaaccaataccatcatgcaggggattgccgtggagcgtcagcgcttgggagagctgcgcaatatggcgcagcatatcatcgatacctctaccatgagcgcaaaacagctcagcgaaatgctatggggcctattttccgatcagcataagcgcgataccatcttgcctgtcatcgtttcgtttgggtttaaaaacggcatcccgctggatgccgatctggtgttcgatgttcgctttctgccaaatccgttttacgatccggcgcttcgcccgatgagcggcctggatgcgccagtccgggattatgtgtatgatcatgagcagacccgtttgtttgaggacaagctggtagatctcctggaaatgctgttgccctattatcagcaggaaggaaagtaccagctggttgtggccatcggctgtaccggaggccagcaccgcagcgttgctgtggcagagagcttataccgtcggttgacaaacgataagatccagtgcgtagtacagcatagagacataggaaaggatgcgttgaagcattgagccagcaaggaggttctttttccgcacagaccaaagaggagcttctgcatactgcgccggcgcatgacggatgtatccgggcggaaatggcggcggtgatacaggcctgcggcagtcttgtgctgacgcaaaggggccttcatttggaactgatttcagaccatccggccttggtgcgccggatgtttggctattgtaagaaaatgacagggcaaagcgcccagcttttggttcggcaaaataagaggctgaatcggcggaatagctatatcttgcggctgataggccgtgaaacggtactggggctgctttcgcagctaggtatttgggaggatggcatggtgcagggcacgccgcggggtttagagcggacctgctgccgtcgttcctatatacgagggctgtttctatgctgcggcagcgtaaccaacccggaaaaggcctaccacctcgagtggacgctgaaggaagaatcgctttgccaggatctgctggcccttttgaaaaaagaaggaatttcggcgcatgctgtgcaaagggaaaatgcctatgtggcctatatcaaagagggcgatggtgtggcggaggtgctggcaatgatgggcgccaacagtgcgattttgcagatggaaaatgcacggatcgtacgtcaaatgcgcaacaaggccaaccgggcgatgaattgcgataccgccaatatcaataagaccatgtccgcagcagccaaacagcaggcctgtattcggtatctagtaaaggaaaacaagtttcaatcgttgagcccggcgctgcggatggcagcggaaacgcgcctggcgtatccggaagcaacgctagaggaactgggcgatttgatggagccgcgcatgggcaaatccggcgtaaaccatcggatgagaaagcttgtgcagctggcagaggagctggggtttgtgtttgaggaaggagtaagcttttgagcggattttgccatctacatgtacatacgcaatacagtctgttggatggggcggcacgcatcaaggatttgatggccagggccaaggagatgggcatgacgcacattgccatgacagatcacggcgtcatgtatggtacggttgaattctataaagaagcaaaggcggtggggattacgccggttcttggctgtgaagtatacgtggccaagcaaaacatgcacgatagacaaggccgtgcggaccgggaatacagccacttagtgctgctggcggaaaatcaaaagggatatcaaaacctggtgcatctggtatccttaggatggctggagggatattactataagcctaggatcgattacgatacgctggcgcagtattctgaagggctaatcggcctatccgcttgcttatccggcgatattccccgccttttgatgcaaggtgattatcagggcgcaaagcaattggcacagcggctcagcgatatctttgggccggagcatttctatttggaattgcaagagcatggcattccggtgcaaaaggaagtcaatgcgcagatcatacgtatagccagggaaacgggtctgccgttggttgctaccaatgatgtgcactatatcaatcaagaggacgctgcggtacaggatgttttgatctgtattcaaacaggacgttttctagatgaagaaaatagaatgaaaatggactccgatcagatgtacctaaagagcggtacagaaatggagacattgttttcccatgtgccggaggcgctggaaaatacgcaaaaaattgcagaacgctgccatgttgagctggattttgaaacacagcatctgccacagttccccttgccggagggagaaacaaatgtcggcttgctgcgcaggcaggccgaggagggctttgcgcgccggtatggcgagaatcccgaagtgcaaaagcagcttcaatttgagctgaacgtcatcgagcagatggggtatgtggactattttttggtcgtgtgggattatatccgctttgcaaaggaacagggcattgccgtgggcccaggccgcggcagcgcagctggcagtgtggtggcgtattgcctagggatcacggatg

SEQ ID NO: 771 - DNA, 2250 bp, Unknown
  16S sequences of unknown bacteria
ctgaacatcggtcccttggcaaagacgccgcagcgcgaggcgatcgggtagatgatggtgtggttgcgggcgagctcgttcaggccggatgcgtccgtgtcgagcagggtcgccatctggtcgatgaacgcgccggtgccgcccgcgcaggtgccgttcatgcgctgctcgatgccgccgtcgaagtagatgatcttcgcgtcctcgccgccgagctcgatggcgacgtcggtgcgcgggatgatgcgctcgatggcggtcttgttggcgatgacctcctggatgaacggcacgccgagccagttggcgagcagcagaccgcccgagccggtgatggtgatggtcgccggacggtcgccgacctgctcgagcgcctcgtcgacgatgccgatgatggtcgcgcggatgtcggagtggtggcggcggtagacggagtagacaatagcatcggtctcgtcgaggacgagcagctttacggtagtggagccgacgtcgacgccgatgcgcagcggtttgttcttcgtgtccatggtttttcttcgctctctatctcgatggaaaggcgttacagtttgattgactcgccgggcttgatgaacagcaggcgcatcgcgatgcgcgccatctgctctgagctctctttcatgccggtctcgatccagcggttgatgacgcccatgtaggcgttcgcgtagaacgcgatgtagtagcccacgaacgcgtcgtcgctgttgcggtagcgctcgtgcaagatcgattggatgaagttcgcgcacaccatgtcgcatacgcgcggcccgaagctcgcgtccccgcctgcgccggcgacggcatggagaaaatcaccctgctcgcgcagatactcgaacaggtcgacgagcagcggaagcggctccttggtgacactcactttgacgacggacgccagcgtaagtgccgacaggcgggcttggaactgctcgaggccctcgaagaactcgtcttcgagcgcgcacagcagctcgtctttgtcgtgatagtggttgtagaaggtgccgcggttgatgtcggcgcggtcgcacaggtcgttgaccgtgaagccgtcgaaccctccttcttcggtgagctcgatgagcgcctgacgcagagcgcgcttcgtgcgcacgatgcggcggtccttgccagcggcgggcgccttctgggttgtctttcggagtacggccgtggccataggtccctttctctcgcttttcgacacgacgcacatttttcaacgcagtgtcgattttctgagagcattgtagcgacgagctgcgagagcatcaagagcctgcgtatggagagcgtggggagatgagggcagacgggccgcgggaggcgccgagggtgacggatccgagggccgaaagcgtccccctcgcgggatctcgcggcaacgggcacgcctgcacgtctccctcgggcggttccgcggcactttgcgcgccggcgtgccatgggaagggccaagggagacggatttcgccgcgtatgggggtaagggtgacggattcggggccgaaagcgtccccctcgcagggccccgcggcagcggagggcgggatatgccatgagcgtggccgagggagacgctcatgtcacagaacgcaccgagggagaaaccgcacgccacgagagacggcaagggagaaggtgccgtccccgttgcccctgcggccccttctccctcgggcggttccgcggcactttgcgcggcggcagaccgtggaaagaaccaaaggcgacggatttcgccacggacggggccgagggtgacggattcggggccgaaagcttccccctcgcggggttccgcggcagcggagggcggggcgtgcccgccgcgcgcgtggttagttcttgagcgaattgattggcgcggggaagcgcccgccgcggtgcgcgaagaccgtgcccgcgtgagtgttgaccgccatgatgggcgcgctgcccagtaggccgccaaactcgagcgtgtcgcccgccttcttgcccactgccggaatgacgcggaccgccgtcgtcttgttgttgatgaggccgatggcagactcgtcggcgatgatgcccgcgatcgcctcgacggtcgtgtcgccggggatcgcgatcatgtccagaccaaccgagcacacgctcgtcatggcctcgagcttctcgatgcacagcgcaccgtcttcggccgccttgatcatgcccgcgtcctcgctgaccgggatgaaggcaccggacaga

SEQ ID NO: 772 - DNA, 23370 bp, Unknown
  16S sequences of unknown bacteria
cctgacgctcggctcgaccccggagagcaaagagataaacgtcggagacgacgcgaccatccgcggcgacattaactccgagctgaacgtcggctgcgacgcgactatacaaggatcagtcaacggatacgtcaacgccggagacgacgtctcggtcgcgggagacgtgaacggagaggtgaacgctggaggagacgtgacagtcagaggcgacgtcaacggctcggtcgacgccggagacgacataacggtgaacggcaacgtgaacggcaaagtcgacgccggagacgacatcacggtaaacggcgacgtcaacggctcggttgacgcgggcagcgacgcgaccatcagaggaaccgtcaggggcgacgtggacgccggagacgacgcgggggtatacggagacatcctcggctccctgaccgccggaggcgatctctgcgtgaccggaaagataaccggaagcatagacgtcgacggaagtgtaaccgtgacgagagacaatgattgaacgcgttctactactgtaggggcaaccattggtcgcccgctccccatcgaatcgaaaataacaaaagggctgccgctcaaaaacggcaaccctttttgttatactctgtaaacgatttttccgtcaagcacgagcgcgcactcatacgcgccgagcttcatttccctgccgtctatcgtgaattctctctctgtgtccgagaggttcgcgactgtctcaagcgtcgtgtacttcggatattccccggcggacggcgctttttcggcgcgtcttgtcatcacgaggatgttctcgtccgacgcgaagtggtcgtattcaaccggacgcctcagaatcgcggcgtatttcacgcgctcggctataagctccttcgcgagagctcccatgttccctttctcctcgaacccggcgaacgcctggaacgcgccctccgagaaaaccgagacgaacagcatcgctttggcaaagccataaccgaaccgttctatggcatagagggcgtcctcgacaacgccgttgttgtaggtgtcgtgattttcggcgaagttcagccacatcgcgccgtgcgggaaaatctccgagcgcagtctgaggtattcctgaactccccgcgccgtctgcctgccgtcgtaaatgtttttaaggttgtagtactggtcatacgagtacgccatgtcgcaggaatccgcgtattcatagtagggtccctcgacgatgaagatgacgtcggggcgaaccttttcgaccctctcacgagcggctctgagcgtcgcgcagtgaccgtagttgacagaagcctgcccgctgtacgggaggttctccctcgagttcaccccgctctgccacggcggcgcgtcgaaacggaagccgtcgactttccattcggcgacgctcttttccatcgcgcgggcgaaccagtcgatgaagccgggcgcggcgtggtcgaaggtccatgtgtagcctttgaagatgtcgtttttgttctcgtagatgaaccagtcggggtgttcttctctgagcgggttgattttcgctctctcctcaccgaagagttccgggatttttttctgccattccggccagtagtagcggcgggagatgtatctttcgcggtcccagtcggcgatttcggtgtcgatgcagccgtgcatgagtatgtcgaggatgacgttcatcccgagttcgtgcgcgcggtcgattaccggtttgattgattcgcccgcgccgtgctggatgtccgggttcattaaatcgtagacggtgtagcacgggaagaggaaggacggcatcatttcgagcgtgttgaagccgagggagtggattctctcgaggtcggcggcgagctcggacgggtggtcatagcggtggtggcatttggtttcggagagcctgagcggaccgatttcgacttcgtagcaggtgagcgaggtgagcttttcgcgatttgtgtttttggcgcggagacctttttcttcgaggcggtctctgatgtatccggcggcttcgtatttgtcgccgtcgacgagggagagcgtgtagccgggcgcggagactgtgtcgccgggggcgaggtcggattcgacgcgcgtcatgtatgtgagattgccgtcgaggttttcggcgtcgtatcttgggtcgtaccaggcggctatcgtgcctttaccggtttcgattatggcgggtttgagggtgagcgttacgcttctgagggtgagggcttcgtctgagttgttcgtgaccgtgaatttccgcgtgaggcctttttcgccttgtttcagcgcgaagatgtcttcgatttcgacttttccgcagtcgagggtgaggtggagttcgacggtgagcatggtgcggacgaggcgggcgtttttgagggttacgtccggggtttcgtgtgctatgttttcaccggtgaggcttgcccagtttttgtttttgcctgtcgggtcgatggtggagcggtagtttccgccggtggttattgcgaccggcttcgcgtcgctgcgttctgtgagtgtgaggtcgccgatagttatcccgcggagtgttccgttcggcttgaaatcgagtttgcaagcgctgcttgcaaagcagaacccgttctccgtttctttgagttcaatcccgtagatgttttgcgtagtgattttcatgtgttggctttagcctttcttaggttagtggtagtattattgtttgtttgaagtcttttgccaggcttttcttcagaaaagccgcgtactccttatccttggcttcgtacatcctcatagaatttttcgagagctttgtcgattgatttttcgactttcgcggattcggacgcccagttttcgttgtgtttgttgacgacgtcgttgaaggtgttggctacattgccggcgactccgctgtaggtgaacatgaagttgaatttgaggccgtttttgattatgtcgtacatcctggacgaggcgtcgtcgtgggagtatttgactttgagggcggtttcgaagtagtgcgggaggtggagcggtagttctgggaggctagggcttccatgagggcgcctgctgcttcttgtttttggcaggttttggggactacgaaggaggagtaggtgtttctggctattgtgtagtagtcggattgggcttcgtcgtacttcgggtaggggatgacgccgtattcggaggtcatgtcgcggtagttggtgattatttggttgaattcggtggagatgaagaggacttggtcgtttttgaagagggagcggtagacttcgtggttttcggctacgtcggcggggttggcgtcggatttgctcatgtagaagacgccggggatgtctttgaaggttttgacgagtttctgcattttttcggtggtggattcgttgccgcctgcgtagcgccagtcgccgtcggtgttcttttcgccgagtttgacgtcgagggagcctatgaagccgcttatttggttgtagtcgttgattaccatgccgtagcggtcttcgggatcgactttgccgtcgccgttgaggtcggagtaggcggagccggcgatttcggcggctttgtcgagggtccatttgccgtcggagactatttcgtagatgtcgccggcgcctactgtttcggcgagttttttgtcaaagagcatacagaagattttctgggtgagttcgagggagatgtcgccggacgccatgtagagtttgccgtctacggtggcgaggtcggtgaggtcgctggtccaccagggtttgtcgaagtctacgtgggggagttccatgagattggagaggacgcctttctgtatcagcgacgggacgttgaaggtgaggacgccgcagaggtcgtaggagtcgtcgcctgccattacgctgttggcgatggcgtttacaaagttttcgcggtcggcgttagcggttcccgccatggttatcggggttattgtgactccgatgcggtcttctactgcgcggacggctttgtagacggcgtcgcctacgatttctccggtctgttcggcggcgtagaaggagtcgaggacgtcttcgcggtagaggacgtttattgtttcgccgttaaaattgagttccgggagagagtccttttcaaatgggtcgtcgtcggcgggagcggtggtttccgaggagttgtcgttggttgtgacgtcgccgggcttgttgttttcctgaccgcaggaggagacaattatcgtccccatggcaagcagtacaacgagtgagataaaacgttttttcatgatagcctccatatttctgaaataattgttttttgctctttacaaaacgaacaggttatgatataataataccataatatccgcgcgttttcatcaacgcgtgtcctatgcttgcaaactattgtctcaaaacgttatttcagatggaggtatacacaaaatcatgccgcgtgatttgttgaagatatacaatgtcgtgtcgacgcccgggcggcgtgagttttacccgcattatcacagtgaccttgagatagcgtactttcgtaccgggcgcggggtctattcggtgacagggcgggagtacccgataggcgaaggggatatatttatcttttcgaacaatgagatacataagataacttacgtcgacccggaggtgaagacgcgggcgctgaatattcacttcccgccgagactgcttctgatgccgctgtcgcttttcccggagtccggcgcggcgcgggagctgtcggagttttttctgtcgtccggctcgcgtccgaacaggataacgcgggagagcgcggggaggttttacgacgatattgtctcgtccctgcttgaggcggaacgtgagatgttcgcgcagtacgacggcgctgaattgctcgcgtatcaggcgctcgtgagggcgctggtgctcataaagcgtctctgccgcgagagcgataggtcggagcgcgagactgattcttccctcccctccggtctttcaccgaagaggatagcggcggcgaacgttggcatcgcggcggtgcttgagtacatcgacggcaactgtacggctgatttgtcagtgaacgagctgtgccggatatcgagcatgagcaggtcgaatttcgagaggatgttccggcgtttcgtcggcgtgccggtgagcgattatatccgccggaggcgagtcgacgccgcgacgaacctgctggtgacgaccgacatgacgattcttgacgtcgcgctcaccgtcgggtatcacaacacggcgaatttcaacaagcagttccgcgccgtcaccggaaaaaccccgggagaataccggcgggagtatcgcgagatgtgaaaaagaaggctgtcagacgacagccttcttttaataatcatgagctctatctctgtaggagcgaccatcggttgcccgccttcatcaaacgcaaaaactcacgcaaactaagcgcaaatctcacactaaacccacaatcgcgaacccatacccgtcaagcaccaccgagagcttaccttctgttccggagaccgccacggccgctccgcgcatcatcatcgggtcgacgtcggtcgattcaatgtcagtgacagtccttaccggcttgtccgagaagttgacgatcaccgcgacttttgtcccgtcaagctctcttgtgtatacgagaacgtgctcattgtccgccttcccgaattcaagcgacgcttgcattccgagcgtgggaacagagtgtctcagcccggagagctcccgcacgaggcgcattctgtcttttccgtcctcggtgagggcgttctgccagtcgattgtcaggttggcgccgtggaagcggttgccccagatcgagtggcggtttgtgtcgcagacctccgtgccgttgtaaatgaacggaacgttcggcagtgtgtaattgactacaagcccggcgtcgaacgccttcttgccgacccgcttctcaagacggttgtcgtagtcgtcgttgaccgagtcgtggttctccagcagaaccatcgactgatatgtcccctgaagatttctctccgagaaagagcgctgaccgtccgcgaatgtcgacacgggcttgccgtcgatgacgcacccggtgaacagatcccggagataccagccgtaattcaggtcgaaaacgctgagatgctccggtctcgtgccctcattgagcatcatgacgtccggcttgatcttccgtatcctctcggttcccatccgccagaaatcgatcggaaccatgtctccgacgtcacagcggtagccgtcgacgtcgcacttctcaacgaagaactccatgttccgcgccatatattcgcagagctccgggtcgtcgtaattgagcttcgggtaatgccactctccgacgtccggagtaccgtccggaaggcgctttatccagttcggatgatcggcgatgaacaccgcgttcggtccgcagtgatagtaaacgaggtcaagtatcacccgcataccgttctcatgcgctctcgccgtgaaatcggtcaggtcatctatcgtcccgtactccgggtcgatcgaataatagtcgctgatacggtaagggttcttcgggttattcagcttcgacgccttagttctcggcgaccagaactcgtccctctcgtccgggtcagccgtaaatatcgggcagagataaacgatatcgaccccgatatccgcaaggtgcggaagcatctctgccgccgcggaaagcgtcccctcattcgtgaacgcgcgcggattaatctggtatatgacgcccctctcaaggtaaggcgccggcgtatgtactgccatttttgattcctcaactttcctgacaagctcccggctcgtcatgtctacagaaattataccacaaaaccccgcgcgttgcaacaaatatattcagatattcatcaaaaatattcagattgacagaagtcccgcggccgtcctcgcgtccctgaacccctcgcggtggaaaaacgccgccgcgcactcgtcaaaccgcgaatgctccacaacccggaacacccccgcgaccgaatcaatgaacgactccttatcgaccgcctcagcccccgcgcaaagcatagtcaaagcgagcgaagcacaaagcgaaacatactcatcaaacaaatgctcccccgcgctcccgaacgaatccggaaaccccttataaaacaaatgattcacataaagcttctcaagccagacgtcaatccccggaaacatccgcctcagccgcccgtaagctccaatctcccgataagcgtaaaactccctgcaccttcgcagtctccccgccatattctcgctcgtccgcgccagaacctcaaaaaacccgaacaccgcgtcccggacactcacagaaggcgttgatttctcaccgacaatcgaaagctccgcccccaatctccgcatcctctccggaaacgccgccgtccggtcgcaaatcaccgcgaacgcccggtcccgtatcgccatatgctcctccggcgtataaatcctctcccggtcatcagcatccggatccccgccaaacgcaagctcccgcctcacaaacgaaaccggcgcgtcactctcaaacaacaactcgagcgtcttctcgcagctcgccgaagtcgaacactcagcaaacggcacaagcctcggagccctcggatgccgcctgcaaacctccggcaaagccccctcgccgcactccctctgaagcgcgcaaagcccatccgccctctgtatccgacaccgcccgtcataccccggcgaaaccaccgcgtaatgccccgcgtcaatcccattctccgaatgcgcgtccaccacccgaagcgaaacatccatccgccgccgaagctcctcagaacaccccagccccaacagccggaaatactcctccatcccgacaggtatactccaccccccgcaacaacaactacgacatgaaccacacttacatacaaaccgatcataataatccggcacaaaatattccaatctaatcaaatcctttcaggggtacgcggcttttctgaagaaaagcctggcaaaagacttcaaaaaaaagggaaacaagagccactaaccaaaaacagcagtagcccattgtttccccattgaaacgatattaacttatcagctcagcaatgccctgtcgttcgcgaactcagaaccgctcaactttgcgaacgcctcaagcaggtcctcgacagtcagcttcctcttatcctcgcccgaaacgtcaaggattatctttccggcgttcatcattataagccggttcccatgcgcgatagcgtcccgcatattatgcgtaaccatcagcgccgtcagcccatcctcctcgatgaacttatccgaaagcctcagaacattagccgccgtcttcgggtcaagcgccgccgtatgctcgtcaagcaacaacaacttaggcttattcatagtcgccataagcagcgtcaaagcctgcctctgcccgcccgacaacagcttcaccttagtagaaagccggttctccagcccaaggtcaagcccctcaagcatcttcttgaagttagcccgctccgacgccttaatcgcccacctgagcgacctgtgctttccgcgtctcgccgcgatagccagattctcctcaatccagaggtcagccgccgtacccatcatcggatcctgaaaaacacgcccaaggtacttcgccctcttatgctccggcaggtttgtgacgtcctgcccgtcaataattacagaccccgaatcgaccgggtaaacccccgcgatcatattcagcatagtagattttcccgcgccgttaccgccgatgaccgtaacgaaatccccgtcgttcagcgtgagcgacaaatcattgagcgccttcttctcattgaccgtaccggcgttgaaggtcttcattatgtgcctcagctccagcatatcacttaccctccttattttccgccggcttattatgccccgagcgcgccgcgatcgacttcttccagtaaggaatcccgaggaacaccgcgacgacaagcgccgaaaacagcttcaggtcattagcgttgaagaacgagaactgcatgataagatttataacaatataataaataatcccgccgaacaccgccgaaagcagcttcagcgcgaaattcgaaaatatcttcccgaaaatgacccgtccgataataatagccgcaagtccgatgacaatagctccgcgccccatattgacgtccgcgaagccgttgtactgagcaagcagcgcgccggacagagccacgataccgttagaaatgacaatacccgcgataaccgccccgctggtattgatgccgttagcgcgcgccatatgcggcgagcagcccgtagccctgagactgtgtccgagctctgttccgaagaaccagtaaagaatcccgatgatagccgccgcgattatgaccgacatgagtatagccttcgggttgtcgcggagagaaagtatcaacgaatatttatcgaccgagacaggcttgttggctccgccgaggatacgcagattgaccgaatagagcgcgagctgcgtcagtattccggcgagtatcgcgggaatgccgaactttgtatggaaaataccggtagcgagcccgcagaggcatccggcgaggaacgcgacaagcatcgagagccagacgttcagccccgaagtcacgcagacgacaagcaccgctccgcccgtgccgaacgatccgtcgaccgtcaggtcggcgacgtcgagtatcttatatgtgacgtacaggccgatcgccatgatcccccagatgacgccgttagcgatcgcgccggggagaaagttgaagaatgacatgatcttttatccttgaaaatatgaagtagatttcagcacggagcccggcaagtgagatataatctataatctcatcctgtcgggtagcgcgggtgatttaagctgattccggtgagctgtcagtcctctgcgaccgcgacgtaatcgtccggaacggtgatgccgagcttctcgcagcggtcggcgacgtattccttcgtgagcttgtccgcgaaggcgatctccatgtcggcggggttcttgccgttaacgaggatatcgtaagcctggagaccagcgttgtagccgatcgagtagtaatctatcgagagagtagcgatgccgcagcccttgcagatgccctcctcaccggcgacgaccgggataccagccggaagagcgacgctgtcgattatagcggcgttggaagcgagcatattgtcggtcgggacgtagagcgcgtcaacctcgcggcaggcggctgtggtcacggcggcgaggtcgttcgagtcggcgctggtgaactctttcgacgcgatgccgagcttttcgagctcagcggcaactacggtcgcctgatacttcgagttcgcctcggcggagcagtagaggatgccgactgtcttagcgtccgggcagagctcggctatcatctttgcctgctcggcgagcggcgcgaggtcggaggtgccggtgatgttgcgtccggtctttcctgtccagttgtccatatcgagcgcggtggcataatctgttatagaggttccgatgatcggtatcttgtcggtagctgctgctgctgcctgaagagcgggggtggcgttcgcgaagatcaggtcgacgttcgctgagacgaaattaccgacaataacgccgcacgtgggcgagtcgcctgcggcgttctgctcgtcgaacttgacgttggagccgagcttttcggtgagagccgccttgaagccctcggtcgcggcgtcgagcgccgggtgctgaacgagctggcagatgccgaccgtgtacttagcggtagatgagccgcaggaagcgagcccgaccgacatgacggtcatggcggcggcgagagccgctgtcagagccttttttatgagtcttgttttcatgatgattatctcctttttcctttaattattcccgatattaagtattataaaacaaaaataccgtccagagcgcgcgtagcgcaaaggacggcgtcgctgccgtgttaccacctttattcagggaaaactcacatcttccctctccatgaccgacgaggaaaggctgttccggcaaaagtctccggatttcgcaccccttatcggaccgcagaataacggctgccgccggcgcaccttttcagtgagcagctcacggactgtattcaccagaatccccgctgccgccttacaccaaccggcggttctctttgagtcggaaatacgggctacttgttcccggtcatcgcttttttgctttacaacactattataaacctttttcgcgcgtttgtcaatagaaatcgtttgtgcaggttttccaaaatattatggcaaaaatcggcgccgattctgctgtactcttctctgccgcgccgcggatgcaagtttgcggttccaaacttgcaaaaacagtctgaacgtgtacaatcgcgggcggtatgtaagccttcccgttgtgcgtaacgctgaagttgcgcgaatttcgattttctctgttattcctcttgcattttcgagggaaatatagtataatatagtacagaacgaggcgataaatgcaagacacggtttgcaggattgcattcacttcagttaagcaaattacgggggattaaaggaatatggaatacagatctcttacaaaggagcagctcgaaaacgaaaaggcggagctcgccgtcgaatacaaccacatagcgtcgaagggtctgaagctcgatatgtcgcgcggaaagccgaacaaggagcagctcgacctgaccgagggaatgctcagcgtcatctcctgcgacgacgactgcaagtccgagagcggaaccgactgccgcaactacggcgtgctcgacggcattccggaggcgaagaagctgttttccgacctgcttggcatcccgacaaagaatattctcgtcgcgggcaactcgagtctgaacctcatgtacgacacggtcgcgcgcgcgatgctttacggcgtcgtcggcagtgagaagccgtggataagatacgacaaggtgaagttcctgtgtccctgccccggctatgaccggcatttccagataaccgagtcgctcggcgtcgagctgattcccgtcccgatgacgaagaccggaccggatatggatgtcattgagaagctcgtgaaggacgacgacactataaagggcgtctggtgcgtgccgaagtactcgaacccggagggcatcacctattcggacgagacggtgcgccgtttcgcggctctgaagccggcggcgaaggatttccgcatattctgggacaacgcgtacgccgtgcacgatctctatccggacggcgacaagcttctcgacatattcgaggaggcgaagaagtacggcaacgagaacatggtgttctatttcgcgtcgacctcgaagatcaccttcccgggctccggcgtcgctataatggcggcgagcgaggagaacctgaagcagataaagtcgatcatgaccatccagacgatcggctacgacaagataaacatgatgcgccacgtgaagtatttcggcgacgcggagggcatacgcaagcacatgaagctgcacgcgtcgataatccgcccgaagttcgagatagtgctgaaagccttcgacgagaacctttccggtctcggcatcgccgactggacaaagccgaagggcggatatttcatcagtctgaatgtccttccgggcaccgcgaagagggtttacgagctctgtaagaccgcgggtctgaccctgacgaccgtcggcgcgaccttcccctacggcatagacccgaacgacacgaacctgcgtatcgctccgaccttcccgacgaacgaagatctgaagacggcttgctctgttctctgcctctgcgtgaagctcgcggcggtcgagaagctgcttgccgaataagtttcatacaatcagcccctccgcggcgcggaggggctttgcgtcatttatttcccgatgtccttttcatgcgccgccgagacttcatcgacgaatcgttccggctgttccccggcaagcccgccgtgtccgagctccgggaatattttcacgtcgaatttatatcctttatagcatatattacggacactttccgctccgaaagggcggcagcgtgaaaattccggttcccggcggaatttttatggttgactaacagagatttttgtgatataattgattatagatacgaatcccgtgaaaaaggagaaacaacgtgaaaaagatatacatgaacgagcacggcgtccatcccggaaaggacgtcacgctcatcctgtcggaggtcttcggcaaatacccggaggacacagagttcgtcttcgagccgggcgactatcatctctcaccgaagatattctgcgactaccgcctgtccaacaccgatctcatcccggagcgccgtctcggaatgctcctgaaggacatgaaaaacgtctgcctgaccggaaacggctcccgcctgctctgcgacgggaaggttatcgcgataacgatagatcactccgaggatgtgacgatcgacggcttcactatcgactgcgaaaagccgctcgtcgccgagggagtggttgtcggtcgcggcaccggtatcgttgacctgtcgatagacggaaagctctatccgcacaaggtcgaggacggaaagctcttcttcgatatcggaaacggcgagtggtcggagctgaagccgataagccagatactcttcgattccgcgacaaagcgagtccgccgcggcaccgacgacaggttccgcctcgcgttcaccgacgacctcgggaacggcgtcttcagattcgcggtcgagagcatgagagacacggacttcgtgaagaccggactgatcccggacggaggaatcttcgtgctccgccacaatgagcgcgaccactcgggaatattcgtcgagaaatcgaagcgggtcgacctccggaatatcaatgtctacagctgcggcggtctcggggttctggctcagttcagtgaggatctgacctgtcacgccgtgaatttcctgccgaacgcgagagccggacggcttgtcgccagtggtcgggacgacggcatgcacgtgacgaactgctccggcaccgtgacgatagaggagtgctctttcctcggtctgatggacgacccgataaatgtccattcctgctgctgtacaggcgtcgagtgggtgaacgactatacgctgcgctgccgctatatgcacccgcaggcgtgcgcgttccactactgggcggaaaagggcgacgagatcgcgtttatcgaaagaaagcacatgtcgcgcgtcttcgcggacgagaaattcaccgtgaagctctacacgctcgagggacgcgacactttcctgcttgtattcgacgagccggcgagcggcgagctgcggtcgatgaatccggaggatatcgcggttgacaatctgacgcacacggcggcgttcgtctgccgtcataaccgtttcgggagctgccgggcgcgcggagtgctcgtctcggtgccgaagccggttaagatttatgagaactattttgagtcgtccggttcggcgatacttgtcgcgggggattcgaattactggtttgagtcgggctgctgcaaggatgtagagatttacggaaacgtcttcaccgacgcgtgcctgtcgtcgatgtatcagttctgcgacggcgtgataagcgtgtcgccggtggttccggagccgcttgccgggcttccgtatcacgggaagataaacgttcatgacaacgtgttcgacactcccggcacgccggtgctgtccgcgttttcggcgcgcgaggtgattttccggaacaaccggattttcgcgagcccgtcggcaaagaagtggcaccccggagagaatctggtgcgtctcgaccacgtggagagcgcggttatcgaggacaacctgaaggtcggagagtttgagatctccggaatgtcggtcactgactgcggggagattaagggcgatatctgatcgttaacaaccggtccattgactttttcaggtgtttgtggtataatggtgtaagattgaaaatcaggaagaggtttcaaatgaaagatttctacgacaaatacgaatccccgttctcaacccgctacgcgagtgacgagatgcagtacctgttctcgcagaacatgaagttccgcacgttcagaaagctctggattgccctcgcgagagccgagaagaaggcgggtctcgacataaccgacgagcagatagcggagctcgaggcgcaccgtgacgacatcaactacgacgccgccgaggcgtacgagaagaagctccgccacgacgttatggcgcacgtccacgcgtacggcgaccagtgcccgaaggcgaagccgataattcatctcggcgcgacttcctgctacgttggcgacaacaccgacatgataatcatgcgcgaggggctgaagctcgtccgctcgaagctccttaccgtcatgaaaaacctgcgcgatttcgccctcgagtacaagggaatgccggcgctcggatacactcatctccagccggcgcagctgacgacggtcggcaagcgcgcgacgctctggctttatgagctgacgcttgaccttgaggatcttgattatgtcgcgtcttcgctgaagctgctcggctcgaagggcacgaccggaacccaggcgtccttcctcgagctgttcgacggggacgaggagaagataaagcaggtcgaggcggatatcgccgccgagatgggctttaaggagtgcgttccggtgtcgggtcagacctacacgagaaagttcgacacccgcgttctgaatgtcctcgcggggatcgcgtcgagcgcgtacaagttcgcgaacgatatgcgcctgctccagtcattcaaggagatggaggagccgttcgagaagaatcagatcggatcgtccgcaatgccgtataagcgcaacccgatgcgctgcgagcgtatctgcgccctcgcgagatatgtcatttccgacaccatcaacccggagataacgtcgtcgacgcagtggttcgagcgcacgcttgacgattcggcgaacaagcgtatttcgatggcggagggcttcctcggcgtcgattcgatactgaatatcttcataaacgtgacgaagggacttgtcgtctacccaaagatggtggagcgcaggataatgaacgagcttccgttcatcgcgagcgagaacatcctgatggacgccgtaaagaagggcggagacagacaggagctgcacgagctgatccgcgagcactcgatagccgccggaaagcgcgtgaaggaagagggtctcgacaacgacctgatcgagcggatagcgtccgacccgcgtttcggtctgagccgcgatgagatcgtgacgaatctcgacccgaagaactacacgggcaggagcgagcgccaggtcgaggagttcatccgcgacgtggttgacccgatgctcgcgacgggcgaggcggcggacgaggttgagctgaccgtctgagcgaaaattatatgataaccccggcacgctgcggcgtgccggggtttgttgttaggagcagaaatgaaattacgcgctttgctttttcgcaagttccttgacttcatcaagtgtcagaccacaggaatccgcaatcttttcaagtgagagtgttccgtcttttatcagcgcaagcgcagttcttatattagccttcttaatgccacgctcttctcctctccgaacttcctcttccacaatcctgcacatactaccgttccctcctcgtcttctttataataccgaaccttctccgcaagcggcgggaggtacatatcacccgccttgtcacagtagaagtcgtgtatcacgctatgctgtatagcaataaatataagaatcaggttatgccgtgtgtttctctgcaagcttttctatttcggaaattgagagcccagttatctcagaaatgacttcaaaggacatattcttctgtatcatcgcaagcgctgtttttatatttgccttcctagcgccccgttcttcccctctccgaacttcctcttccacaatcctgcacatactgccgttcccctcctcatcttccttataataccgaaccttctccgcgagcggcggtaggtacatatcacccgccttgtcgcagtaaaagtcgtgtatcagcttgcctatcagcgtgcttgtgtcgcgataggctccgtttatgtatattatatgcgagccgtcgccaaaataccggttgtccagctcctctattttcctctcgacatggtacatcgcgattcccgcgccgaacgtgtccttttccgtgaaaaatatcacgtaggtgtccgcgagctccgagaaatcctgcgacttgtcaagcataccgccgtcaagcgcgctgctgtggaacctcgcgcgtttcgcgcccgctcccctgtcgctccgctgaatctctatgttgtacagcttcccgtccgcgtcctccgccctgacgtcgagctttattgatcttgacgccgcgctcttgtactcgacctgcgtcttggcgctgatgacctctaggtcgtcccgctcaagcacaatatcgagtatgcacttgaccgccggaagattgtcgttcaacacctgcgacatgaagtcgtcgtcaatcagccgcagcttcgcgacgatctcgcggtatctcttccaccgctcttctttgtcctcttcaaaatctatgttggtatcgaaaagttccgccgtttctgtcatgccgtcaccccgcaaaaactctcttctgataatattctaccacagatatccgttgttgtcaagtgaattttatttctccgctgaaatatttccgtgaaatcccgcgccgccattccggataataacgacttatttatggatatatgcgacttttatccgaagaccgttgacaattctgctcccatatggtataatcataaaaaccggcatagtatgccttgaaaggagcaattcatatgattcagcaattcccgagaacgacagtcggcggcgtctcgatgccgcggcttctcatcggcacaaactggctgctcggctggagccacaccggcgcggctgcggatcaggggatacgtgagaaattctcgaagccggaggacttctacccggtcttccgcgcttacctcgactacggcatcaacgccgtcatgggtccggtcagcacgactccgctctgcctcgacgcgataaagtacgccgaggacaaatccggcgaaaagatcatcataatcgacacccccggcatggacgtcaacgattccgctgagtcgagacgctcggcggaacagacgataaagcactccgccgagatcggctcgactttctgcctgattcaccacgtgagcgccgagcagctcgtaaacaagaacctcgccgcgatgccgcgcctgcccgattatctctcgatgatacgcgacgcggggatgcttcccggtctgtccgcgcatatgcctgagcttgtcacttacagcgacgctaacgggtatgacgtcgagacgtatattcagatcttcaactgcatgggcttcctgatgcaggtcgaggtcgagtctgtcgcgcggataatccagaacgcgaagcacccggtaatgacgataaagccgatggcggctggcagaacaactccatacgtaggtctgaacttcaactgggcggttctccgcgaacgggacatgataacggtcggagccggaagcgaggcggaggcgcgcgaggacattgagataagtctcgccgctctcgagagacgcgccccgaagctcggtgcgagatcttcgcctatgaaacagaatatcctcgggcactgagtcatttgaccgtcggattccggcggtctttttttcatcttttacttgacaaattcagaattatatgctataatggattcaccaagaaaggggtgcgcatatgaaaaaatcattcagaataatagtctttgcgatgtttctcacattgaccatgacaatattctcctgcggcggtaaaaataacctgtttgacagcgtcgacacggaaaacggcgtattcacgctgacggtctcggacggaacgtcgaggaagctcttccgtctccagaacgacacatcgacaaagaacaatctgatctccgcgctttcgaaggtcgcggcgaagccattttccggtacgccgcacgacgttcccgtcacttcggcagattctccggcgtatgttctctccgctttcacgaaggacggttcggacttttcggtgctttacagcggcgggtatctcgtgacggacgacggttcggtctatgagtttgacttcaatttcgcgtcggttccggagaaatattccttcaccgaggacagtaccatcaattccgcggcgaccggttttgaatcgattctggcgcgggacggtgacagcttcgacgcttcaaggctcttgacgcatgaggattatatgtcgatctatggcgcgaactatccgggcactccggacggagtcacggcgtccttcgtctcactcggcggcaacgacggcaagccgacagtaacaattgaaatatcgaacggaacaaactccgagttttccttcggcaagtactacatcgttgaagtcagcatcgacggcaagtggtacgttctccccgagctccccgacagaccggttatggtcgaggacatcggaatcggtctcgctgcggggaagtcgacggaaatgacctacagtctctggaactggggcgacctgcccgccggaacatatcgcgtgacgatatccgataacctgtcggctgaattcacgataaactaataaaagcagagcggctcatcaccgctctgtttctttatttctgcactgtaactataaatccgtcgacgttattacccgacacagtatacggataattcttcggaaccggcactgacgtgtcgccttccgcggcggcttttacgaagtagatttcccacttcgcgccctcgtcgtcggttatctggagatgtgttccgtcatacgggaaggagcgcagggcgtcgatgtattcctcgaggcagaggttgttcgtcaccatgtagaaggcgtgtggcttgcctacatatctgtagtgccagctctcgtagctgattttcgtgatgtcgaccttgtccgccttgaagcgctggatgaagccgtatttgtggccgttcgtgttgagccattccggataggaggtcagctcgtcgaaggtgtgcgcctgcccgttgtcctgatagatcgtgaagtctatcgcgagacccgtgtgatgttcgctgtagccggggagcgcgacatagtcgtcggcgtattcctgtccgtattcctcgatgtagctgttatagatcgcttcctgctcttccttcgtccggtaagcgctgttgatgaggatgtcgtggttcccggtctcggcgtcgaacgccgccatcatcgcgttgcactgctccatcgcgtagctgtcgagtgagacgatggtgtcgcggagcttgtaggagctgtttttgttcccgtagaacggctgaatcttgaaatcagtctcgaaggtgtacgcgttctgatagttgacgagtatcaggtagcccttgtgcatcgcggacgcggacatctgcttgtactcatagtccgactgcggaggcgccgtcgtttcggtcacgggttcggtcgtttcggtgacaggctcggtcgacgtgacgggcgcggtatcgctggtgctttcggtcgtgcccccgccgccgattgctccggacgcgcatctcaccatgaatatcacgagagcgacgacgagcatcacgagtatcacgacggtcagtatgacgagcgctctcgcccgctccgcctgttttctcgatctgtgccgcactggcgggtaggaatcgtaggtctcgttcatccggtggtgctgattctgcggcggatactgctgacttgtcgggcgctgaccgcccggtctctgccctgccggtcgttgatttgccgggcgctgaccggtcggacgctgattgttcggacgctgcccgttcgggttgttccggttattgttcatcttctcttctcctttgcattcccgcgggttatacaaaggcggagcgcaaattgactgcgccccgctttatttctttatcgctcattttgaggctggttttgcgaagcaaaatcgttatcggcagataacgaaagtctcaaaatgctggcttgaaagatttatctttcaagcttttatcttaagaacgcgtccttgcgggagaggttcagacgccccttctcgtcggtgccgaggaacttgacgcgcatttcgtctcctacctggcagacatcctcgaccttttcgacgcggcggttctcgagcttcgagatgtggacgagaccttccttgccgggagcgatctcgacaaacgcgccgatcgggatgattctggttactctgccgtcgtagatttcaccgggaaccggctcaaagacgatgccctcgatgatcttcttagcggcgtaagcggaatccgggttgacggcggagatgaagatatctccggtctcctcgatgtcgatcttcgcgccggtgtcggcggtgatcttctgtatgacctttccgcccgtaccgatgacttcgcggatcttttcggggttgatcttcatcgtgagcatcttcggagcgtacttcgaaacctctgctctcgggcggtctatcgccttgaggagcacctcgtcgatgatgtaatcgcgtcccttatgggtgacggcgagcgcctcgcggatgatctccggggtaagaccgtcgatcttgaggtccatctggatggaggtgatacccttgtgagtgcccgcgaccttgaagtccatgtcgccgtagaagtcctcgagaccctggatatcgatcatggtggtccagcttccgtcgtcagcggtgataagtccgcaggagattccggcgaccggagccttgatcggcacacccgcgtccatcagagcgagcgtcgagccgcagaccgaaccctgagacgtcgaaccgttggaggaaacaacctctgaaacaagtcttatagcgtacgggaactcctcgaccgacggaagcaccggaacgagcgatctctcagcgagagcgccgtgaccgatctcacgtctgcccgcgccgcgcgaagccttcgcctcacctgtcgaatagccgggcatattgtagtggtgcatatatctcttcgactcttcctcgtcgataccgtcgagcatctgcgcgtcggagatcgggccgagggttgcgatcgtcatgacctgggtctgaccgcgggtgaagagtccgcttccgtgcgttctcgggaggaaaccgacctcagcggcgagcggtcttatctgatccattcttctgccgtcaacgcgcttgtgatcctcgaggagccagcggcggacgatcttcttctgaatcttatagatgagctcggggtaaactacctcaagatccgggtactcctcgccgaactgagccatgatggcgtcctgaaccggaaccattctcgcgtcgcggacgttcttgtcgtcggtgtcgagagcgttcatgacgtccttctcgcagaaagcgaaaatcttgtcgaacatatcgtgatcaagctctccggacggataggagaacttcggcttgccgatctcggagacgatctggtttatgaagacgatgagcttcttgatctcttcgtgagcgagcatgatagcggcgaacatatcctgatccgaaacctcgttcgcgcccgcctcgatcattacgaccttcttctcggtcgccgcgacggtcagctggaggtcgctgtcagctctctcgtcagccgtcgggttgatgatgaatttttcgccgaccttgccgacgaacacgccgccgataggtccgttccacgggatatccgagatggaaagggcgatggacgcgccgatcatagccgtgatctcaggcgagcagtcgttgtcgaccgagagaacggtcagcgcgatgttgacgtcgtttctgagatccttcgggaagagcggtctcagcggtctgtcaatgacgcgggaggtgagtatcgccttctcggagggcttgccctcacgcttgaggtagccgcccggaatcttgccgaccgagtacatcttctcctcgaaatcgacggaaagcggcaggaaatcgatgccgtcgcgcggctttgccgaagcggtagcgcacgcgaggatgacggtgtcgccgtacctgacaaggcaggaaccgtttgcgagccccgccagcttcccggtctcaacgaccagcggacgtccggcgaaggtgtaattgaacactttgtaattttcaaacaacatttcgtttctccttttgttttgattttcccggaagaaacgcggtatcctgc

SEQ ID NO: 773 - DNA, 19059 bp, Unknown
  16S sequences of unknown bacteria
agtactgacccctatggggtctgagcaaaccactagtttactagtggttatgattgggataactcctgcaaggcctgggccagttgcttggggtcaatgggtttggtgatgtgggcattcatcccggcctgagccgtggcggccatgtcttcggcaaaggcattggcggtgagggccagaatggggatcgcaacggcgtccggccgatttatggatcggatggccgaggctgcggcgcagccatccatcaccggcatattcacatccatcaaaatggcatcgaattcccctttctgggaagaggtaaacgcatccaccgcttcctggccgttgcggaccggggtcacctgggccccccacagattcagaagctgggtggcgatttccaggttcatctcaaaatcttcggccagaagaaaatgcttgccttcaaagggtggtgtttctttggagggttcttctgttttctccggcgcagggtcagggagcggttggtctaccggctccatgggcagggtcagggtaaaggtggtgccttctccgggggcactctccacctggatctggccgcccatttgggtaacgatggcatgtacaatgggcatgcccaggccggtgcccagcacggtctgggtgccgaaccgattttcccgggcatagggggtgaagagctgaggcaaaaattccggcgacataccaatgccggtgtcccgcaccaggatgcggcagactttttctcccggttgggagaactccacctggattttgtccccagggtgggtaaatttcaaggcgttggacagaaggttacccatgatttgctggaggcggaaggggtcgccatgaaccatggggcgggggagatccagggagagggtcagctccttttgttccagttcggcctgggattggaaggcagaaacccattgttctgccgactctttcagattaaactgctgatttttcagttggagctcggtttgctttgtgcgggacatttccaggatgtcattgatcagctccagcagctgggaagcggccagggtgattttctggagacaaccggtgactttttttaggtcatccccttgatcctgagccaagcgggccgagcccaatattacattaagtggggtgcgcatatcgtggctcatctgggagaaaaactggctctgggactgttcgctgtcccgggctcgctccaaagctccttccagcatatgcaaatgctgaagctggctggacttttcctcgtccacctggcggaagcagagcaccgcttcctgaggctggagagagggggcaaaaagcaggcgcacattgacccagcggtactcatcgccgaattttctccggaagtctccgccgaagtctgatacattttcctccatcaaccggtgcaggttgttgagagaaaagctgcggctgaattgggaaaaggtttctttgtcaataagttggccgatgacttgcatcaggttttcataggggccggtgggtgggagctgctggagcacatattcggaacctttgatggcctcatagcttccacggcccacattgacccgatagatggcatagtacaggttgcccaaagaggccactgtttcagcggcccgggcagttttccgccgggccaatcgttcccgcagaccgaagaacagaagcagtgaaaagaaagcgccgcagatggcacaggcgccatagaacacctgacgcagattgcccaaaagggcggaatagggaatggtgatgatggacacccagccgttttctgctgtggtaaaataaaccgctcgtttttccgaggtcaggccgtagacatactctttggcatcgtccagctgtccggcctggatttgctggaagatggtgtggatatagccggaaagctgctgagaatcggcggaaaattcggtgcgggcatagagcagctggccctgggcgtcgcacagataataggaacttccctggggaagagcaaggccgttctcactttccaggctggcggcaaaggccagcaccgcatcttcccccggacactgccgggccacgatgatgcccggatcttctgcatcgggggccagcagatataccggctcgccctgggccttgcaggctttttcgtaccagggaagagtgaacagatcctggtcggccgaggcggtggggaaaagctgaccgttgacggcggcatagggatggatggtgtctgaaaaggacagagatatttcttttacaaattcttcggcccacaaggtgagatcttccggctgggctccggagcggattttttcatccaaagcgcccaccatcagatccagacaactttccaccgcttccaaacggctgagggcttggtcggaacattgccgggccagctgattgccccattgctgggaattctgcagcaggattacctgagtcaaaaagagccctcccaccaccagaagggtgcagaacagggcaaacagccctgtcatgggaaggctccattttcttgtgtttttcacttttttctccatgggacatccgctcctttgtctcatttaggatatcttgtttttccatttttgacaaggggcaccgtgggattcccggtgattcagctgctccattcgtactcgaaagaagcccggtgactttccacttccagcaggcaccggtcaccactgtgaagcgcataatgggcatggccggtgatgttttcccggatcaggcgggacattttgccccgaacgggagcagacaatcccagatgatcggaagagagcaggttgacctggagcgtgaggggcccctgccggatgagaatctcctccggcaggattttttcggcccgtgcgcccagataagtggccagccggtattcctgtcccagaaaacgcaccaaggccagaacgccggtaaaagagaagggccccagaggaatggaagcgacagacagcatcaaagacccctgggggaaaagacattggctccacacatagcgcttggggaaagagcggccctgatctccttcgatatatccgcggccgggggaaaaagaaaacacccgtccgttccattccaatcgtccttccacggagtgggccatactgtatacccggtggcggcattccagaaagggtacatagcgaaagggacccatgatatcctgggagagaggtgcaggcgggccgaaggaaagctggccccgcagacgggtttccgaagtggagatgtgaagcgtcagccctttgggagaaaaggaaaatccgttcatttgtccttccggccggtcccagcgaatgacggcaccctgagaggggagggacacggtctggctgttctcaggggaaatcagctgaagagaacattcccggcctttggggccttgatggatggcgggaatcagagccaatgtgtgttctttggactggcatttgaaataccagccgcgaaattgtgaggccatggtgttttcctccaaaagtgatttttcctagtgtttcactggaaaaggaggatattcctggccatttcactgtcgacgggaaaaatgggaaatgatatactgaaaaagctcaaaatattttttgaatttgtgaatggattttctgctctccgccgtattagaagtgaaaggcactcagccaacacacaaaatatgggacaggaggcacagaaaatgaaaaagattttggcaggagcattgacagcagcagtggttcttacggctggcggcgcggtttgggccgcaggcgggagaagcgccggttggcggtatgtggatgcagacggcgacggtgtttgcgacaaccagggtacagggtattgctgggtagatgcaaacggcgatggcatctgcgatcatcagggtgctggatgtggctgggtagatgcagacggtgacggtatttgtgacaatcagggtaccggctggcggtatgtggatgcaaatggcgatggtgtctgcgacaatcagggcgcaggccgggggagaatggggcggtggtctcagggaggccgcaacctgtaaaaacggggttatgtgatgcgcagcgaggaagaggtccgtcaggcgattaaccgctatgccgacaccgttcggcggatctgcggggttcatttgaaaaatcgggaagacaccgaagatattttccaaacggtgtttttgaaatatgccatgagtgctccggatttccaaagcccggagcacgaaaaggcctggatgatccgggtgaccatcaatgcctgcaaggatctgctgcgcagtttgctgcgccgccggacggtgtccttggatgaggtgctggagcagccggcgcccattcccgaggatcatcgggaagtgctggaggccgtgctgtctttgccggtgaaatacaaggatgtggtgtatcttcattattacgaaggctatacagcgtctcagatcggggagatattggggaaaaaggccaatacagtgtatacgcttctcacccgcgcccggcagatgctcaaggaaaaactgggggagggtgtatgatggacagtaagctgaaagcggcctttgactccctgcaggccgatgaggcattgaagcaaaaagcctgggaatcggtgcagcaaaaacggaagaagcggcgtcctcattatggcagactggtacctgcgttttgcttgctgctgttgtgcctgggctttggcacctggcggctgtatgctgcaccagtggcccacatcaccatcgacatcaacccttctgtggagctgcagatcaaccgatgggacaaagtggtggatgtaaaagggctgaaccctgatggggaagcattggcccagtctctttcggtacggttttgggattatcctcaggccgtggaagaaatattgcagactcccttggtggaagaggcggtggcccaaggagaaaccttggcggtgggcgtcatgggagatgatcctcagcgccgggaggagatgctggaagtcctggcttcctgcccgggaatggggcagaatgcctattgctatggggcagacacagagcagatggaaaaagcacaggaagcgggacttccctgcggcaaataccaggcttttctggaatggcaagccctggaccctgatgccacagtggagcaggcccgcgccatgaccatgagccagctgcggcagaaaattgccgagctttccggtgaaagccagacccaggctcccggttggggccaaggtcagaaccagggccagggccaagggcaaggccagggaaaaggctggggtgccggaggaagcggcggaaaaggaaaacagggaagacaatgagaaaataaaaaaggttcccgcagctttgagctgtgggaaccttttttgttacatctgggattcatcgtaatgggcacgctggccgccgatgaatttgggacgggtacgggcgcagatgatattggcttctccgatctgtttgatggagaggcgggtggggactgccacctcccgcaaatgcatcccgatgagtgtaccgccgatgtcaataccggcggcggccttcacatgttccaccatcaccgggtgagaaaaggccttgtatgcagcggtggcaaagctgccgcctgctttgggctgaggcaccacattcaccggtgccaggccataggcccgggccgcttctttttccaggacgatggcccggttcagatgctcacagcactgggcagccagataaatgcccttttcctttaaaacaggatagatgccatccagaatggcctgggccacttccgggctggaatcggaaccgatccgatgaccgcccacttcgctggacgagcagcctaccacaaaaatatctcccggttccaggcgagcccgctccaaaagttcggtaacggcctgtttggcctgaccggtgatctcctcatacatgacaaagacctcctgggggacaaaatccccaatcatattttccctcagtataccacgaaaagtgaaaaatgtatacgcctcctgaaggaaagaaaaagcggccgtaaggccgctttttctttccttcttttacgggagcaggggtttgcagatcagcttatccagcttggttcccagaatatcctgggcatgggccgggcgcagaacccaggcggtatcggctccgccgccggtaccggctacacacaccaccggcccgggctggatggccccgcaatccagagccatgacggcgcattccacacaaaccttggtgccctggccaaacatccgcagggtgtaggccatgatctccaccgggtaaatgcccttcatacgggtggaaagcccccgttcggcaccggagagcacatgggaggtggtgaccacctgcactccgcagtcctccagttccttccggacttccggggaaagctcttgggagccgggctctttgtagccgttggcatgggtgactaccaccactttcatgccattttgggcggcttccttgaaaaagcgggcagtgtagcccgagccgctggccaccacaatggtggagatgttttcttctttggcggctttgagggccagctccaccgtttgggcggtgcagtcttttccgggttttttaaaatacatggccatcgctccttttgcttattttctccagtgtatcataagcaggggaaaaacacaacggcggttgccaaagaggagagacgcaggtataataaaggaaagattttcatcaatggaaaaagcgagggaatacatatgaaagaacccactttgctggtgctggccgccggtatgggcagccgctacggcggcctgaagcagatcgaccccttgggacctcatggagagatcatcatcgattattcgctccatgacgcctatctggccggtttccgccgggtggtctttgtgatcaaagaagagctgaaggatgttttcgaagagaaggtgggggctctggcccgggagaagatggaagtccactatgccttccagaaaaccaccgatctgccggagggatgctccctgccggaggggcgggtcaagccctggggcaccggccaggctgtgctctgcgccaaagatgtgatcgacggtcccttcggcgtcatcaacgccgacgatttttacggccgggagacttacaagctgctgtatgacttcctcaccggctcccacaccggggacaagatggatttctgcatggtgggctatgtgctgaaaaacaccctgacggaaaatggcacggtatcccggggcgtctgccaggtgaaggacggctttttggagacggtcaccgagcgcaccaagatccggggtacccaggacgggggcgcggaatacaccgaggatggagagcattatatccctctgtgtcccgacagcaccgtatccatgaatgtgtggggcttttcgccggagttgttcacctgcctggaagaggggtttgaggctttcctcaaggctcccatgcaggacccccttaaggcggaatattatctgcctggagcggtggacgggctgatccagcagcagaaggcccaggtgcatatgctgcgcaccggcagccagtggttcggcgtcacctatcccgaggataaggacatggtaaaggccgccttgaaaaaggcctttgaagagggcgtatatccccctctgcggtaatggtaagaaagaaaaagggtccggacagctgtccgggcccttttgttttgctgttatgttaccgggcgcgatagaggaaggtgacaatctggccccgggtgcaggaagcattggggctgaaggtggtgttgctggtgcccgaagtgatggcattttccacggcccactggacaggtgcggcaaaatagtcgccctgggccacatcggtgaaagagctgctcgaaccggccgagggagaaccggcggcccggtagaggaaggtcatgccctgggcccgggtgcaggtactgttgccgccaaaggtggtggctgttgtgcccgaggtgatgccattttccacggcccacagcacggcgtcataataatagtcgtcggcactcaggtcggtaaagggattttcctggctcttgggttcgggggaaccggcagcacgccacaggaaagtaacgatctgggcccgggtgcaggaggattcggggccgaaggaggtggcggtgaggccattggtgatgcccttgtccacagcccagatgacagcgtcatggaaatagtcgctttccgctacatcggtgaaggaggcgctgtcttctccggccttgatcaaagcgccgcagacggtgcagtaggtggattttgcagggtcggcattatcctccggcacatgctggccggtgggctggatggtcatggtttcggtcaggccgcaggtggaacaggtgcggatctgcatgccggcagtaccgcaggtggcctcctgggtcactttccactcactccactgatggttgtggggcggggtgccgtagacggcataggcagtatagtcgccggtgctgtctttggcgaaggcagaatagccgccatagaattcgttttctacgacctcaggctggagaggctggccggtcttgtctttgaacagggagatatactgggagatcagatcctgttccatgccgctcatgcgaacgacgccggtgtaattcttttctccatccacaacaatggagccgccggtgagattcatcatgtttttcaggctggtgccgccaaagcccagagagaagctggtgcactggatagcgccgctgctcatggtcagaccccagcaggagaaagaggaggtcttcaaagtggcgtccttcaggatggttttgtccaggcccactcgttcacagttcagggtgccgttgccctggatggtgaccactttccgctgggagtccttgatggagctgcccgaggtgatgccgtagatcagctccagaaggcctacctggctttctgtgccatctttcgccacgatggtaatgtccttcagggggttgatcagctggagcattttggtggtctgcacgccgctgagggtcagagtgtagttgccgtcatagctccagccgctgcccgaggagggctggtcgaaggaatagttctggccgttcagggaaaaggcgctttcctgagggccgtagggatcgctggcaaaggccggaagagccagacagctcatgcacagcacaaaggccaggagcagggataggaaccgtttactcatattgtctctctccttccaaaatagggccgcagcccatttgaatataaatccagtataatcctcccagagaaaaaataccagagaaaagaaggaaattatcaaaaaacagaaaaaagcagggagaggatatccctctccctgtgcggccaaatcggcagtttacagttctttgaggcagtaggccacgagaacttcgatcatttttcgctgactttcttccagttgagaaatctgatcggccagagtcactaagtcgtctgctgtttgtttccccatcaaaatataatctgtgctgatgttcagtgtttgacttaagcgaatcaggttgtcgatccggatggctttgacgccccgttccagattggaaatcatttgaatagaaacatccatttgctcggccagttgttcttgggtcagtcgcatcaattttcgccgttcactgattcgctttccgatttcctccaaaatataattatccatgggtggtcctccaagattagtccataggataattatattttcttttagatgaaattataaacgcctttagattgacagtatagttctatagatgtataatttgacaaaatgaaaatgggaggaaaagcaggattatgattgtgaaaagaatggtttctatgttgctggccctgtcccttatcctttctttgggggcatgcagcaagagcagcgacgacaacagcaaaggcgaaaaccaagacaaaagcgcatcccaggagacgccggaccatacggaagatacaggcgcagaccagagaaaacaagaaattatggaacggttgaccagcgatggcggccagtggggatatttttatgttgggaacagtccggaggaagcgagttacacatattatgaattcaatggggatggatttttccattcgttcacctatgaaccgtccacactggatggggtagaatatgtccacggccgggaaggcaccacctatgaaatcacagatgacaagatcgtctatacatacgagtttaccagtcaaagcggcacggaaacgaaggaagattcattcgactacacctatgaggacggtgcgtttgtgttaagtgttcccaacgggaatcttcacaaatccaactgggaagagcttacggaaaaaatgagaacagacggcttttttgtcattgacgattttgtgttgggagagtaaagaaacagcccttttccgtggaaggaaaagggctgttagatcatcaaagagcttatatggcgaaaaagagactattcgtcctaccctttatcaatttgtaaaagccgacgacctgtgcgtcggcttttacacttctcaaggggcaagtgtgcgccgaaggcgtgcacgcagacccttgcaaaaactcgaaaaagtggcaaaagccactttttcgacataaaaacttatttcagagtgtcacggatcaggcgaagcatattaccgttgcagatcttgtcgatctcgtcgtcggtgaaatgaggcttcaaagcgtccacaatcagggacaggccggtgtagtccttgaactccagagtggaagtgatgccgtcaaagtccgagccgaagcccagagcatccagaccggccttgtcacggatgtggagcatatgccgcaccaccgactgaatgtcggtatactccgcaccctcgttgaggaactgggaggcaaagttgatgcccacgacgccgcccttttcgcccagggcatgaagcatctcgtcggtcaggttgcgagtgtgattgcacagggcccggcagcaggaatgagaggccatgaagggctttttgctgtgcttcaccacatcccagaagccgccgtcagacagatgggacacatccaccagcatccccagctcgttcattcgtgcaatgcagtccaggccgaactgcttcaggccacggttcatgatctccggatctttggagttggggaagcccaggctgttttcatagttccaggtgaaggaaatcaggcgcacgcctttctgataaaactcctccagacgctccattttgccctccagaggcacgccgtcttccacggtgagcacgctggaaactttgctggccgctttgttggccatgatatcgtcatagttgcaggccggagccagcacatccttgttggcctccagctctttcagataagccttgtagacaaactggaaatagtcatagggaggcagagtgacgcctttgccggcgccgctgtcgtgggtggggatgaagatggcgaagaattccgccatggcgccgccctttatcagcttttccatgttgatgtggcccgggttgttctgcagggtcacttttccttccgagcgggcgatgcactcgcccatggtgtcgcaatgggtgtcgatgaaacgcatttccataatcttgttcacctttctatgataaataatatggaacactaagataataaggagaattacaggggatagaggtcggccagaaggtagcgttctcctccgtcggggaggatggtcaccacggtttttccctccgcttcttcccggcaggccaccgataccgcagcggccagagcagcgccggaagagatgccgcacaaaagaccctcggtgcgtcccagttcccggcaaagctccaaagcgtcgggggtgcgcacccttatgatctcgtcgatgaggggcacattgaggatggggggcacaaaccccgctcccaatccacggatggcgtgggaagaggggagaccgccggagagcaccggagagtcgttgggctccaccgccaccagacggcagtccatgcaccggcttttgataaattcgccgcagccggtgaaagtggctccggtgccgatgccgcagacaaaataatccacctggggaacatcctgcaaaatttccggaccggtgcaccggcggtggatctcgcagccctggtcgttttcaaaaggagaaggcatgaaagcccccagttccttttgcagctgccgggctttttccaaagctcccggcaggccctctctgcctggggtgagcactactttggcgccataggctttcagcagctgggtcaggggaggctccactccctccggcatgacgatataggcccgcaggctcaaagcggcacaggccatggccagagaaatggcggtgttgccgccggtggcttcgatgacggcgccccccggcagaagattcccttcttccatggcggccagcagcatggaaaaaaccgcccggtctttcaccgagccggtggggttaaaacattccagcttggccaggatgggggtgcggcagccgtaaagggcgctgagttttgtaagacgcagaaggggcgtacggcccgtcagctgggctacagaatcgtaaattgccatcaaaatacccctccttcttgtgtaattctactattattctgaaatactggcaactgcggaaaaatatatttagaaaaaatgtagaaaatccaatttccaacttgtttaaagttatcaagaatgttagaatacaggtgtaagaaagaaaagtaattggagccaggggggtttcaattcttttttctatgtcgtcaaagcaggagaaagctgaaaacgacgattttattgcaggaggaatcgttatgcacaagaagctctttatccccggtccggtggatgtgcgtccggaagttctggccaagatgtccacccccatgatctcccaccgcggcaaggctgccacggagctgggcaaggatgtctgcaccaagctgcagaaggtcttccagaccaacaatgtgatcgtgctgtccaccacttccggctccggcctgatggaaagtgccatcaagtgctgtaccgccaagcgtgccgccgttttctccatcggcgcctttggcgacagatggtataagatggctgtggccaacggtgttcccgccgacaagttccgcgctgaagacggacaggccaccgatcccaagcaggtggacgaggctctggccaccggcaagtatgacctggtcaccgttacccacaacgagacttctgtgggcatcatgaaccccatcaaggaaatcgctgaagttgtgaagaagtatcccgatgtggtcttctgcgtggacaccgtctcctccatgggcggcaccagcatccctgtggacgagctgggcatcgacttctgcatcacttccacccagaagtgcctgggctgccctccgggaatgagcgcagcttccgtttccaagaaggcctatgagcgcgccaagaccgttcccaaccgcggcctgtatctggacatcgtggagatctatgacaaggttgtcaaggacgacaagtatcagtatccctccacccccagcgagtcccatatgttcgctctgcaggaagagctgacctacatgctggaagtggaaggcctggagaagcgctatgcccgtcatctggagatggccgagttcatccgcgcctgggctaagaagtacttcgccctcttctccgatgagagatacctgagccccacactgaccaccatcaagaacacccgcggcatcagcgtggccgacctgaacaagaagctgggcgagaagggcatcgagatctccaacggctacggcgatctgaaggaaaagaccttccgtatttcccatatggctgacatgaccatggacgacatgaagctggtcacctccgccatcgaagaggttctgggcctctaagccacagggcaccacaataaaaaacaatatgcggaaagcaagtggcgaatgttctgcgttcgccacttgctccatccgccccgatgaaaaaggagaatgcaattatgatccgtgtactcgcttccgatgggatgaacaaagcggctgctgccgatctgcgcgccaagggttatgaagttgtagagcagttctatgagcccgaagacctgaagcgcgaactggccaactatgatgtgctggtcgttcgttctgccaccaaggttcgtgagcccatcatcgatgctgctgtggaagccggccgtctgaagctggtcattcgcggtggtgttggcgtggacaacatcgatgtgaagtacgccgagagcaagggcctgaaggtcaccaacacccccaaggcttcttccgactctgtggctgagctggctctgggccatatgctggccatggctcgctatatcagcattgccaatgtgaccatgcgggaaggcaagtgggaaaagaaaaagtatgaaggtgtggagctggctggcaagaccctgggcctcatcggcatgggccgtatctcccagtctatcgcccgcaaggctaccgctctgggcatgaaggtcatgtacaccgacatctttgagatcaagggcctgcctgaagagtatgtgtgcgccactcaggaagaagtgctgaagaatgctgacttcgtctccctgcacatccccgctgccaaggacggcaagcctgtgatcactgccgagcatctggctatgatgaagcccaccgctttcatcgtcaacaccgctcgcggcggcctgatcgacgaggatgctctggtggatgctctggagcaggacaagctggccggcgccgctctggatgtgtttgccaaggagcccctgcagaacgagcgcgtcatgaactgccccaagatctccctgaccccccatatcggcggttccaccaaggaagcccagggccgcattggccaggagatcgttgagatcatcgagaatttctttaacaaataaggagagtacaaaatggcagtcgtaagacccttccgggcgatccgtcccaccagcgaactggctgacaaagtggcggccctgccctatgatgtaatgaacagcgaggaagcccgccagatggtggtggggaacccctattccttcctccatgtggacaaggcggagatcgaccttcctccctccatcgaccactatgacaaaaaggtctatgaaaaggcccgtgacaatctgaacaagatgatcaccgacggcgtctatatccaggacgagaagccctgcttctacctgtacaagcaggtgatgaacggccgtcctcaggtgggtatcgtgggctgcgcttccatcgacgattacatgaacaatgtgatcaaaaagcatgagctcacccgtgccgacaaggaagaggaccgggtcaaccatgtggactactgcaatgccaacaccggccccattttcctgacctacaaggccagaggcgccatcaatgccattgtggaaaagaccatggctcaggctcctgtgtatgacttcgtttccgacggcgtgcagaacaccgtttgggtcatcaccgatgaagccgacatcgagaccatcggcaaggagtttgtggcagccggcgacctgtatatcgctgacggccatcaccgctgcgcttctgcggcccgcgtgggcaagatgcgccgggagcagaacccgggctacaccggcgaggaagagttcaactacttcctggctgtgctcttccccgatgagcagctgtatatcatggactacaaccgggttgtcaaggatctgaacggcctgagtgacgaagagttcatggagaagatgaagggcatgttccacatcaaggagtattgcggcgaaggccagtaccggcccgagagcaagcacacctttggcatgtacctgaacgacaagtggtatatcctcaccgctcatggcgatatctatgatcccaacgatcctgtggatcagctggatgtttccatcctccagaagaatgttctcgatcccctgctgggcatcaaggacccccgtaccgacagccgcatcgacttcatcggcggcatccgcggtctgggcgagctggagaagagagtccacgagggcatgaaggtggccttcgctatgtatcccacctccatcgaggagctgatcaacatcgccgacgctggcaagatcatgcctcccaagtccacttggtttgagcccaagctgatgagcggcctgttcgtccaccagctgtaaaaagaaattatttccctcaagggaaatcaaaactcccgcctggaaacaggcgggagtttttgcgtttcgttgacaagatgatttttcttgtgataggatgaagaaaaaaagagaggggggagggcgtgaaaatactgcaaacaacgaaagaggatttttatgatgatagaaatgaacgaagcataccgctccctggtggtgcgggatgtggaagaggaatgggccggccccttggtggtgaccagaggacaggtttatgatacccggcattgtcccgggctgattgcggtggaagagggaaagctgacaggctatctgctctatctgcctaaaaacgaagaatgggagatcctggtgctccacgccttggagaaaaatcgaggcatcggcactgctttgattgacgcattggccgaaaaaatgaaggcagccggagggaagagactttcggtggtgaccaccaatgacaacattccggccattctcttttatcagcgccggggattttctctgggtgaagtgggattcaacgctttggaagagacgcgaaagatcaagcccggtgtgcctgaaatcggatgggaagggattcgcctttcccatgagctggtgtttttccgatctttgtaagtatacaaaaaaaggacgcctcaggcgtcctttttttgtcgttttctggcatacagacggcaaagaagatatcgggccaggaaggcagccgctgtgccaagaaggatgccgcccagaacatcggaaggataatggacataaaggtaaaggcgggagaaggccatcagagcggtaaagatacaggcgatgattcccgcctttttgtgataaaacagcaaactcactgccacggctgtggcgccgaaggtatgaccggaagggaaggaaaaatcccccagccggggcaccagaagctgtgtaaatccgttggcttcatagggccggatccggccgatcaatggctttaaggtcaaattgcctgccagaaggcagaaaatcaaggccaaagcggcgtttcggccggcacggagggttttgggaaagcaaagaagcagggcggccaccagaatataaaaccagccgccgtttcctaaaatcgtaaaccgagggaaaaaccagtccagaaaatcacagcggagatgctgtatggcattcaaaatgccgttatccagagaaagaagaaaatccatgtccgcctcttaaaacagttggatggcgcccagcagaccataggaagccactgtcataatgactccggcggcaaagacgccggcaataatggcaggcagggcataccgcatttttatgtccagaagagcggcgatcaaagagccggaccaggccccggtgccgggcaggggaacggctacaaacagaaacaggcccacggcagaatatttctgcacggtcaccttgtcggcttttttcatcagccgatcctccactttttgtgtgaagccggcaagcagacgagtggttttcagccaggtgaaaatgggccgggccagcagaatcaggaagggcacgggaaaaatgttccccaggaaggagaccaaaaaggcatgctgccaggggatccccatggcggcgccaaagatgatagagccgcgcaattcgatgaaggggatcatggaaatgatgaaaagtgcaaagtccttgccgccaaacaggaaaaagtcaaaaatccgctgaatgatctgatccacagtgtctctcctttaaaagtcgtgatgaggacccgctcaaggggtcgaatacaatcattatatcggatagctggagtcgattcaactgggaataaaaaatttacaatcttttgatcctgggatttctttcgaagattgcaagagcagtggaagaatgttatactaatgtattatgataaaattatgattaagcctcagcggctgtttcggaaaggaatcttgtttatgagtgattttgtgttgagttgctgctccacagtggatctttctatggagcacctgaagagccgggatattcagtatatctgctttcactattccctgaatggacaaagctatcccgatgatctggggcagaccattccttttgaccgtttctatcaggccatggccgatggggcggagaccaaaacatcccagatcaatgccgaggaatatgtggcctatttcactcctttcctggaagcgggaaaggatatccttcatgtgacgctgtcttcgggaatttcgggcaccatcaattccgcccatgtggcgcagcaggagctggcggaagaatttccggagcggaagatctttattgtggattccctgggagcctcttctggctacggccttttgatggatagattggccgatttgcgggatcagggcatgggagtggaagcactggcccagtgggccgaggaaaaccgtctgaatgtgcaccattggtttttctccacagacctcagtttttatgtcaagggcggccggatctccaaggcttccggctggttcggtacactgctcaacatttgtccgctgctgaatatggacaatcagggacgcttggtcccccgcttcaagatccggggaaaaaatgccgttatccgtgaaattgaaaagaagatggaagagtttgctcagaatgggaagaattatgatggcaaatgctatatctcccaatcggcttgctatgaggatgctcgggcggtagccgatctggtggagcagaatttcccccatctcaatggaaaagtggagatcaacagcatcggcacgaccatcggcagtcataccggccccggcacagtggccctctttttctgggggagcaaaagggaaaattagtatgtttatttggaaagcccgcctggctctggcgggcttttactgtttattggtgcctttaggcttaataaaacccctggttctaccaggggtaaataaaatac

SEQ ID NO: 774 - DNA, 23591 bp, Unknown
  16S sequences of unknown bacteria
cagccgtacttctcggaggacttctatccgctgacagaagtctcggacaaggaggacgtctggtcggcggcgcagttcaacagaccggaaaaaggcgacggcatagttcaggttttcagacgcgacgcggctccgtacactgagtgcgagtttacgctcagaggacttgaaaatgacaagacctatatcttcaccgacgccgacacggacgagacgaccgaacagaagggcggagaagctctcagggcacggatgccggagaagcatttggcgaagatattcttctacagagtgaaataaaatccataaaaatcgaaaggtggtacactaatgacaaagaaaacgctttcattgattcttgcggcgctccttatggcacaggttcttgtcggatgtggaaatagcaacggcgatactaccacttccgctgacacaagcggagccactacagaagagacgattctggatgaaccgaataagaaaaacggtctctggtacgcagattatcttccggagaaggactacgaagggtatacgttcagggttctgacgatggaccagttcccgaccgacgtcaccgaggaagacggagataccgtcaatgacgcctattacaagcggaacagcatcatcgagagccggtacaacatcaactttgagcagacttcatatatgaactactgggagacgaccgaggcgttcaagaagagcgccttcgcgcagagcgacgacttcgatctgtgccgtctgattcagcgcgacgctttcgccgtggcgctcgagggtcttgccgctacgccggatatgctgccttatatcgatatgacgaagccttggtatattcaatatctgaatgaggctctgacgattgacggtcaggcgatactcgcgtacagtgacgagtgcgagcacgcgatgacgagcgttcaggcggtgttcttcaataaaaaaatacttgacgacctcggacttgaatcaccgtatacgctggtcagggatgggacatggacgtatgacaagctgttcggttacgccgagaaagcagttagcgatctcaacggcgacggcgagttcaagctgaatgaggacagattcggattcatcggtgagctcgatatgtttctcccgagcgtctgggtttcctccgacgtcaagactgtagaaaaagacaataaagatattccttacttcgcggcgaatggaaacgaaaaattctattcgatcgtgaagcaggtcaacagctttgtaaatacaaaggggaatttcctcaacacgttcaaggcgatcaaggcggctgaagagtcgcgcatcacaggaagagaatcctttgccaacggatactcgctgttcaagatgatggacttcggattttgtctcgatcttcgcgaaatggagaatgacttcggtatcgtcccgcttccgaagtatgacgaaaagcaaaccgagtatttttcgagaatactcgacgcgtggacaaatgtcgctctctcttgcgcgacagaccttgagagaacaagcattatccttgaagctctcgcggtcgaatcgaagaactatgtcattcccgcgatctacgaaaacgcgataacacagaagggaatacgcgacgaagattccctcgagatgctcgagataatccagaaaaacagaactctcgacctaggagacaccgtctggcaggctgacatcaggaacaagtattatgaaatggtcatggcaaacaaagacaacgtcgcgtcccagaccgaaaaaatcgtaaagaaagcagacaaaatcatctccgacgctctcgagcaggtcgaagcattaaaatcccgcggatagaaaggcacccctcttgatcaactacttcctcctattaatctccgtcctcttaatgtccggaatgttcgccctgaacaagctctggcagaaatccaacggggcggggataaagacctcgctgttgtacactgcgctgaccggtttattcgtcagcgtcatcttcttcgccgtcggcgggggcagggttcagataacgccgttctcgctcgtctgcgcggcggcggtcgcgggactctgtctcgggtataacctcatcggcttcaaggtcttctccatcggcagctactcggtctacatgatgttcctgatgctcggcgggatgctcctgccgttcatctacggaatgctctttctcggcgacgcggatggagcgggaatagtcagtctcgcggcgcgattcaccggtgtcgccctgctgaccatctcgctcgtcctcccctgcctcggcgaaaaaaaggacaaaaagaacagcagactatttatcattctctgcgtcaccgtcttcatcctcaacggcttcgtctcgatcacctcgaaaatccaccagatcgagacagtcagacaaaccgtcgacgcgacaagcttcgttgtcctcaccaacggaataaacggcatcgccagcgccgtcaccctgttctttctgtgcctgagagacaaaaagccgcccgaactcgcgaaggattttcccgtctggaaagtcatcctcatgccgctcgtctgcggcgcgctcaacggctcgtcctacctctgtcagcttatcgcggcggcgtcggatatgccggcgtcggtgcagtacccgatgattaccggcgggacagtcatcctgtcggctgctgtcgggagggtgttcttcggggagaggcagagcaaactctcgctcgcgggaactctgctcgcgttcgcggccacatttcttttccttctctgacaaaaatgccggaggtcgtctgacctccggtgattttttattcggctgtgagaagcttcaccggtccgagaagcccggacggcggtatctgcatatatgtcgagaagtgatccttcacgcggttcgcgagggtgttcgagacgatgaccacgagttcgttttcgccctcacgcacgtaatcggtgatgtcatacgagtacggagccgtcacgcggtcgccgatgagctttccgttcacataaacccgcgcggtctctccgactcttccgagatcgaggcgcagacggcggtttccggtcacgctgaacgtcgtctcgtacttcatctttccggagaagtccggcatttcgtcgggagcggtgatgttttttagcttcgacgttcttttgtacgacctgaaatcatcgagattgtcagactccgcgagagatatgtcatactcgccgtcgagtgtttttatctcgtgccactttgtctcggacgggagctcgctttcaagctcagggtcaaagacgacaatccgcgattctccgggctcgagggttatccttatgtccccgttctcgctctctccggcgaagttgttgtcaccgagcaggtcgagcgacacgtactttccggaaatcccggtcgagactaccgtgtctgttctctttgcggccgactcgttgaagaacatgaagacgtccgcctttccgcgctttgtgtggaacacgcggaggagctcgtggtcgccggtgagcgaaatatcatacagaccctcggcgcgcatctccgagttcagcctgtcgagcggcacgacgtcgcagatgagatccttcgggcagtcgtccggctttttgtcgatgaaccagacgcggagcccttcgtccgcgagtcttctcgcctgcgtgtagaacgcgtccggaaggagcgcggcgtacgggacgataagacagccgaaggacacgccgtttatgaccattctttcgttctcgaccgtcgctttttcgagataatctatcgggacaatgtcgaaatcgagctgatcgtcatagagcacctttgccggcgcctccgtcagcatatatctgttcttgtgattaatgaagtcgcagttcatccactccgcctcggcgtggtagagtatcgcggcgtctgcaatgtgcgttccgccaaagagcaggtgtgtctccttgttgagggcgcgcatcagatgcctgaacccgtcgaactgcgggtcgtgtccctccgcgccgaagtgcggcgggcagtccgggttcgggtagaccgggctgaacgcgtgcggtacgaaatggttcactccgcgcacgagcaggaaatcggtcagccacttcatgacactgacgctttccgcccagccgtaagcgccgaagacctcgcacatcgctctgcccttcatctgcgggtcgagctcaccgagcgacgcggcgagcttcgcgagtacatagttgtagaagactccactgcactcgttaccggcgcttgacgcggtgtggtcgacgctctccattcccggtatgacctgatgaaggacaatgtcgacgccgcccatgtcctgcccctcgagcgagcggaaatagtgaccgccgctgtgtccgagtctggcgtgcgagttctgatcctcgattatgtggcctatatacagaacgccgtgcgcgcggcaccagttgccgagcttgaaggagaatctctcgcgccagagccttgtcaccgcgttcatgtacgcgaggcgcaccttcggcgcgaagctttccatcgggaaccagagcgacgccagatacggcttcgggttatatccgagctctttttccatcattctgagcacgtcctcatgccacggcagggcgagcgcggggagaccgaccgtctttatgtagaacccgaaatcattcgtgtgatcaccggaaaaaacgtttccgaaattcggctcgtcagagaagaagcccgcgagagtgttcccgaaatacctcgcgtaacgctgatagtgcggctcgtagaccgcctcgatcatgacgtcggtcgactcgtccgagagcatatccacatactcggcgttgccgattccggagcgggacttccatatcgtgaacacgcggtggacgccctccggtatgtcgagatagagatagtctcccctgattccggatgaaacgtcgaccggctcgccggaaagcgtttcttcgaactcttcacgggcgtacatatacgcgccgatcaggatgttgtccgcgtcctccttccggcggagaagtatcgacgcgtcggacatcggtcccactacgtcgaggtgctcctcgacaatcgcccaccggcgtctctccgggtatttttcctttatcatgccgttcgcgtgaccggtcgggaagtggtcgtcgtcgaggacccagaccttcatcccgcgcttctcgcactcgtcgaggatgatgtccatatccgcccaccagccgtccttcgcgaactccttgtgcggtctcgactcgacgcacagcgcgccgacgccgcaggaggcgatctcggctatctgctcccgcagcttgtcccggtggttcccgagctgccagtagaacggcagaatgtaattgtccggcatgccgcgaagcacgtcggagaggttcttgtccatagtatttcctccagacataaatatcgatactaacattatacaccataacgacatatttttcaagagacaatattgcggaaatccttgcattattttgacatatggtgtataatataaagtgtaaaaggcggaaaaaggaaaggagcggcatgatgaagactgatgagctgcgtgaatacatgatgaagtacactccgctcgagatcgcgtggctgaacggaatgcccggctcgctcgccgagcagagatttgaccggtgtgacaatgaatacgtcaatcactgggacgacgcgtggggtgacatcatgttccagcggcactcgagattctcggcgcacaaatatcactcgcacgagtttttcgagataatgttcatgttcatcggcagcggtgagaacttcatcgaggagaagtcggagaagctgcgcgagggcgacgtctgcgtgatcactccgggcgtgttccatctgccttacgtgccgggggacagcgtgcttgtcaacttctgcgtcagggagggattcgttcaggagttcttccggcattttcacggtggggacgcggtcgatttcttcagagccgaccccgccggggaacagcacaaatacatgataatccgcggctgcccggagatatgcgaggcgggcgcgcggctcatctcggcgttcacagaaaacgagtggcaagacgcgcagtcggagcagacggcgtatctcgcggtatttcttacgaccctcgcgaagttttccggcggacggacaattctctcgaccgagaccttcagaccggacgacctcgcgccgaccctcatttcccggatacagaacgaatatatgacgatatccctcgatgcgctcgcgggtgagtacgggtattcgaaatcccacatctgccgcctcatccgccgcgcgagcggtacgaccttcaccgagatggtgaaccggctgagggtgcgcgaggcgtgccggctcatcgattccgggatgagatgcgacgaggcggcggagaaatgcggcttctcggacgccgcgtacttcgcgcggacgttcagaaaatacatgggcatggcgccaggcgagttccggcaccgcggcgaccaccccgatgctgagaagcacgcgcgcactatatataataatgaaggaaactcacacgaaggatgggaaaaggatggacgataaagagatgaaaaacctcgagcgctcgcttgacggcgtcgggaaatacctcgggcggatagagaaactctttggtctgcacgtgtcggttcacacgccgaacgtctaccttgtcacctaccttgagagcttttacaagtacaactgtcatcttctgccgtactgtatgctgataaagtcggacaggaaacgctggaagcgctgcatggcgtgtcagcggatggtcacggcgaaattctgtgggctcggcgacaaggggcgggacgggttcttcgggcggtgcttcttcggcgtagaggagttcgttctcccggtgctgtctgacggaaaagctgtaggtttcgtcagcgtgaccggatactcgaccgaccgcgaaaagacgcggaagacggcgggacggctcatcgaaagctttccggacggatatgacgaggcgctcgcggggctctcggacaggcttcccgacccggagctgctgcgcgacctgctgactcctgccgccgacctcatcggaagcttccatttcatccccgagcttcgcggctccgggaactacacctaccgcttgatggtcgccgaaatcgaggcgtgctacaatgaacgtctgagtgtcgcgaggatagcgaagagcgttaattgcagcgagtcgtatataaaccatatcttcaagaaaaagagcggtatgtcggtcagctcatatataaacacagtccgtgtgcggcacgcgaaggagcttctgacctcagcggacgagcctgtaagcgccgtggcgttcgcggtcgggtacagcgacgcgaactacttctcggacgtcttccggaaaatcgtcggtatgacgccgacctcatacaggaatatgtacaggagaagaaagcacgacgactgacttttgctgaatttcaaagatgacgtgccggaaaatcaagacaatgttaataaaatccgcggtgaatgaaaataaatcgcgatttctcttgacaatacaggcatccggcgctatactatatatatgaatattccatgaaaggaagggcggaaacggtatttccggttgggaacacgaaaattctgcacaatgataaaatgatacacaagagtgagattacaggctttgaaacgatacgtcacgaggcggacctctgtattgtcggcgcgggcgcggcggggatgttcgcggcggtcgctgcggcgagacacggcgctaaggtcgtactgatgaacgaccgcccggtcgtcggcggaaacgcttccggagagataaggatgtggatacgcggcgcgcacggaaggaacaaccacgagagcggcattgtcgaggagctggcgctgatgaatctcagacgaaacccgacgctcaacttctcgatctgggacagcgttacatatgagctgatcaagaacgagccgaacatcgacctgatactcaactgctcctgtctcgcctgtgagatggacgggaaccgcgtgaagtcggtgaccggctggcagacgacgacgcagaagttccacaccgtgacggcgaagatcttcgcggactgctccggagacagcgtcctcgcgcctatcaccggcgcggagttcaggatggggcgggagtcccgcgacgagttcggcgaggacatcgcgccggtcgtgtcggatgaccacacgatgggtatgtcctgtcttcttcaggtaagggagaccgaccgcgagataccgttcaaggctccggactgggcggtgaagttcaccgacgagacaatcggtcaccgcgtgaatatcaacaacccgaagcagttcgtgaacgataacttctggtggatagagctcggcggcatggacgacgctatcggggacaccgagaagctgcgcgacaggctgcttccgataaccttcggcgtctgggattactacaagaattccgagcggttcgactcgaagaactgggagctcgagtgggtcggtttcctgcccggaaagcgcgagagccgcaggtatgtcggcgcgcatatcctgacccagaacgaggtcagggacggcgggcgtttcgacgaccttatcgcttacggcggatggtctatggacgaccatcacccggcggggttcgacacgaccgaggcgccgactatcttccatccggctccttcgccgttcgggataccttacaggtgcctgtattcgaagaacatagagaatctgatgttctccgggcggaatatttcctgtacgcatacggctatgtcctcctgccgcgtcatggctacctgcgcgacgctcgggcaggctatgggaaccgcggcggctatcgcgctcagagagggcatcgacccggcggggggttacgagaagggatttgtcggtgagctcagacagacgctgatggaggacgactgctacctgccgttcacgcaccgggcgctgactccggtgatggagggaataacggctgaggtcggcggggaggacgcttctgtgctgtacgacggttttgaccgcgggaacggggaggaggagcatctgctcgagactccgttcggctcggagattgtcgtttcgctcccggagagcagagaggtgaaatcggtcgggtttgtgttcgacagcgacataaatggagagcactacctcggaaagaaccgcccgaacgggatggacagatacccgatgaggtgcaacacgaggaggggcgaggatctcgtcggtctgccgtcgacgctcgtgaaggatttcagactgtacgccgacgagggcgacggagagttccggctgatcgcggaagtgaaggataactacaagcgtctctggagatacgaagaaccgctcagagtgaagcgcctgaagctcgtaccggagagcgcgtacggggctgaaaaggcgagggttttctcggtgattctcaaataattgcacaaagaccgttttgtgaaaagcggtctttttgtgttaagtatttggcgatggtgaacaaaaaagtgatatgtgaattagatgatatgtcaattgacaagtcgttgaagatggtgtataatataaacaaggacgatggatcgaggtcgatggtgatgacgaccacggctgagatcgtcgtaattcgggcaggagaaaaagcgcgcgttctcctgactggtcggcaattcgaacaatcgatgtagcaaaatggaggatcttatgaaaaaaagattactttccctcgcgcttatccttgtccttaccctgatatgtggggtacagatcgccgctgactcggcggagacacgactgatgtgtaaacacgttttctcattggcattggtcggagaagaagagcaggacaccacgccgcacaacggatgccactactgggtttataaccgtgaagtttttacgtgcactctttgcggttactcctatgaaggagagcggtcatacgttggcgaggtatggcaccacgttgttccggaagggcaaactcggtgcatatattgctggggtgtaccgtctaagagctgatctgccgaattaatcacgggctgtcgcacaatggcgcggcagccctgaatatatgaggttatatatgagaataaaactatttgccgctttgtttattggtataatgatattatccgtttttccacaggtttcttgttctcagaaaacagagcgtgaaaaaccgatatactattacacagcagattttatcgacgcggatgaaaaaataaggtctgttgtaagaaaaagcgatactgtatttgaagaaatgttgaatgtggggcgatttaacaattccggaatatggtatgtcagaactcttacacagtcaatcgacatttcgcccatggcactgctcatgtatgattacaagagcggaaatatgtcaagaaccgaattcaaaatacgtatgccggagagcggaattgaagctcatgccgggtctggtgacgtcgtttttctcggaacacttgacgatggaacatatgtttgcattcagaaatcacttcaacggcactatgatggggaagcgatcaatgttgatacgtctgtaaattatccatataaccattggtatctgacaaactacgacagcaacggaataatgacatactcgaaacttctgtatgacatagacgagactatcggcggcgcggatgtgaacctttattatggtaatatgcttttctcttctgataaaacgatatatttgtatatagcggattacagcggcagaggagacgcgtatatcgttgctatgaccccgacgggagaagtgaagagctcggtgtccctgaaagacgcctgcccggcatacgcggcgggaaatctgaatttcgattctgtcagagaagacatggacggcaatatctgcgctgtattctgcggcacggatatcgaatatggtttcagccgctacgagttctgccgttacgatgaccttgtgaacggcaaggaatacaagccgacgaagttcaatcaggacttcggattcggactacttaccgctttctctgaaaaagaggcgtatttcgacacagtatatggtctgaatcgtgagactgtcggcgaagagggctatgatcagatactgaactggcttgatatagatattaccggcgctttctctatgaatatctatttcgagtcgctggacagatttgtgctgacttatattgacgagtacacatttgaatcctatttcataatagtaacccgcacggaagagccctacgaatcccagcgcgacgtcataacaatagcctacaatgaatcaaaaacaaacgacacccgcgcgaaggcgacgcggaatctgctcaatatcgtgagccgcttcaaccgcacaagcgacgactatcgaatcaagctcatcccgtactcatccgatgatgtatcaacggcgaacgataagctctaccgagacataatctcaggcgagatgccggatatggttttgttcggtggttcgatcacggctgacccgttcctgaaaaccggcgcgttcatggatttgtataagttcatggataaggacgagacatacacgcgagacgcgttcctgccgtgcgttctcgagccgttcgaggtgaagggaaaacttccttatatcgtgacgaatttcagctttgagacattagccggtctgactgatgtcataggagacaagacttcatggacggtcgacgagttcgctgaactggtcgattccctcgaaaacgggcagtacctgatgaaggttgattcagcttccgacccgcagtatgagctgttcaaaacgatacttccctatatcgtcagcgactacgttgattacaataaagagaagtgcgatttcgggaaggaattcaaaaaactcctcgagacctgtaagcgtgctcctgtgaaggcggtcgacggatacctcgcgactgagaattatctcgacggtgacgttgttctcgggaagatatcgctcggtgagacgagtggatatatggacgaccggttcgcgatgttcggggataaggacataacaatgatcggagctccgacgaaaaaggggagtggtacggcgctgatgtatgatcttgcgttctcgataacgaaggactgcgcgttccctgaaggagcttgggaattcatcaagtactatatctccgccggacccggacagtgggagaatttcatcgaaatgccgcagacggtgtatttcgcggacgggttcattccgacgaaggagacggaagaggagatgttcacggtgctcgacacgatggtgttctacttcaacacgacgccgacaaggcttgacaacggggacgagggaatatctctcagcagatggatcggaacgaagatcagcacgaacgagctgacacggcatatacaggacagagccaatgggatgaacaactactatcacaaacagcttggatatgtcccggtatacttcagcgagaatgacgcggagcagctgcgggcgatgtttgacgactgccggaaggtcgcgtcgaaggacaacgccgtgctgtcaataatcctcgaggaggcgtcagcttatttctccggggtgagaaatattgacgataccgtgaagttcattactgacagggttaatacgaggatacatgaatgaaaattatgcgcgttttcggaagaatactcataatggtcatcgccgttgtggcgctggctcttgtctcctgcggtcaggagccgaatgaggagtacggatatatctacgaagacgcgcagatttcacttaatgacggggaaaatataatagactggggagcaggcaccgccgcgtcgtcatgggatcgcggtatggtcgtcttcacctcgtccggactcggtgttttcgggatacgctctgtcgatgggagtgtgaatatcgtttttaacgatggcgggcggagatactacactttcgataatacagccgccgcgccggacggcgggtatgtctgcacagccgaaatactatcatccaaaggggatgaatgcgaccttatccggatttcgccggacggcgagctgagcgttattgacacgagcggctttgacgccggggacatcatgtcgacggctttctccggcggcgggacgctgtacctgtacgttgacgacgggtacgaggggaagatcattgtttacgacgataaaatgacattatcgaacacgctcgatatgccgtccgatcatgtccgcgcgaaaaacacgaaaacagcgtacctcagccgcggcgcagacgacacggtgctgctcttctaccagacgagagattccgaaaaccagcttatatggggcgaaatccggcttgacgacaagagcggcgagctcagtgagccgataactctgccgcagggtacgaatactccgcttatcgctcccagacacgatttttacagcaagaacctcatgggtctgtcggcagccgacatcaccggcggcgagacaaggagcgagctgctgttcgcgtggagcgacctcggtctgatctccgactatatcaggaatatagtggtcaggtcggaagagcagatgtttatacggcatatcgacacgctgactggcgagatcgtttacggggtcataaaccgcgttccggcgtccttctttgacgggatgcgcgacattgtgatagcttatgacaccgacacgtcgaacgccgacatacggcagatgacgcattacgccgcgagattcaaccgggacaacaccgaccgtcgggtcagattcaagggctataccggcgccggtctcagcgcggcggcgctcatcgcgaaggatatctccgaggggaacgctccggatataattcttttcagtgatgtgatgccgtacacgatgttttccggttcggacactctggcggatctttatcggttcatcgacgccgacccggagcttggacgggaggatttcatcccggcggcggtcgagcccttttcggacaacgggaagctttgcgcgctgacgctcagcttttcgctgcggacgctgataacgcgcgaggaatcaggcgccgttccgggtcagtcggtcgcgcggtttatcgatactgtcgaaaacaacggcggtgcgctgacggcgctttcacctgacgccgacatgaagcttcagttccttggaaggcttgtccccgcggtcatatctgaatatatcgacaatgacgcgaaggagtgcgatttttccggcttcggggcaattcttgagcttatcgggaacgccgacatcgctgatgcgaacggaaccgatatccgtgactacacgaacgggcgggttctgttcaacagcgccgatataacgaccatcggggagtttattgccgtgaagtatatggttttcggcgggaatccggtgtttgccggttatccgaacgccgggacgatggcgctcgcgtcgtttcagctcgcggtgaccggaagcggcggagacccggagggcgcgtggagctttataaaagcctgcgtcgggtatcagaaagacaagatttcgtcgataaaaaatcaggtcgatatcgtttttctgaagggattcccgtgcacatacgacgcgctcgatatactgttcgacaagatgtccgagtggtatgtcctgctgtacaccaatgaaaaaaaggacgcgaagaccgggcaggaaatcgaggcagcggtatcctcgtatatcgggaaaacctacaccgacgccgaaggaaatgtcaatgagatggagaagagggacgactatttcgacgtgacggaagaggacatcgcggagctgcgggagctgatctccgggtgccatgtgtcgaccgggtgcgacgacgccgtgttgtcaataatcctcgaggaagcgtcagcttatttctcgggggcgagaaatattgaggatactgtgaggtttattacggatagggttaatacgaggatacacgaatgaattgccgcccgatatgaaaaaacaggagaccgccatataaaacggtttcctgttactttttatctgtcgatttccctgagcaccctcatctgttccgggtcaagtcttccggtcggggatacccagacgtcgattgtcacgacgccgccgttcgtgttcgcgcaggacacgaaatctcgcatatattttccgtcatgcttcgaacccttctgtccccacgcgttccattcaattccgtcgggcgcggctccgagcggcgcgagcatgaacgcctgcgctccgccgttcttctccctgtcgatgaacctctcgcgcgggatgacgtagaaatcgttgaactcgccgcaggtgatctcctcgcccgagaaatgcttcgcgtaatacggcttcacgccgttgttgtagccggcgacggcgtccggattgcccttcttgatcgcgcggtggtatatcgagagcagctcgtcgtcatatttgaagaaatcatagcagccgtccatccaccagcccttgacggcgtccttgtacctcacggcgtactcctcgagcacggcagcccatttttcgacgaaatcacgcgtgacgcctttttcgcgcggctcgatgaagccgaagcggcaaccgacgtcctcgttcttgtacggtccgtctccggtgaaatagaggtacaggtcgatattatacttcgcgagctcgtccgcgagctcagctatgacgtcgcgcgacgcgcaggcgtctcccggagccgttccgccgatctcgtcaaaggtccggttcggcgcgatcatgtacttgaagccctgcatcagggtgatgaaatagaagtgcgcgccgctgtcgcggatgtcctccgcgagccgcttcacgtcgatacccttcacgcagtcgtcccacgacgccgcgccggatatctcaaatttgttgccccagagatagtgattgaatattccccagcgggaatcgtgtatgcggtcggtgatgtgcatgatatatctccttttccttgtcggaattgtatgaacagattataccacagatcagcgcgcctgtcaattgaaaaaacaataaaaatatggatttttcggcatacctattgcattttttgtgatttgatggtatactgttgttatatcataaacagctcggatacgaacctgcatacttcagcgagagtgacgtgtcgaaggacggcgtcctgctgtcgataatcctcgaggaagcgtcagtttatttctccggggtgagaaatattgacgataccgtaaagttcattactgacagagttaataccaggatacatgaataattgaaaaagaccgttcgggatggacggtcttttttcgcggtataatggatttgaaactgacttctcagatggcatataaccccacatccgcgatttgtactttatccacaaaaaaaccatcccgatttgtcgatgaagccaattgacaattccagccaaaatcggtataattgatgttgacaagtatcgggcgcgaattccgcccggcgaaaggcatggtcataaaaatgaaactgaaggaaaaggtggaaaaacgacttaacatcatcggaacacacgtgaacctgatcgacgctaatataaccgagatattcggaaagctcggatacgattttatctgggtggatcttgagcacacgagaatatcaatggatagtctgtatgagcatatactcgcggcaagatccacgggaacgccggtggtcgtgagagtccccgcggacgaccttacagtcacgaagcggactcttgaaatgggcgttgacgggatagttttcccgatggtgcgggacgcggagcacgccgagaaactgctttcatggacactatatccgccatacggagcgagaggctgcggaccgaagggcgccgtgagctatggtatggacagcgaaaaagagtattacggcaaaggacatcttgaaatgtgcagattcgtgcagatagagctgagaagcgcggctgaggacgccgaaagaatcgccgctctcccgtatcttgacggctgtgttcttggtatgcacgacctgtcaggctccatcggaaggctcggcgacatattctgtgaggaaaatctcgcactcgcggagcacgcgataaaggcgttcagcgcgagagaaaaaagcgtcggcgtatcgaccttcgcgaccgacgccgcgacgctcggaaagtataagaaaatggggataaacatgatatcgaccggagccgattacgaatacatcatccgaggcgcgagggcgacccttgatatcatgaaaaatgaagtcagattctgaaccggaggacactatgcgatacattgatctcacagacaaaacagaaaaccagatagcggttgaccgtgaggacggaatatacctcggtcatccgacgacagtccttcttgacgacggcaggacaatatatacggtctatccgaagggtcacggcgtcggtcagctcgtgatgaaaaggagcgacgacgcggggctcacgtggagcgaaaggctgccggttccggacagcttcagcacttccctcgagtgtccgaccatatacaaactgacagacagggacggcgttgaacgcctgttcatctttgcgggcaggtatccgttcaggagctccgtctcgacggacaacgggaagagctggtctgaattcagtccgatcgtggatttcggcgggtattttatgagtacaattgtcgaaaccgggaagggcgagtatctcgcgctctttcacgatgagggagcgttcatacatggcggcgacacccacagagtggaggtctacagagccggtgagggcgcggacgcgcgcacgcgccaacgcgagaaaaagctctccgacgacggcaggacatggatcaggacttcggcgtggaaccttgacgtttccgagaatcccgaaagggagggcgacatatggagaaaggtgtatgagacctctcacggcgataccttcgcggacggtcactatgagctgtaccagataaggacaaccgacggcgggctcacgtggagcgagccagaaagaatctgcgcgacaaaggagccgacaaagctctgcgagccgtgcatgataaaatccccggacggaaagcgaatcgcggtgctgctccgtgagaattcccggaaaaaacagtcgatgttcgccgtgaccgacgacaacgggcagaactggtcggacgtgaaggagctgaacggcgtcctcaccggagacaggcactgcgcgaagtacttaagggacggcaggctgtttgtcagcttccgggacatgaatccggactcgccgtattatcggaactgggtcgcgtggataggctcgtttgacgacattttgcatggcagggacggagactgcaagctgaggctgaagaaaagctgcacgctcgattgcgcgtaccccggagttgaggtgcttgccgacgggacggtcgtcgcggtcacatacggacaatgggaagagaacgcgaagaattatatcctgtgcgtgaggataagcggggaagagatcaaagattattaaagaaacactgattaaggttgttttgcgggaaaaggttcagattcaagcctttttcccgcaataaatgattatcattccgccgtcgcggcgggttgattaacagccggcaaaagaatcacctggtgacgtttcttatccactttttcgatctgatatagagaagacagaacgtggatttgatgagttcatcgctcatgaggcaggcgtatacccaccagaccgggaatttgaggaagtgcgccgctatcgctccgagcgggattgagaacacccacatcgggacaaaatcgaatatcatagcggtctttgtgtctcctccgccgcgtatagcgccgacaatcgcggtcgtgttgaagctctttatgaagatgatgaccgacatcacgccgatgatattcaccgccgctgactttgtggagtcggcgatatcgaagagcccgaccgccgggacgcggacaagcagaacgaccccggacatgataagaccgagcagcgccgagagagcgagcattgttttcgcgtacgggtacgcgttttcgcttcgtcccgcgccgatctccttgcctatgattatctgtgtcgcgttagcgaaaccgatagctgagagcagcccgatcttctcgatgatgttggcaaccgtataggcggcgtaagccgcgtcgccgatgtgacctatgatgaccgagtggaaggttattccgagtccccacattgtctcattgaatatgaccggaaggctgtagcggatgaaatcgcttaacatggccttcttttttgcgttgtgggtgaacatgcgtctgaacccgagcttcacgcgcttgtcgaagaagacgacataaacgagcacgacaaggaactcgacaatcttcgcgatgagggtcgcgagcgccgcgccctcgatctccatgcgcgggaaaccgaacttaccgaagatcaggcagtagttgagcgcgatatttgtgatgattcctaccgcgttcgagccgagagcgatgccgacctgctcggtcgagcgcattactccgcagagaatcgaggtcattgaggcgatgacataggacgccagaacgatgcgcaggtacttgacgcccagactgatgacctcggcgctttttgtgaagagccccatcacctgaggtgtgaaggcgtagcagacgatggtgacgatacttccgacgataaccgccgcggtgagagctattccggttatcgagttgatggcgtcggtatcgcccttgccccagtactgcgcgatgagaaccgacataccggagaccattccgaacaggaagagcgagtagacgaagaagggctggttcgcgaagtttgccgccgagatcagtgcctccgagctgctgccgagtctgccgagcatgacggtatccatcatgttgagcagaagctgaaggacattctgaagggtcatcgggatggcgagcgacaggacaacgcggtagaatccgctgtcacggacgaatatctgggattttctggtttgcattttgtagtgaatactcctgagtttgacatttagatgattataacacgtcgcgcggaatttgtcaagagggatttccggagaatgcgctaaaaaactgactttcgcgtttcttatccccggtatccctcattccgcgggcggaatttattttttcgcggcgggaattttcgcggtagctattgcattttcgatcgtttgatggtatactgttgttatgaaaaaaatccgcgcggtccgtgcggaaaaagcatagtctgaagggaaagcaaatgaaaaacacaactctcacctacaacactcccgcggaagtctggaccgaggcgcttccgctcgggaacggcaggctcggcgcgatgatatacggcggcgtctcccgcgaggagatacgcttcaacgaggagaccttctggagcggctggcacgacgaggaggcggacaatcccgaatgccgcgctcatcttgacgaaatgcgctccctcctcttcgccgggaagatcaccgaagccgaaaagctcgccgaaaaatacctcgtctgccgcggcgacggcagcgggcacggaaaaggatacgagtccgcctacggcagctttgagaccgccggaagactgctcatcgactttgaggcaactgaagccgccggataccgccgcgcgctgaacctcgaaaagggcgaggcggacgttacctataccgcgggtggaaagttcacgagggaatatttcacctgcccggagccggactgctttgtcgggcggatctcgtgcacagagccgttttccgcgtcgtttgcgtatgagagaaaattcgcttcggtcgagtattcggacaatatgatactcatgaccgggcacttcaacaaaggactcgattacgcggtcggcgtgaagatcgtcacagacggaaagctgtcgggcgacggcgggaagataacggtcgccgacgcgcgcgaatgcctcgtctttgtctccgcgaagaccaactacgaaaaaaaggatatcatccccgcggaagaggtcgtgaaagtcatcggaagcgccgccgcggaaggtttcgcgaaactccggagaaaaacgcactcccacttctcgtcgctcctctcgagagccgtcatcgacctcggcgcggaagattacaagggaaacctcacgaccgcggagcgcattgacgcgctgaaaaacggcgacaaatccgaccttgccgctctcactgagctttatttccagttcgggcggtacctcatgatctcgtcgagctggaactgcgttctcccggcgaaccttcagggcgtctggtgcgaggacatcgacacgatctggtcggcggactaccacatcaacataaacatccagatgaactactggctcaccgagacgacgaaccttccagagtgcggcgacgcctttctccgatacataaaattcatctccgggtacggaaagaaaaccgcgaagacacagtacggctgtaacggctgggtcgcgcacactattaccaacccgtggggcttcaccgcgccgggagagggctgctcatggggcagcttcatgtgcgcgggagcgtggtgctgcgagcatatctgggagagatacctcttcgagggcgacagaaaattcctcgaggaatattaccctgtgatgaagggcgcggcggaattcttcctcgatttcctgaccgaggatccgaacaccggctgcctcgtcaccgcaccgtcgaactcacccgaaaaccactacaaagaccccgcgaccggcgaaacagtcgcaatctgcgccggaccgacgatggacaactcaatcctctatgaactcttcacgaacaccatctccgccgccggagtgcttgacaccgaccgtgatttcgccgaaaccctcagaaaaacccgcgaccgcctcccgccgattaaaatcggaaaacacggtcagatcatggaatggcaggaagactacgaggagaccgagccgggtcaccgccacctctcaatgctctacggtctccatccggcgtcactgatcacgaaatcaaagactcccgaccttttcagtgcctcaaaggtatcactctcacgccgtctctcgggcgggggcggtcacacgggctggagccgggcatggatcatcaacttctacgccagactcggcatgggcgacgaatgcctgaaacacatcggagctctccttgaaaaatccacctacccgaacctcttcgacgcgcatccgcccttccagatcgacggcaacttcggcgctcccgcgggtatagccgaaatgctcctccagagccacgacacgaacggcagaaccgcgcgcgtcgatcttatcccggctctcccgtcagcatggcataccggctccttcaggggtctccgcgcccgcggcggtctcaccgtctcggcagaatggaagaactcgaaactcacctccttctccataacaagcgacagaccggtaaaagtcgaagtcacctgcaaaggcgaatggctcctcgccgccgatatgggcgcgggggagatagttacgagaagtctataagtaaagccgggggaaaactttttccgcgaaaaagttttcccccggcaccccttttcaaaaaaggtttatacattttgacacgaactcagccgcagatcacgtcgagattgtgagagcgcagaagagacgcggcgtgctccatcgtgacggttgacggacgatccatctccggcatttcgtaggtcatgccgagcgagtcgtacttcgagcgggcgtagccgtggtaaggaaggagcttcaccctcgttatgcgaagcggttcgagcagagcgccgataccttcgattgtcgcgtcgtcgtcattatatccggggacgaacgggatgcgtatctcgatcgccgcgccggaatccgacaggaagcgcagattttcgataatcaggtcgttcggcacgcctgtgcagcggatgtgtccttcgcgcgttatgtgctttacgtcgaacaggaatttgtcgacatatggcaggagcgccttatatgtttctctcttcgcgaagccgcaggtgtcaagggcggtcgcgaggttttctttttttgccgcctgaaggagggcgagggcgaaggacggctgcattgtcggctcgccgccggagagggtcattccgccgccgcttgtttcgtagaagattttgtcttcgaggacgattttcaggacttcgtcgactgacatttttctgccgcagagtttgagggcgtcggagagacaggcggcggcgcatttgccgcaggttacgcatttttcacggtttatggtgtgtttcccggtcgttgggtcgattgagtgtgcgccggtggggcaggctttgacgcattcgccgcagaggacgcatttttcgttgtagaaggcgaggacggggctgaccgagagtccttcggggttgtggcaccagcggcagcggaggggacagcccttgagaaacacggtggtgcgtatcccgtccccgtcgtgaacggcgaagcgtttgatgtccatgacgattcctgtgtccgccggagttatagttttgttatacattctgacagcctttcgcggtctgtaatttgagccgcaaacattgatatatatttgtatgaaaaggtttgaggggaggtggggaggtgtcggaggggcggagg

SEQ ID NO: 775 - DNA, 32759 bp, Unknown
  16S sequences of unknown bacteria
catacgcaggcggagcgcctaacgcaacaagagcatgggtagcttcaaaaatagcttaatagagaaaactaaaagaggagacttgcgtctcctcttttttgtataaaacagtattgaaagatttttagtacttatagcgttttttacccttaataaagcagatagcggaaactataagagttgccgcttcggcgacggttacagacagccatattccgtcgataccgataaagataggcagaagcaggatagaagccgctaaaaatccgaatgttcttaagaacgatataagcgccgaaatcaatccgtttgaaaatgcggtaaacattgatgaagcaaatatattaaatccggctataaggaaatttaatgcaaataaatgccatccactgtttgttatctgccaaaccgttccgccttgttccgcaaatattccgattataggaagttttaatatcatgcttaaagcaaaccaaagaattgagttaaaaaatataaatacaaggcttatttttataagttttttcaaagacggtatgtcctgagcaccgtaattaaaactgattacaggagctatgccgttagaatatcccatgaaaacggcagacaggagaaactgtgcgtaaagggcaacggttattgcggctacgccgtcttcgccgataaatttcatcatcatgtagttaaaaagaaatgttgtaactccgtttgcaagattcgtaaccatttcggaagagccgtttgcgcatgtgaacaacaacattttaaaatcaagttcgggtttctcgaaataaagaaggctttttttgctcaaagcaaaataaaaaagtccgaatattgcaggtatagcataacctattgaagttgccaacgcagccccttttatacccatgtccaatacagccatgaacagatagtcaagaattatattggctatgcctccgatagatattaccgtaaggcccagcctcggctttcccgcagccgggaaaaagcagctgaaaagcatttgtaatacggcaaacggagcggcaagacaaagtataaaaagatagtcgatacaatattgatatattgcttcggttgctcctaatatcctaactatcgggtcaataaaaattacgcctataatagccgttactataccgactactattcccgtaagtataataagcgtaaattgacgtcttgctttatcaggcttgtcttcgccgaggttttttgctattattgcgcttcctcctgttccgagcattatggaaacgcctataagaaaactgattaccggaaaaacgatatttaccgctgaaagagcgtttgtaccgataatatttgaaataaatacaccgtcgaccatttggtatacggacataaacaccatcattattattgtaggcattgtaaatgatattacgtttttaaaggtaattttattgattaaagccattttcaagttctcctgtatataattccgtaaatttatttaatatctcacagaaatcacgaatttgatcatctgtgtacatgttgttcagtttacttactgttttttcaaatgctatgtcagaagtctcgtatagttttgccgctttcggagtcagcttgagatagtgaactcttttgtctgtttcgcttttaacgctctctatgagaccttgacgtatcatttcggcagatttagaagttacggcggactttgatacgttgagtatttccgcaagtttggacggagtacagtcgggggtgtatgcgataaggtccaaatataaaatactgttataggttatatcggaacatataactttactgccgagccgtttgtgttcgtttacggtcataatataataatacttatcaagagcttctttaagcatagacaatcacctcaaataaaaaaagttaagccaaattaattaatttggcttaactaaatatatcatatcattatttttatgtcaatctcttattgttcctcgtttagaataaaatctatagttctcatggcaatatcggttttttccacaatcacgcttactttatcccccaaactgtactttttacctgcatgctgaccgactacgcacatattagactcgtcatatatatagtagtcatccgcaagggaattgagcgcaacaagaccttctacggtatttgacagttcgacaaatattccccaacctgttacgcctgaaataatgccgtcgtatgtctcgccgatatgttttgacatatactgaacctgtttcaatctgtcggtttctctttccgcttcttccgccagacgttcacgcttggagctttgctcggatacttccgtaaggattttgttgtagtgttttatgcgcttgtcgtttaatttgccgtcaagattttcctttattattctgtgtatctgaaggtccggatagcggcgtatgggcgaagtaaaatggcagtaatatttagatgcaagtccgaaatgtcccagattttccggcatatattttgcctgtttcatacttcggagtactgtcctgcttattatatgttcttcgggttttccgcttacggcgtcaagaagttttgcaatatccttgggatgtacttcaccgtcgtttttgcctttaaacctatatccgaaattataaatgaatcttgaaagagtttttattttttcttcatccggagcttcgtgatttctatagacaaaaggaagttccagccagtaataatcttcggcaacggtttcgttgcatataagcataaattcttcgattatgcttgtggcaatgttgcgttcgtgcggctttatatcaataggttcgcctatttcgttaagaactatttcacattcgggaaggtcgaaattaacggagcctcttctttttcttttaataagaagcagatttctaagaccgagcatatcctcgaacatattgataaaaggagcgtattctttacgatagggtgaattttcgtctttaagaatatcgttgacgattttatatgtcatacgcatatccgaccttattacgcttttggatattttatggcttacaacgtcgcccttttgatttatttccatgacgcagctgagggcaagtctgtcaacattgggatttagagagcaaatgccgtttgacagcttatgcggaagcatggggattaccctgtccacaagataaatactcgttgctcttctgagagcttccttatcaaggggtgaattttccgttacatattctgttacatcggcaatatgaacgcccagttcataatttccgttatccagaacctttaccgacacagcgtcatcaaagtccttggaatcgtctccgtctattgtaaccgtaagtatattgcggtagtcgtctctgccgacggttgaattttcatcaatgacatcggggtctatggactctatttgcttttttacatcgtcgggaaaatctcccggtaattcaaactgctttattattgacatgatatctacgccgggatcgttaatatgtcctattatttccgtaactactccttcggcgcttgatttatctgtagctctttttgttatttttacgactactttgtgtccgcttaccgctccctttgttttgcctgcgggtatatagatgtctcttcctatttttttatcgtctggaattacaaagccgtaattttttactgcatcaaatgttccgacaatgccggaattaccgttttccattatttttataatttcgccttcagccctgaaaccatcgtggggacgctcgtttattttcacaagaaccttatccttgttcattgcgccgtttacgctgtcggacggtataaatatatcgttttccattccttctatacgaacaaaaccaaagccttttgcgtttcccgtaaatgttccgggataaatattaagattttcggcaggcattatttttcctttttttgtttcgactgctgaaccttcggaaataagcgaatctataacggaattgaacatattaatatcagctgccgggacatctaacattacagctaattcatgtcttttgagaggcaaataattttcgctgtttatatattcttttatacgttcttttcgtttaagtaacatttcatcaaattccataaaaacacctcctgtttatggtttaccttaaatatgatttttaaacaaaataaaagccggcgttaatgccggcataataattattatataaagcaaagaacaagagctataatcataaaaagagctccgagaatttttgttattctcgcaagagtgccttccatagaactgcctttgtttttactccagtatgaatcgcctgagtttgaagcgtttacagcgccgagacctgccgcacggtttgactgaagaagcacaacgatacataatattacgcctattatcgctaaaataacagataaaactgtagataacatttatatatacctcctaatattctgcataaaatcacttatatcattctaacatataaaaaatgatacggcaacaaaaatttttactgtttataataacttaagaagctgctgaacgtatgttgagcttcctattatcataaggtgatcggattcttggattacatagtcggcaggagggagcattgttacatctccgtcgacatgctttacaccgagaatgcttatatgatatttcggacgaatgttggaatcgattatggactttcctacccagtttttaagaggtggaatctcatatacggaatagtccttggaaagctcgatataatcgaatacattgtttgctgtgaattttttagcggctttttcagctatatccctgtcgggatacactacctcgtcagcgccgtttctgagaaggaattttgcctggatatcacgcgtagccttgctgactacatattttgcgccgagctctttaagctggcttgtaatttcaagactgctctggaagtttgaaccgatacatacaaagcatatatcatagtttcccacaccgagattttttaaaacttcagggtttgtacagtctcctataagaacgctggtagctatcggagcaagatcttcaacagctttttcgtcgctgtctattatcataacttcgttgcctagctctgccatgtttttacataaatgatgaccgaaacggcctaaacctattatcaatacagacttcataattaatttcccgcctttttattattaacctacagttattttttcttccggcaacgatatgtgcgccgtaacttttctttcggtaaatgcaagagcaaacgtcatactgcctacacgtccgcaatacatcagtaaggtaattataagccttgaggcatttgtaagctctcttgttatacctgtagacataccgacagttcctatagccgaatacacttcaaaaagcacatcgcttatgggcgctccgttttgcagatgacatatagccaacgtaccgacaagaccgagcataagattgatgcatataattacacctgcttttttaacggtattgtcgctgacgcggcgcttgaatatattgcagtcgctgccgccgcgcaggttgctccatacatagaaaattattaccgatacggtagttgtttttataccgccggctgtagaacccggacttcctcctatgaacataagaataacagtaagaagcttactgctggaagtaagacctgcggtatctattgtattaaaaccggctgttcttgcagttacagagctgaaaagggatgagaatatcttttcggaaacgctcatgcctgccataagattatctttttcaaaaacataaaacaaagctgcgccgaccactataaggaagaatgtcgtagccaaaactattttggtatgcagcatatattttttgaaattaagcttgtgttttgatatatcatcccagacaataaatccgataccgcctattactataagagccattatggttatattgattatcggattaccgaattcggtcgtaaacgacgtatattcacccctgtaacccatcaggtcaaaaccggcgttacaaaaagcggatatggagtgaaagacactgtagtatactcctcgggtaaaaccaagctcgggtataaagaaaaaagacattataacggcgccgataagttctatcgcaaaagtgcctattataatcttttttacaagttttactactccgccgatgtggattgagtttacgctttctcttattagggttctctgcttaagattaatatttctgttaagaagaagcgagaataatacgccgagagttataaatcctagaccgcctatttggataagcgttattataactatctgtccgaatgtggaccaatgcgtatacgtatcgacgactacaagtcccgtaacacacgatgcgctggccgatgtaaaaagagcggggataaagcctatgctttgaccgtttttggatgatatcggaagcataagaagtaaagtacccataagaattacaataaaaaagcccaacgctattgtttgtgcctgagtaagattttttaatttttgcctcattggaaatatctccgtatttatctgttatgttttgctacgtcatatattatatatcaaaaataataaaaagcaagaaacatttaactatgttggaaaggttaaaaaaataaattgtaattgtcgaaatttggaattattttcattagcgcaaatgtatattttatggtagacttatccttacgaaagatatatataatattcagaaagttacagaaaacttacaataatattaagatactgaggtttagttgtttttgtaagatataaattatataataaaatcagttattttattttctgaaatcaaaaacatttgttgggaggaaaaaatatgaaaaagaaaataatagcattggctacggcggcaatgtgcatgaccggaagtatcaatacggtatttgcttcgacatttgcagatataaatgacgttccatggccggaggctgcaaaatacattgacgaggcggcgtcgttgggacttatggcaggatatacggaaaacggcaaaaaattatgtaaagccagaaacaatgttacatataatgaagctatgcagcttgtatatcagataatgtgctcatataacagcgctaataaggcttccgcttccgttatttcaaaatggacaagcacaatgaaaaatgccaacataccttcatgggcatacgaatgtgtggcttacggacttgaaaactccatactttcatctaatgaccttaaaatatttatgtcgtcatctacagagcagagaaatgcaacgcgtgaagatgtcggagtaatattcggaaaggctctttcaaaggtatatactgtaaaccagtcggcagcgcttaaatataatgataaaaatgccataacagcttcatctgttccttatctggaacttcttaacagacttaaccttatggtaggagacgcaaataacaattttaaccctaaggctaatataaacagagcggaaatggctgttctttcaacaaaaacatataaagaactcaaaggttccggaaacggcggaaataacggcggttccgttgtaaacgagcagattgtcggagaagtaacaaaaatttccgacgacagcattacggtaaaaactacggccggagaaaagactgccaagatagattcaaaagtatccgtaatgtatgagggcgataaaggagaggttgccgatattaacgagggcgacagcgttatagttgttgtaaataacggaactgctacatttataacggcatattcgtccggaacatcttcgaatattaaagagggtactattacaagtatctcaaaaacaagaattacaattgaaaacggaagcaaaaaagctacatataaatttgatgacgactataatgacgttacgctcaagcttgacggaaagacatcaaaggatatagacgatcttatcgagcttgttaaagacggtgaaaatattgaggcggagataactgccgataaaaacggatatgtaacaaaaattacagcggaaaccgttgagaaaaaagctcttgagggaactgtaacaggtcttacatcatcaaaaattacaataaaagttgacggaaagacatattcgtactatcttcttgacgatactgacgacatagaggttaagcttgacggaaaaacagttgattttgacgaccttaaagatgaatatgacgacgatgaaacacttgaagttgaactgaaacttaattctaagaaagaagtaacagaaatcaaagcagagacggaatcttcatctacatcggcaagcggaaaacttactaagctttcaacaaaatctatcacaatcaaaccctcaagcggctcgtcaaagacctatgatattaaatcgggcgttacggtaacgattgacgggtcatcatcaagcatttcaaagctgaaagacagatttgacgatgataaggagtatacggttaaacttactctttcaggaggaaaagtaacaaaaatagcggcttctcttgaagacgaggatgaagaaagctcaacaagcggaagagttgaaagcattgacgaagacagaataaagataaaagactcaaacggaaaataccatacatatacatattcgtcaaaaggctgtgatttctatgttgacggaaaaataaagggcatgagctcggtaatttcttcatacggcagcggaaataaaaacgttaaggcttatataactttaaacggagctgatagagccgaaaaggtaaaaatcgagacaaatgacagttcttccgatacagatgaagatgaaggaacattagtttcgatttcaagcaaggaaataaaaatcaaactttcagacggagataaggttacacataaacttgcaaaaagctgtaaggttacaatagacggaaaatcatcatcggtatcaaagcttgaggacaaggttgacgatgacgaagaatttgaagtagaacttacatttgatgatgacgataaagtatctaaaataaaggcgtcatctgcaaaagagagtgtaagcggaaatcttctctcaattgacgaagataaagtaaaaatcggcgaaaaactttcgagcggctcatatacaggaaacatttattatcttgccggaagcgttacggtaatcgttgacggagatgaaatggatcttgacgaatttatcggaaaagctcccggaagagactacaccgttcagctttcaagaaattcggacggtaaagtaacaaaaatcgtagctaaggaaaaataatttagaaaaaatgcccttcttaaagaagggctattttttatgttataaatacattttaaggtatttataagtatataaaaatattatttatgacaagctgagatattttgattataatatagagtaaagagttgagctgaatggtaatataaatttatatgtatttttaatgtcaggaagtgaagaaatgaacctatcgttatatatacacattccgttttgtgtaaaaaaatgcctttactgcgattttccgtcttacggagaaatggacaaatattttgaggcctatgtaaataagttgtgcggagaaatttccgacgccgcaggtgaaatgaaaggaatgaatgtccgcagcatttttataggcggaggaactccttcaatactacccccaaaacttatgggaaagataatggatgctgttataaacagatatgatgtagacagcaaagccgaaatcacaatggaggcaaatccgggaacgcttgatttagacaagcttacggaactgaaaagcatgtactttaatcgattgagtatcggcttgcaggcgtggcagaacaggcttcttaaatcaataggaagaatacataccgctgaagagtttgaaagaaatttttatgatgcgagggcggttggatttgataatataaatttggatttaatgttttctttgccgggtcaaagtttgtcggactggagagaaactttaaaaaaggcagtcggattgaacccggaacatatttcggcatacagcttgataatagaggaaggaactcctttttacgatatgtatcaaaaaggtattataaaggaaacggaagaaaaccttgacagagatatgtattatcttgtaaacgccatgctgaaagaaaacggataccatagatatgagattagcaactttgccaaaaaaggatttgaatgcgaacacaataaagtatactggagaactcgggaatacaaaggattcggactgggagcacattcgtacatggacggcagaaggtttcataatacatatgattttaaggaatatattgaggaaaaagtaaaaccgttagatatggaacttctttcagatgaagaaaaagaagaggaatttatgtttatgggactgagaatgacggagggaatatctaaaagagattttagggaaagatttaagacggatatatataatgtgtacggagaagaactgaaaacgcttattgaagaaaaacttattaatgagaaagacgacagaatatttttaagtgaaagaggcattgacatatcaaatcagatttttgaaaaatttataaggtaaatttgtgttttaaaggaaaaaatcataaataattcttaaaagcacttgacatattaaaggttaggtgctattttaattattaaagattagcactcgatataaatgagtgctaacaagaaataaagggggcgggtttatgcagttgaatgatagaaaaataaatatcctgaaagctattataaaggattatattgatactgctgaacctgtaggttccagaactattgcaaaaaaatataacttgggagtcagttccgctacaataagaaatgaaatgagcgacttggaagaaatgggacttattattcagccccatgcctctgcgggacgtattccgtcggataagggttacaggtactatgttgacagcatacttcaaaaagaccttataactgccgatgatcaggactttataaaagatgttgtaaacagaaatataagtcagatagagtatttaatggaagaaacggcaagagccttgtcttcgctgactaactatactacttttatttcggagccggtaataagaaaaaccactctgaaacaggtaaggcttgttccccttgatgatatttcggttatgatggttgtagccacgggagaaaaccatattaaagattatattattcccgtaaacgaaagcataggagaaccggaacttaataaaataaacgaggaaataaacgcttttctaaagggaaaaacaagagacgaccttaatgacgagacaataaaaaatcttgctctcataacaagagaacatcaggaacttttgaagcctatgcttaaaaacataagaaaaacaatagcttcggcggagagcgttcagatacatctgagcggtgaaaaaaatatacttgattttcccgagttcagcgatattgataaggcgcgtacgctttttaatacgctggaggaaaaagaagcgcttcttaatataataggcgatacggacggcagaaagacagacgtatctatcggcgctgaaaatgaactggaagaaatgaaaaattgcagcgtaataaaaacaagctacaaagtcggtgacgacgtatacggaacaatcggcattatagggccgacaagaatggattacggacaggttatttcggttttaaacggaatggctaaaaatatagagaatataatgaattcggcgtccaaacgaaggaaacgcgcaattgaaaggaaggacaaattaaatgaatagtgaagaaaataaggctgaagaaataaaggaagagacggaaataccggaagaaacaaccgaaaacgaagctgttgaaaataaagaggaagcggctgaagaaaagaaagagacatccgataaaaagggattgtttaaaaataaaaacgcaaaatatgaaaaagaaatcgaagaactcggtcaaaagcttgcagaggctcaggacagattccaaagaacactggccgaatttgacaacttcagaaaacgtactatgaaagaaaaagcaagtatgtacgatgacggagtgagagatacgatagaaaagcttcttccgctttttgataaccttgaaagagcaataagttctgtcgaaggaaaagtcgatgatgaagatccacttctcaaaggcgtaaaaatgacggataagcagcttaaagaaatattggcttctatgggcgttgaagaaataaaagcgctcggcgaaaaattcgatcctaaccttcatgctgccgtcgcacatgtcgacgatgaaaattatggtgaaaacgaagttatcatagatatgctgaaaggttataaatataaagataaagttatcagacacagtatggtaaaagtagctaactgattaatgaaaaaatctatttgttaaatatttaggaggaaatttattatgggaaaaataataggtattgaccttggtacaacaaactcttgcgtggctgttatggaaggcggacagcccgttgtaatcgtaaactcagacggagcaagaacaactccatctgtagtaggttttgcaaaaaacggagagcgtcttatcggcgattccgcaaaacgtcaggcaataacaaatactgacagaacaataagctctataaagcgtcatatgggcgaaaattacaaagtagctattgatggcaaaaattattcacctcaggaaatatcggcaatggttcttcagaaacttaaagcagacgctgaaagttatttgggagaagccgtaacagaagccgttattacagtacctgcttacttctcagacgcacagagacaggcaactaaagacgcaggtaaaattgccggacttgatgtaaaacgtataataaacgagcctacagcagcagctcttgcatacggtcttgataatgaaaaagagcagaagataatggtatatgacctcggcggcggtacattcgacgtttctatcatcgaaatcggcgacggagtagttgaagttcttgctacaaacggagatacaagactcggtggcgatgactttgataacagaattatcgactatcttgtaagcgagtttaaaaagactgaaggcatggatctttcatcagataagatggcaatgcagagacttaaagaggctgccgaaaaagctaagaaagaactttcaacagtaacttcatcaaatataaatcttcctttcataacaatgaaccaggacggacctaaacatttggatataactctttcaagagctaaatttgatgaattaacggcagaccttgttgacagaacaatgggtcctgtaagaaacgctctttcagacgcaggtctttcagcttccgaacttgacaagatacttcttgtaggcggttcaacaagaatacccgcagtacaggacgcagttaagaaaattacgggaaaagatccattcaagggaatcaaccccgatgaatgtgtagctatcggcgcatctatccagggcggtaaaatggcaggagacgcaggcgcttcaagcatacttcttcttgacgtaactcctctttcactcggtattgaaactctcggcggcgtagctacaaagcttattgaaagaaatactactatacctacaaacaagaaacagatattctctacagccgaggataaccagacagctgttgatatacatgtagtacagggagaaagacctctcgcaaaggataataaaactctcggaagcttcagacttgaaggtatcgcgcctgcaagaaggggtgttcctcagatagaagttgcatttgatatcgacgcaaacggtattgttcacgtatcggcaaaagacctcggtacaggtaaggaacaggctatcacaattacagcttcaacaaacctcagtgatgatgaaatagataaagctgttaaagaggctgaacagtatgccgaggcagataagaaacgtaaagaagcaatcgacgttaagaacgaagccgattcacttatcttccagacagaaaagactctcggagaacttgaaggaaaggtttccgatacagataaggcagcggttgaaagcgaactttcaaaattgaaagcagcagtagaaaataagaatgtagaaacaatgacagacgcagaagtagaagaaatcaagacggctaccgaatctcttaaaaatgctttctacaaaatatcagaagaattatacaaacaggcacaggcagcaggcggacaggaaaacggcggagccgataattcagatccgaatgtagttgacggagattataaagaaatgtaatatataaaagcgaagagaggccctctatggagagcctatctttgcgaatgaaaacatttgacggcgggtgaagaagttggcagaaaaaagagattattatgacgtcctcggcgtaggaaaaagcgcgggcgaggatgagataaaaaaagcatatcgtaaattagctaaaaagtaccaccctgacgctaatcccggagacaaaagcgctgaggaaaagtttaaggaagtaaatgaggcttatgaagttctgagcgatacgcagaaacgtgcgcagtatgatcagttcggacatgcggcttttgaccagagcatgggcggaggcggcggattctacggcggagctgattttgacatgagcgacatattcagcatgtttggattcggcggcggttcggcttcaaagagaaacggtccgatgcgtggaagagacgtaaacattacaatacagatttcttttgaagaagctgtattcggatgtaaaaaagatatacaggtcaacgttacggacacatgcgacgtatgccacggaacgggagctaaacctggaacacatcctgaaacctgccgtaaatgtaacggtacgggacaggaaagagtcgttcagcagtctattttcggaactatgcagacgacaagaacatgttctgcatgccacggaacaggtaagactgttaaagagccgtgccagacttgccgaggaaccggctatgtaaaacgtcttaaaaaatatgagataaatattcctaagggaatagatcatggtcagactatacgtctttccggaaagggagaggcaggaataaacggcggcggatacggagatttgcttgttacggtttatgttaaaccgcacagttattttataagaaaaggaatggatatttacagtgagaaagtgatttctttcacagaagccattctgggcggagaaataacgataaataccgtttacggagaagagaagtataccgttaaaccgggaacgcagcctaatacacagataacacttaaaaactgcggtgttcccaatataagaaatgaaaaaataaagggtaatcagatagtaacgcttaaggtaaatatacctacgggactcagcgaaaagcagaagatgatgctccataactggaacaatccggatcttgtagttgaattacccggcggagataaacctaaaaagagctttaaagataagatgaaagaaatgctggaataataaaaaagacatacttctgtctgaagtatgtctttttttgtgcggattttagcgggatttgatgaaaaattaaaactattttaataaaatgtttggacttttactttatgtatgatataattcaacaatggacaaatatatttataaatgatttaggaggaaattaattatgggacagaagcaatgggccagcagacttggctttcttcttgccgccgcgggatctgctataggtcttggtaacttatggaaattcccgtatcttatggggcgtaacggaggttttacgtttcttattgcgtatcttatatttgtacttattctcggtatacctgttatgatgcttgagatgagtcttggtcgttatacaggcagagatcctatacagagttataagatagttcacccaaaggcaaaaattgtaggtatattaggcgttctcgcaccgtttattattttaagctactatagcgtaataggcggttggattcttaaatatatcgtgagctatgctactacatttaatgcgccggcagattttaatgcgtttatagcagagcctcagacagttatatggcatcttgtttttatggtaattacaatagcaatatgctttaaaggagtaagcggtatcgaaaaggcaagtaagtttatgatgcctgcgttatttattcttttgataattataatgattcgctccgtaacacttgagggttcttcggtaggtctgagatttatatttgaacctaaggcaggatttacactttccagtataaatgcggctctcggtcaggttttctattcgttaagcctttgtatgggtataacgataacatacggaagctatctgtctaaaaaggaaaatattcagaaaagctgtatgatcgtagcgggaatggatacagctcttgcgataggcgcaggcgtagccatattccctgcggtatttgttttcggtcttgaaccgggacagggccccggacttattttcggtactcttccgaaggtttttgaatctatgatcggaggacctatatttgcaatagcattcttcatacttgtattttttgctgctcttacaagcgctattgctcttttggaagttgttgcggcgtcggcaatagacacattgggctggacaagaaaaaaatctgttttagtactcggaatatgtatattcatactcggaataccaagcgcgctttcattcggagtactcggtgatgttacaatattgaactattccgtatttgattttatcggaatgattacagataatattcttcttcctgtaggaggaatattgatgtgttatttcgttgcatggaagtttgatataatgaagcttgccgatgaaatcgaacagggaagcaaaggatttaagattaaaaaactctgggtaaactgtattaaatatgttacgcctatacttcttataatagttacattatcgggttttgtaagtatctatacaacaatagccggataagattaaaacatgtgtaaattaacatgaattattttaggacatgccataaggcatgtccttattttttacaaattatattatttataatgtcaaattttacaaatcagttaagtctttctttcatttggcgtagtcttatagacaaatggttattataacactatattttaaaatagaaggagggtatgagatatgatgagaagaatgaaaataatgctcatactggctttaacttttatttgttttaacgtatatgccggggaaggaaaacatagcatttattgtcctgtactgacatatcacaggctcacaaatgatgtatcacagactacggattggactacaacgcctgaaaaatttgaaaaagatataaaaagacttcttgataacggatatactccgatatttacaagcgatcttgtcagtgaaaacagagctataggacagatacctgaaaagcctgtgattatacagtttgatgacggatatgaatctgtttacgaattggcatatccgattttgcttaaatataatgtaaaagcagaagtttatattataacggactatacttccgaacagccgacagagaataacggtaatatgtttttaggttggcagcagctgcgtataatggaaaattcgggacttatatatacaggtcttcatggaaaaacacatttacctttgactgagaaatttactgacgaagagattaaaaatgattttaaatcagcatggaatacaatagatgtcaaattgggagagagagcacgctattatgtctatccgcgaggcagctttgacaaaagaactataaagcttattaaagaagcgggaggaaacgaacagttcgtttggatatgggatttgtcaaaggatataaaaaacgatgttatcggaagagtgaatatcggatataatacagatgttatctcagccataagctcgtttgaaaaaacctataatcaaaaacttaaatcagtttaaaaagtttgttgtccttttttataaaacgccgcataaaatcaaatgcggcgtttttgtgaatatttcaaatccgattttttgtttccgggtattgaccgtacagttactgtacatgctagtattatacaaagaaaataaatatacaagtataatcggaggaaactgaatggaacttgcaaaaataaaagataaccaatggaacgcagttagaaaaatatatacagaagcatttcctaaaaaagaacaaaagccttttacatcattaaaatcatcggtgaaaaaaggaaagacaaaattattgacggcatcggaaaatgatacattactgggatttactgcattaattccgtataaagatatggttatggttgactatttagcagtaaacagtgcaataagaagtaaagggacgggaagccgaatattacagaatgtatgtaatttatacagcaataagaaaattgtgcttcttattgaacagattgataaaatggcagagaataaccaacagagaatagccagaagaaaattttatctaagaaacggatttacttcatcggatatttatataagcggcgtaagcggaaacatggaggttttgaattacggcggcaaggtatcggcaaaggagtatatggaactgcaaaaatatgctctcggcaaaatattctttttgttttccggtatacgattagtgaaataattatattggaataaaaagtttttaaaagatatttaaccatgaaattattgtttacagctaacaaatggacaatatgctgtgtataacattaattatttgtggaaaaaacaaagaaaattataattgttagaaattataattttctttacattttgggcttatctatcagtttttaggaagttccgaagcgcagtgcgcacattttacagcgcctataggtatttcactgaggcagtacggacatttttttgttgaagggggaaccggattttcagtaacattttttttgccgatagattttatcttattaaacatttttaataacataaacaggacaaaagccataataagaaagtttataaccgatgtaaggaaagctccgtatctgatttctatatttcctatattaagcacaaactgacttaaatcggcgctgcctgccatgccgagaataggattgattatattttacgtaagtgatgacacgatgcttgtaaaggcgccgcctataattacgcctattgccatatccataacatttccgcgaagcacaaacgctttaaattcctctataaattttttcatgttatacctcctgtataattaatatctatgaggattatagtagtaatgagcaagtagtgtcaagattttacaaaacacataaagtactgaaaatttagtatctgtaaataaaaaaaccgacaatattgttattgtcgattttttatatgttcccgaggtgattcgaacacccgacctaccgcttaggaggcggtcgctctatccagctgagctacggaaacacgatttgcatttttaaacagaaatatataattatatttttgcacaaactacaaaagtcaactaatataatatttcttttttataattaagtcaagatgttttaataaaatagttaggcaacttgatttcaaagataaattgtgttaaagttgagtgtaacttgaacgacggcacaggaggaacgaatatgtgtggttttgtaggatttacgggacagcttgcccaaggcgaaagcgtccttaaaaatatgatggacgcaattattcacagaggccctgacagcgcgggtactcatgttgatgaaaatatatctcttggatttagaagactcagcataatagatttggattcaggtacacagccgatgtacaatgaaacaggagacattgtaatcgtatttaacggtgagatatacaattatcaggaattgagagaggaacttattcaaaaaggacatgtgtttaagaacaacgcagatacggaagtacttgttcacggatatgaggaattcggcgaggacatgcttaatcgtctcagaggaatgtttgcttttgtaatatgggacagtaaaaagaaaaaacttttcggcgcaagggactttttcggcataaagccgttttattatgctgttgtagacggacagctcgtttttgcatcggaaataaaaagtattttggaatatactccatataaaaaggaaatgaatacggaagcacttgaaaactatcttacattccagtattcggttcttccggaaacatttttcaaaggtatttataaacttatgccttcacacagcataacttttgaaaacggcaaggtagaagtaaaaagatattgggagcctaagtttgaacctgatgaaaatatcggacttaacgagcttgtcgataaaatagacgacgctatgcaggattcaattaaaaaacataaaataagcgatgtagaggtaggttctttcctttcaagcggcgttgattccagctatgtggcggcttgttttaaaggagataaaacttttacggttggatttgactatgagaaatataatgagattgattatgccaaatctctttccgaaaaaatagaaatagacaactatagcaagcttatttcaacggacgaatattgggatatacttcctacggttcaatatcacatggacgagcctttggcagacccgtcggcggtagctctttactttgtcagccgtacagcggcagaacatgttaaggtttcgctttcgggagaaggagcagacgagtttttcggcggatataatatatacagagagccgttttcgcttagaccacttacaagactgccaagacccataagaaaatttctcggagcggctgcttccgcaataccgtttaaaataaagggaaagaactatcttataaggggaagtaaagacgtagaggaaagatttataggaaacgcatttctttttaacgaaaaagagagaaataagcttctgaaagatcctcaggttaagtatgaccatactacattgacaaagccgttttatgacaaagtaaaagatatggacgatactactaaaatgcagtatatagatatacatttctggcttatcggagatattttgcttaaggccgataagatgagtatggctaactctctggaagtaagggttccgttccttgataaggaagtttttgaggttgcaaggcatgtgccccttaagtataaagtaacaaaggaaaacacaaaatatgctatgagaagggctgcccacagatatcttccggatatggtagcggaaaagaaaaaattgggcttccctgttcccataagaatttggcttaaagaggataaatactataacatagtgaaagacgctttcacatcagtggcggcaagccgttatttcaagactgatgaaatagttaaacttctggatgaccataaaaacgggaagaatgacaacagcagaaaaatatgggcaatatatatgtttcttgtatggtataaaagatactttgaggatgaatgtaaagcagcataaaatgcattttaataaacaggcacgacgttttaacgtcatgtctgtttatttttttaaaaattgtgctataaaaaattaaaggcggtctgttgaaatgttttgaaattttaaaaaataggctcttcacctatattaaggctaagatgtgttatggcatgatgaagatgtattgacatagcgttttttgcaccggaagcgtcccttgcttttataaattccataatcaaggcatgatccgttaatgtatcttttgcaagtatatcctctgatgggagatgacatccgttattaagcgtaatggaatccctaactcctttttctataagaggcagaagctgctgcaaaaaatcattatgagacgcttttactatagcgccgtggaacttctgatccagcttggttcggtcatgtcccgctaaaattgcgtcttctacggattttccgatagacagtatattattcatatcctcatcggtggctcttcgacaggcaagtgcggctatatcaggttcaaacagcagccgtgtttcatacaaatccttcagacgcacacgtattctttccatgctttctaatccgagattttgaaaggctgttatttccgtatttataaatgtcccttttccgcgataaactactaaaataccttgagaaacaagtattcttattgcttcccgtaaagttgaacgtccgacattcagctgtgcggcgagtatattttcacccggaagccgatcgccggggttgtattttttttctgtcaatatcatttgatatatgctgtcggcaacctgctgaacaagaccttttttgtttgccatttaaacagctccttccttataaattaattataaaaagttttgacataaataacaactgattcatatatacttttttgacaggccgtaatatgtatttttgtataaaaaagagaatagcttttgcaagatgtgtttttatataaattcaattgacaaagctgtagttatttgatattttaaaatcagacaaataaactacttatcagacaagtgaggaggctgttttatgaaagagtacagcaggaatgtaacagtaggcattgaaagagcgcccaacaggtcgttgttttatgcccttggtcttacaaaagaggaaatggaaagacctcttatcggcgttgtatcgtctaagaacgagattgttcccggacatatgaatctcgacaaaatttccgaggcggtaaaagccggaatacgccttgcaggaggaactccgatagaatttccggcaatagcggtatgcgacggtatagctatgggtcatgtgggaatgaagtattcgcttgtaacaagagatttgattgcggattcaacagaagcaatggtaatggctcatcagtttgacggacttgttatgataccgaactgtgataaaaatgttcccgggcttcttatggctgcggcaagggtaaatattcctacgattttctgttccggcggacctatgcttgcaggtactcttacagacggaagcagaacatgcctttctcatatgtttgaggctgtaggcgcatataaagcagggaaaatcgacgcggcaggacttgaagactatgagaaaaattcatcgccgtcatgcggatcatgctcgggaatgtatactgccaactctatgaactgtcttacggaagctataggtatgggtctgagaggaaacggaacaatacctgcggtttactccgcaagaatacgtcttgcaaaagaagcgggaatgaaaataatggaacttgtcgagaaaaatataagacccagagacattatgacagccgaggcttttcataatgcggaaacaatagatatggctctcggatgttcaacaaacacaatgcttcatcttccggcaatagcgcatgaatgcggaatagaacttgatttggattatacaaacgagatttcggctaagacacctaacctttgccatttggctccggcaggtaatacatatatggaagatttgaacagagccggcggagtatatgcggttatgaaagagcttgccgacgcaggacttataaaaacagatcttatcacatgtacgggaaaaacaatagcggaaaacatagccgacgcggtaaaccgtgatgagagcataataagacctattgataatccgtttatgaagacaggcggcattgcagtacttaaaggaaatcttgctcccgacggatgtgttgttaaacaggcggctgtggctgaagaaatgcttgtacatgaaggccctgcaagggttttcgattccgaagaggacgctatcgaagcaatattcggaggaaaaataaaagcaggagacgttgttgtcataagatatgaaggtcctaaaggcggcccgggtatgagagaaatgcttaatccgacatcggctattgccggtatgggacttgataaagacgtagcgcttgtaacagacggaagattttcgggagctacaagaggcgcgtccatagggcatgtaagtccggaagcggcactcggaggaactatcggacttgttgaagaaggcgacatcatatcaatagacatcccgggaagaaaaatcaatgttaaagtaagcgatgaagaactggaaaaacgcagagcaaactggcagccaagagagcctaaaatcacaacgggatatgcggcaagatatgctaaacttgtttccagcgcctcaaagggagcgattttggagtaatcttgaaatagggcttatataagataaataaatcggcttcgtgaaaataaaaaaacacctcaatcacagcttttaaaactgtttgaggtgttttttattttctaatggttatcggtttagggtcgcttttattgtcaggctccgtagcaagagtaagcattatttctccgtataaatcggctacattgtttttccagttacggcagatagttcttgcctgatcttttgtagcgacgtttatgcttatttccataagtgaagtcgtcccgtcgctgtcatacactccgcattttaccgtgtactcgttattcatttcctgaaaatagttggcggttactgcatattctgcacgcaatcttttggaattttcctttgcgtagttatttattacgcttttagcataattggaaatatgttttataaaatagttaagagtatcttcgccgtcggaagttatagtataacgggtactgttgttttcggtggtcatttctaaaagtccgctttccacaagttccgacaaatactgttgtacgctgaagtaatccatgagatttttttccagagcaaattgacagatttcactgttggaaaggggaatttctattttttcgattaaatacaatataatgagcttattttccgctaaagctcttgtattgtcatacatattaaaccaccgccgctgaaaatgaattgatatatattataaactattacaatagaatatacaattgcctatttcaacaattttccctgataactgtttctttgtctcatttttttatgtatttcgtttaacacgcccctcttgtccatgctccaggacggttctatcaattcgtttcggtttccgtctcctgtcagcctgtggagaactatatgaggagggagatgctctatcatgtctattacggtatcggtgtattcgtctttagtcatgatatgaaacggattttcggtatacatttcgtgcagtcttgtacctcttattatatggagaagctgaagcttaataccgtcagttccggcatttgcggcaaatgacacggaatttctcatatcctcaacggtttcgccgggtagaccgagtataatatgggtaacggtttctatatttttttctttaagttttttcatagccgataaataaacttcgtttttatatcctctgttaataagctctgccgtagcttcgtttgaagtttggaacccgaattctacccataaataagtttttttattaagcttatccaacagctctacaatatcatcgtctatgcagtcgggtctggtggcgattgctatgccgtctattccatcgcatgaaagcgcttcttcgtacttgcgttcaagttcgtcaacgggcgcgtatgtatttgtaaacgcctgaaagtaagctatatattttgcgtcaggccatttttgagacaagcgttgctttgataattccagctgattggatattgacatatcggcagacggggcaaaatcgcccgaacccgcgccgctgcaaaatatacatccgcctttacttatttttccgtcgcggttagggcatgtaaaacctgcgttcaccgacagcttgacagtttttgttccgaatcgttcttttaaatgatcgcttaatgagttatatggtttcatatttatacctcctatattataataaccccttacagcgcgtttgtaaaatcgtaatttgtatagtataattagccgagggcggtgatactgatggaggacgagcttgtactggaaggtacggtggaagatgtaatttttcataatgatgataacggatatgccgttttcgattttaaatccgatgacggagacgaaataatatgcgtcggtacagttccgcagataagacggggcgatatgcttaagttgaccggcggaatggttatacatcctacatacggacttcagtttaaagtggaattttatgaaagagtagttccgacaaccgccgttgcaatagaaaaatatctttcatcgggaatagtaaagggaatagggccgaagaccgcaaaaaagatagtcgataaattcggagcggcaacattttatgtcattgaagaaaagtttgacagactggttgaaataaaaggaataacgtatgataaggctttggctgtacatagttcgttttgttcccagagagatataagaaaagtaatgctgtatttacaggagtttggcgtaacgcctgcttttgcaatgaaagtatataagaaatacggttacagaaccatagacattataaaagaaaatccgtacagaatggcagaggatattgccggaataggctttaaaacagccgacaggattgcatattcaatgggaataccgaccgattcgcccaatcgtgtaaaatccggtattaaatatatactaagcgaatcattgcttgacggaaatgtatttatgccgaaggacagccttataagacaggccggcgaaatattatccgtagatgaggaaatggtggacaactgtctgagggaattacagatagaacacaaagtttttaatgaaaatatagacggaacagatgcggtttacctgatgacgatgtactatacagaaatatcggctgcaaaaaaattgctggaactgtcttttttccatgacgatgcggatttgaaaaaaataaacgataaaatagacgcagtcgaggacttaagcggaatatgccttgctaaacagcagagaaccgccgtaatagaggctatgagggaaggagtccttgtaattacgggaggccccggcacaggtaaaacaactataattcatacgattatccaaatatttaaaagcagcggaatggaagtcgttcttgcggctcctacaggaagagcggctaaaagaatgacggaaacaacgggaatagaggctaaaacaatacacagaatgttgggcgttgcgtatgccgatgatgacaacgggcgtcaaaagtttgataaaaacgaaaccgagccgatagaagctgacgttataataatcgacgaggtatctatggtagatatgcagttgttcaataatcttctgaaagccatagaaccgggtacaagactgatacttgtaggtgacgccaatcagctcccgtctgtggcggccggaaacgtactgaaagatataataaaaagcgaaaaaataaaggttgtacgccttacggaaatattcagacaggcgagagaaagcgctattattactaatgcccataaaataaacagcggagaagagcctgttatgaacggaaagaatacggatttcttttttgtaaacgcacagtatgcgcctgaagttccggggaagatagtggaacttataaccaaaaggcttcctaagttcacgggagtagattcattttccgatatgcaggtgcttactcccatgagaaaaggggacataggcgcagcaggacttaataaaacgctgcaaaaagcgttaaatcctccgtctgacggaaagaaagaatatgaaacgtcttcatgtacgttccgtgaaggcgataaagtaatgcagataaaaaataattataatatatcatggaaaatcgaaaacagattgggaaaagttatcgatgacggaacaggcatctataacggagacatgggcattataaaaagtataaataagcaggcggaaacaattacggttttgtttgacgatatgagacaggctgtttatgaatttaccgcccttgacgaactggaactggcttatgcggttacgatacataaatcacagggaagcgaatatcccgtagttataataccgatacacagcggaccgcctatgcttatgtcaagaaatttgctgtatacggcagtaacgagggcgaaaaagttcgtaataatagtaggacttaaaagctctgtaaacagaatggttgccaatgacagagaggttagcagatactcgggatttgcttacaggctggaaactctgtatgatttcatgctggaaacaggtgatgacggtgatacgatatctttctaaattgatatttcccgaacggtgtatattttgcggaaagccgacaaagcttcacagcggaaatccgtatttatgcgaaagctgtgccgaaaatatgccgtatctcagaccgaacggagaaattgatgaaaacagtgcggtaagaggcgtaagtgtgttcagatatgaagccgttaaagatactatttttaaattcaaatatgacgggtacaaaaattatgggaaaatactcggaaaatatatggctgattatgtgattgaaaataatatttatgatgtacttcaatcggacgttataatacccattccgttgtggaagaaaaaagagaaagaacgaggcttcaatcagtcggcattattggctgaagctgtatcggatataatcggaattccttttgaaaacgaagtgttgataagaaacaggaaaacagttccgcagaaagggttgagcagaagtaaaagaagcgacaatttgagaggcgcattcagtctgggaaaagggtcttcggtggaaaataagaagatagtgcttgttgacgacatatatacgacgggaagtaccgtttatgaatgttcgaaaatactatacggggcaggcgctgacaaagtattttatctggctctgtcagcacccggtacggatatttttgaggtagaatatacagataaagatgtgataaaaggctttgacgaataaatatcgtcggagctttttttatttacatgtaattataaacaggttttgcgaataagttattttaagagattgtcccacattacgaaaggagagaagcttaaaatgaactggcatgacaaaaccgtagatgaaacgcttcttatgcttaatacggacagtaatatcggtctgaatgaaaaagaggcggagaaaagactggagcaatacggacaaaacagcataggggaaggggttaaaagaaagggatttataaaaaaattttttgaacaattaaacgacatcatgataataatattactggctgcttcggcagcttcattcggcgtatcatggttgaacggagatgccgattttacggattcggttattattataatgattgtggtaataaatgctgttttaggagttgttcaggaaaataaggcggaaaaagcaattgaggaattgaaaaaaatgtctgttccgcacgctaaggttcttagagacggacatatcaaagaaatctcatcacaaacagtcgtaccaggagacataattattttagaggcaggggacatggttccggccgacgcaagattgataagcggaaacacgataaaaacagatgagtctgctcttacgggagaatctgttcctgtgtcaaaagacgcttccctaaggataaaagaggaagcgcaggctgcggatatgaaaaacatggtgttttcatcaacctatgtaacatacggcaaaggaagagctgttgtaacggcaactggtatggatacggaagtcggaaaaatagccgcaatgatagcaaaggatgaaaaaaatgaaactcctttgcagaagagacttgacggaacgggaaaaatactcggattatccgcaatcggaatatgcgctttgatttttataataggagttataagaaagtacggggcttttgaaatgtttatgacctcaataagccttgccgtagccgcaattccggaagggcttcctgccatagtaacaattgtgcttgccataggcatgcaggcaatgtctaaaaaaaatactatagtaaggactctgccggcggttgagacgcttggctcggcacaggttatatgtacagataaaacgggaactcttacaaaaaataaaatgaagcttgttaagataacggactcaaaggaaaatacaaatcttaacgacaagagatttataatacgtttggctgtgttatgcacagactgctattttgaggacaggcactatataggagagccgacggaaacggccatagcggaggcagcggaagagatgggcgagaagaaatcgcgtcttgaaagtattatgcccaggatagatgagatacctttttcatcggacagaaaaatgatgacaacagtacatgaattcggcaacggaaataatctgtgcataacaaagggtgcgccggagagggttctgaatttatgtgggaaatatgcggatggaagaacaatagaccaaagtgaaagacgaaaacttgacaaaataaacgagtcgatgacctcatcggcgttaagagttttagcggttgcatacaaagaaacaggaaaaaatgacagaaattatgaaaaaggtctgacctttgccggatttataggaatgatagaccctccgagagaagaagcggctcaggctgtggaagattgtaaaaaagctggaataaaagttgtaatgataacaggggatcatgcgcttacagcgagggcaatagccgaaaaaacagggatttacaaagacggagatttaatatttgacggcagacagttggaaacaatgaatcagacacagctggatgataagctggaaaaaatttcggtttttgcaagggtatcgcctgaacataaattgaaaatagtaaacgcttataaaaggaagggtaagaccgtagccatgacaggagacggggtaaatgacgctccggcgcttaaagcggcagacataggatgcgccatgggacagaacggaacggacgttgcgaagggggcgtcagacatgataataaccgatgataacttcgcaacgatagtcagcgcggtaaaagaaggaagaataatatacaacaatataagaaaatccgttcatttccttatttcaagcaacataggagaaatactcacgatatttaccgctatgatattcggatggagtactcctcttttaccgatacatttattgtgggttaatttaattacggattctcttccggcaatagcgctcgggcttgacagacctgaagaaaacgttatggaaaatccgcctgtaagttcaaataaaagccttttttccggaggtcttggatataggatagcctatgagggatttatgataggaatacttgcccttacggcgtttggaataggtcataaatattttgacaacggtgaaatacacaatataagcagaacaatggcatttgcggttttgagtatatctcagctggtacatgcttttaatatgcgaaccgataagtctatatttaaaatacatatattcagcaacaaatatctgtgtcttgcacttattatcggggtcgctatgcaggcggcggttattatgataccgtttttagcggctgtatttgatgtaacggcattgaatttgcagcagtgggggatagtagccgttctgtcgtttataccggtattatttgtagagtttgaaaagaaaatattaaagtgaaaataaaaataattggtacactgacggtttgtccgcatattatatacaaaacggacatgcaggacggtgaaaaaaatgaaagatttggcttacagatattattttgacggttggggctgcggtcagtgtataataaaagccgccgatactaagtatgctctcggcttaaacggagaacttattaaggctgtatcggcggcaggtaacgggtttggctacagcggtttatgcgctgctccggcggctgtaatacttctgtttggatatatgtttgatgaaaataccgcaaaacgactcagaataatgttcttaaacgaatttaatatgaaatacggttcttttaactgctgtgcattacaaagaacggaaggttgcgaaaatatcattatgtatgccgccgatacggcagacagaatgatttcagcagaactgagaaatcaactctgatcttggttattttcatagtcgtcctgagaggttaaggcggttgtttctgacgtgattttagagatacgatttttgagagtttcgttttcttttgaaagcgcttcatatttcatacgccaacgtgcggagagcgtggctatttcttcgtttctctttgccaaagtcgatgaaagttctcccagacggtcgttcatagaagatatttgcttttcatattccgcagcttgcagggagtttatcggtgaagctttttgctgagggatacttttaacagtttgattttcgggaataaactgtggatatatatcatcggttacggggaaagagttatcattggtatttactataagttcatctgaggaaaacatgttgtcagatgagaaatccatatattccgatttaacgcaagatgagtttaaacggatgtttaggttttttacggttgaaaaataaatattttcggaatccgaatgtacggcgtaaacattgttttcattatacataagggcataaagtctgccgttatgacagaaaagcaaacagctgccggatagctgaccctcccatattactcttgcttttatctgccgaccggactttatgcctttatatatgagttgtgatgaaaacatgccttgcgcaagatataatatatggctttcatcatttttagtaagtattgaaat

SEQ ID NO: 776 - DNA, 1950 bp, Unknown
  16S sequences of unknown bacteria
tactccccggctgtcatttcggattaattccctcttgactttttatagccggtctcatcgattcaaatttcccaatgataccgcgctggcacgccaaacgcgcggcataaaaccacattttgtaatttaccccataccgcgccgcctgaaccaaaactcagcgcaactggagaaagcaaaatggctctttggtctttccctcagaaatcaacgtttccacagggaaagccagcgtggacatcagccgactgttggggtcgttcaccagcactttgccatcttccgttgcgcccacgagcaaaatatagtgcccgctattttcggtgaacattcctgtgttcatgtgtgcgatgatcaagttgccctcgcgcagccagcgcaatatgcgggattcgctcccgctgcgccattcggtgcgcaggttgaaaatgcgggcgatgttcgaaagcgccgtatggccaagcccatcgccgccatacatgccttcgtcgaccgcgtattgaaacagcgcgtccggcgtggcgcgggaggcgtcttccttatggtaatactgaatcgccatggccaggctggtggtgccgcaaccgctggtgagcacggaacgcggctccccgtcgatcgttacaacggtttccggataatcgaattgaaacaacaacggcacatccatgcggccgctcgcgtccgccgccaccacaacccccgaccagccggaaggggtaaaattgggaaacggcgcaaaatgcggctgcgaaagcgagttgcccgccatcagcaaactcaacagcaccccaagcaagggaatctggcgcaaaaatggtattagcatacgcgttctcctgaaatagttttgtcatgattatacgaaaattttccagatatgtcaacggcgaattgacatttaacattgatttgtgctatagtgtgtaggcaacaaggtgcgctatcatacaggaggagggctttgctatgctgttgggctctatggaagcaggcggcaccaaaatggtgctctgcattggcgatgaggaacaacatatttttgagcgggaaacgatttccaccacctcgccggaagaaaccatggaaaaaatcctcgccttttttcaaggtaagggcattcgcgcgctgggaatcggttcgtttggcccgctggatttgaatcgcaggagttcgacttatggctatatcaccaccacgcccaaaactctgtggcgcaatttccccttgcttccccagctccgctcggcgctgcgcgtgcccgtagaaatcgacaccgacgtcaacgccgccgcgctcagcgaatacgccctgggagcggcacagggctttaacagctgcctatatgtaacggtgggaacaggcatcggcggcggcctcattgcggaaggcaatctcgtgcatggccttgtgcatccggagtttggccacatgttgctgcgcgtttcggcggacgatcccatgccggacggcgtgtgcccctaccataaaggctgtttggaaggcctagcatgcggcccggccattgaagcgcgttggggcaaaaaaccgtccctgctgccggagggccacaaagcgtgggaactggaagccgagtacctggcgcaaatgtgtgccaacgcaatcttctgcatttcgccggaatgcatcgtgttgggcggcggtgttatgcggcaaacccatttgttcccgatgatccgcgcgcgcacgctcgacctgctcaaaggatatgtgcagcatccgcgcgttctctccggcatggaggactatatcgtcccccccgcgctgggcgaaaacagcggcatcgttggcggtctcttattggccaagcgcgcgttccagggactgtaaactatataaaaaatccctggtcaccgcgattggtgaccggggattcagagtattgacaaagtcaaaatttcattcaagactattgcatgttttgtgctt

SEQ ID NO: 777 - DNA, 3365 bp, Unknown
  16S sequences of unknown bacteria
cacaggcaaggcttatttgggtatcgacgccggttcaaccacaacaaaaatcgttctcatggcggaaaacggcggtattctttacagctactacaattcaaacaagggcaaccctgtttccatagtaaaagaacagcttgaaaaaatttacgatatgtgcggcgacaaaatcaaaatttgtcaaagcggcgtaacaggctacggcgaggatcttattaaaaatgccttcggcgtggactacggccttgttgaaaccgttgcccaccttcgtgccgccaaacacttccggcctgatgttgactttatcatagacatcggcggccaggatatgaagtgctttaaaataagaaacggcgcagttgacagcattatgttaaacgaggcatgctcctccggttgcggttcgtttatcgaaacatttgcaaaggctttgggctattccattgcggattttgcaagaataggtctttttgcaaaaactccggtaaacctgggttcaagatgcactgtatttatgaactcctccgttaagcaggcgcagaaagacggcgcaaccgttgaggatatttccgccggtctttccatatcggtagttaaaaatgccatttataaggttttgcgtgcctcaaatgcggacgatttgggcaaacacattgttgttcaggggggcacattcttaaatgacgccgtgctccgcagctttgaacaggaaatcggcagaaatgtaacccgtcctgttatcgcaggtcttatgggtgcttacggtgcggctctttacgcacaggattcaaagggtgaaaacacaactcttcttacaaaagaacagctttctcactttgaacacagcgcaaagccggttacatgcaatctttgtacaaaccactgctcacttacggtaaacacatttgacggcggcagaagatttatctccggcaaccgttgttcacgcccgttaggcaaggaaaaatccacaaccccgaatatgtatcagtataaactgaaaaaacttttggccatggagggcaaaggcgagggagacggcagcagaggcaaaattggtattcccttaggtcttaatatgtatgaaaacctgcctttgtggtacacgatattcacacagcttaattttgaagttgtgctctccggcgtcgccgacagaaagacatatcttttaggtcagcgcaccattccgtctgacacggtttgttacccggcaaaacttatgcacggccatgtacaaaagcttgtaaatgccggcgttgaaaatatcttctacccttgtatgtcttacaactttgacgagggcaaaggcgataaccactacaactgccctgttgtggcatattacccggaacttttggcggcaaatatgccaagccttaaagatgtaaactttatggatttctatgtgggactttcaagaccgaaagattttgaaaagaagttcagcgaaaaaatgtttgaaatcttcggtattcctaagcacgaaaccgcaaaggccgttcgcaaaggttacgaggcttaccacgcatacaaggcagatattgtaaaaaccacaaacgaatacatagaatacgcccgtgagaagggcttgcctattatagtaatggcaggcagaccttaccacatagacccggaaatcaaccacggtatcgacgagttgatagcaggttttgacttggttgtaatcggcgaggacggaatatccgacattatggaaaaacaaccaagaaaagtccttaaccagtggacatatcaggctcgtatgtaccaggccgcaaggtatgtttgcacacagccggatatgcagcttgtgcagcttgtaagtttcggctgcggcacagatgccataaccaccgacgaaatgagagatattttagagggcggcggcaaactttatacacagcttaaaatagatgatatttctaaccttggcgcagttaagataagaataagaagccttattgccgccatggacgcccaaaaacggcggaaagaaaacagtgaaaggagctctttgtaatggcagaattgaaatatgacgaaaccggccgtcttctctttaccgaggagatgaaaaaggaatataccatacttattccgcaaatgttacctgttcactttaccataatgcgccagatttttgaaagtcagggctataagtgtgaaaccttgggaggcgacccacgagaaattgtggatacaggccttaaatatgtacataacgacacatgttaccctgctcttttggttatcggtcagcttttgacggcggtaaacagcggcaagtatgacaaggacaaaatcgcccttttgataactcaaacaggcggcggctgccgtgcatcaaattacatccaccttttgagaaaggctttaaaaaaggcaggctatgagaatatcccggttatctcattaaacctttccggtatggaaaagaacccgggctttaaactttcggtaaatcttataataaaaatggcttttgccatggtttacggggatttgattattcttttggctaaccagacaaaaccttacgaaataaataaaggcgaaaccgatgcccttgtggaaaaatgggaaaaacttcttgtggaaaagttcaaagaaggggtaaaaatcagccgtaaggatttgcgccttacaatggataaaatttgcgccgactttgcaaaaattcaaacaaccgaaaagaataaaaccagagtaggggtcgtaggggaaatttatgtaaaatattctcctttgggcaataacaaccttgaagaatttttgtttaatgaaggctgcgaagttgtagtaccgggtcttatggactttatcatatttaaaatctataatcgtgaggtcgatgttgacctttacggcggcagcaagttgaaaaaggctgtggcacactactttaaaaagtttgtggaggcaatacagcaggatatgatagacgttataaacaagtaccccacataccgtgcccccggcacattcagccatttggaacatttggctatggaatacctgggcccgggcaacaagatgggggaaggctggcttttgacaggcgaaatgttggagcttatcaacgacggcacaagcaatatagtttgcacacagccattcggttgcttgcctaaccacattgtaggcaagggtatggtaagaaaaataaaggacgattacccggacagcaatattgttgccatcgactatgacccaagtgcaacaaaaattaaccaggaaaacagaattaaacttatgctcagcaataccggcaagatgaaacagtttgtaaagccggatattaaaggggaataatttaataatgtgactaagtcaccaaagcacgcagaataaaatgcgtgctt

SEQ ID NO: 778 - DNA, 11687 bp, Unknown
  16S sequences of unknown bacteria
cgccattacgatatccaccagcttggacaggaccttgcccgtatcctcgatagtttcgtggccgcccagctggatcatgccgggaccgagatactgcgcatgaccgcccagctgctgcatcgccgtttcaaaggaaaccctcgtccgggtagaagactgctgaaaaatcattcccaaagtctgatttttcagcagcggcggataatatcccgcttcaatgcactttttgatttccaaagagagctcgatgatatccatcagttcctgctttgtaaaccggtttgtatcgatgaaatctttcattttttcgcctccattgtgattttcatttttaacagttcacaattagtatggcgaaatcattgcagattatgcggcggaaaccggcgggaaacagatcgtttaaacagacacaaaaaacggcaagacgaagaatgccggaaaaacagcttctttaatcattgaaaaagtgatcaggaaaatacaaaaagaggagcatgtgacatgctcctctttctaaaattttgcattttattttactgtatttttttccaattctgaaaaacagatccgccgctccgagagatcagaaccgttcttctccgggctgcgtctcagctccgatcgcctccgtctcttcagcaggctgattcagctttgcggaaaaaaagtccgccatatgccccatagagcggacgagaacgcgtttctgcacgttgtccatatcgcggatcgcctcgtctacgatcctgtaataaaattgttcatgacgttccaaagcggcccgtcccttctcggtaagactgatgcggacgattctgcgatctgcatcatcgcggatgcgcatgacaaacccttttttttccagtttattgatcgcgatggagagagtactgacgttgatcagcagatcctgagcgatcgtgctcatggttttgggcgcgcggcgtcccacggccaccagagtgtgaatctccgagacagagagttctccgctttcagccgtttctttcattgccatctcctctgtcttcatgaccatattaaatatactgagcatctgctgcttcagcttcttcacatagtaaacgtctttgtccagcataatcaaacctacctgttctgtcaaaaaagtgatgtctgcccgaatcccctcagatgatataaatacattatatcacatttaaagtacagatgccacgtgactgcagtcaccggattatccgattacgaacattatttcacactgacaagctatgacaggtttttccggaaccggctccccggctccggggagaatcactgccgtgcccctggcggttcccgcccgggaacccagcttttccatttctacgtgaagccgcagagtatctcccggcgtcacctgactgcggaatttcgcgttcttgattccgccgaaaaaagccagctttccacggaacttctctctgctgagaattgcgacagccccggcctgggccagagcttccacgatgagcacgccgggcatcacttttttctgaggaaaatgtccttcgaaatagtattctgattccctgacatatttaatcgcggcaatctcgcccttttcctcatccattgactcgatctcatcaatcagaagaaacggatccctgtgaggaatgatttccattatctgcgctctgtccattaacgccatatcagcctcctgtctgtctattttcgtgccggcctctctgcggaatccgcttcggccggcgtctttcgtctgcggcggtcaattttttaaattttaccattcgctccactttttaaatatgataacgccgttgtgaccgccgaatcccagagaattggaaagcgcgtactccagatccgcatttctgcctttcttcggaacataatccagatcgcattcttcgtcgggaacttcgagattgatggtcgccggaatatatccgtcttccagcgccttaacacagataaacgcttctaccgcgccggctgcaccgagaaggtgtccgatcatgcttttcgttgaactgacgggaatctcatatgccgcctccccgaataccttcttaatggcattggtctcgaatttatcgttatacggagtacccgtaccgtgcgcgttaatgtagctgatttgctccggctgaattcccgcttcgttcagagccagttccatcgccttcgcatttccggcgccttcgggatccggcatcgtgatatggtaagcgtcagacgtcgctccgtaacctacgacctctgcatagacatgcgcgcctctcgctttcgcatgctccagatcctccagaatcagaaacgctgcgccctcgcccatgacgaaaccgtctctttctttatcgaaaggagtagaacatctgtccggatcagtacgcttcgaaagcgccgtcatatttgcgaaaccggcgaaagaaacgtcggcgaaagacgcttccgtaccgccggcaatcatcgcgtcgtaagcgccgctcttaatattgcggaaagcttcgccgatagcatgcgttcccgtggcgcaggcggtggtaattcccatggaaataccctttgctcccgtctcaatggagatgtttccggcgatcatattgggaatcgtcatcgtcaccataagaggagatactctggaaactccccgttcaatcgccttttttgtctcagcctccaatgtcatgattccgccgatccccgtacctccgatcactccgaatctgtacggatccacattctctcccgccttaaggccgctgtccgccatcgcttctctcacagctacgatagcatactgagaggagaggtccagccgcttcgcggctcttttatcaggaaatacgaaatccttgacctctgcgcccatgcaggccttatgtcccgccgtatcgaaatgagtgatctggccgataccgtttttttcatgacggataccgtcccagaaatcataactgttgtttcccaccggacctacgacgcccattccggtgattactacccttttttctgccatttctgtctatacctcctaaatcgggtctgctctctgcccgttgtctgaccttataaaatcatcccgccgtcgactccgatgatctgtcctgtgatataagccgcgccgtctgaagcgagaaacgccgcggccttagccacgtcctccgcttttccgtaccttcccaggctgatttgtcccagtaccagttctttttgtttttcggagagaacggtagtcatatcggtctcgataaaccccggcgcgatagcgtttaccgtgatatttctctttcccagctctttggaatttgacagcgtcataccgattacaccggctttagaagcgcagtaattagcctgccccgcatttcctctgacagcggaaatagaagagagattgatgatgcggccatacctttttttagccatgtgcgctgctgcgtatttcgtaaaatgaaacgttcccagcagatttgtatcgacgactttcataaaatcttcctgcgtcattctcagcagcagtttgtcatttgttattccggcattattgacgaggatatcgaccttcccgaattcctcaaccgcctgttttacggcctgctctgcataagctccgtcggccacatcgcctttggacgcgatgactttcgtaccgtacttttccagttcggcggcggctttcgcagcggcatcttcattgctgcggtaacagatcataatatccgcaccctgttttgcgaactcctccgcgatcccgaaaccgattccccgaacacccccggtaataatcgcgcttttcccttttaacataggtttacctcctgtaatctttacaggacagacgcccgttcccacggttccgtcctgcagtacccggatggatttcttctgaagcggagaaacacatcccccgctttttcctgcgatgtacgccccgctgtcagctgtctctccggcagagttccgacagcgcattttccagcgattccgcattctctacgttatatgtccggattgtcttatcgatcttcttcaccagaccgctgagagtctttcccggaccgaattcgatgacagtatcgatcccctgcgctttcagattttctacggttttgacccactgtaccggactcataagctgaagcgccatagcgtctgcgatatcttccgcagtctgaggcgagctcagatcatctgcaccgttcctgcgatattctgaaatcggacgcgccgtcaggttcgagtagacggggaaatcgcacggcgtaatttttttcgtcagaatgagactgcgcatcttctctgacgccggagacatcatcgggctgtgaaacgcgctgcccaccgccagcggcgtcacccgcaggcgcgcttccttagcgatttccgtaaagcgcgctaccgcttcccggtctccggaaaccacagtctgagtgggagcattgatattcgctgccacgagaatcccgtcctgacgcgccagctctacgcattccctgactttcgcaggatctccgatggcagcggccatggttccgatattttcaccggcttcgtttcttccggcctcgcccatatagcgacctctgtgttccatcagttccacaccatcggcgatgccagagatcactccggcggccgttagcgctgcatattcccccagactgaatccggccatcgctgcaatttccgcatcctccggtttctgcgcctgaaaacgtgaaaaaaattcctcataagccgccatcgtcaccgtatagacgcacggctgcgtattttccgtaagcttcagttcctctgccgtaccttcaaaacacagctgcttaatcttttcaccggcctcgtcgaacacccgacggctcttttcgtacttttcatacaagtctctgcccataccggggtactgcgccccctggcctgcaaacaaactagcgattttcatctgcctcgcctccctttctgcacctatttgccgatattacgttctgtaagaacatttcttctgcggaaaacatccgccgcatccgccatgatatcttcgatgatctcctgcgcagtctgttcttttcttaccaagccggcgatctggccggacatgacagaacctctctctacgtcgccttccaccacggctcttctcagtgcgccggtgcccagctctacgattttttccggatcttctccccgcttttccatccgcagcatctctctcgtcatcttatttttaatcacccggacgctgtggccggtacttcttcccgtcactacagtagaagaatccctggcatggaggatttcatccttatacgcctgatgggcgttgctctcttttgccgtaacgaaacgcgttcccatctgaacgccctccgcccccagcataaatgcggctgcaaaacctcttccgtcgccgataccgccggctgcgatgaccgggatatccaccgcatccacgacctgcggaaccaatgccatcgtcgtaatctcacccagatggccgccgctctccaacccttctgcgataaccgcgtcagcgccaaccttcgcaactctcttcgcgatagctacggaacccgccacaggaatgaccttgatatctctttccttcagccgcggaatatattttcccggatttccggctcctgtcgtgatcactctgatgtcctcgtcgagaaccatctgcatgatatcgtccacatattccgacatcagcatgatgttcaggccgaacggcttatcggtcttttctttgcacgccctcacctgggcctgaatcgtgtcgatatcccacggaccgcatccgatgattcccaggccgcccgcattgcttaccgcagatgcgatcgatgcatccgctacccaggccataccgccctgaaaaacaggatatcgaattcccagcatctctgtaattttagtgctgagctgtggtactccattttccatatattatcctccgaatcgtttctcttttatttagtttgataagcaaaatatatttaagtatatcccgacacgccttccatgtcaaggctcacctccgtttcctccggtgaggaaaaacataaaaaacggtcattttttcatggaatgcacacatctgcccaaccgcgcgcatctaatggcagtaataaaaatatcatctgcagaaaggaatgtgaaaaaatggatgaaaacaacaacaaatcccgggtaaactacggccgtcgagccggtattttcggcgtcatcggcaattgcgtcctgtttctgatcaagtttatcatgggaaccgccagcaacagtatcgctgtcatcgctgacagcttcaataatctcatggactgcgccggagcctgcatcacaatcatcggctttcacatctcgggaaaaggacgggacagcagacatccttttggtcacggccgggcggaatacctctgcggcctctttatcgcactgatcatcatatctgccgctgtctctctggcgaaaagctccgtccagcgtctgatctcgccggagcctcttcacgtgacatccctgatgtttctggtaccgctgatctccgtatcgatcaaaacatttctgatcatatatatcacgaaaataaataaaaaactgaattcctccgcgctgcgggccgctgttcgggaagactatgccgatatgctcatcacagccctcaccatatttacgctgatcgcggcgccgcacaccgcactgcccatcgacggaatcgccggccttatcatcgcggtctttatcatgtggtccggactcaccgcactgaaagaaaacatggatcttctcatcggcaccgccgccgacaccgggctttccgaggacgccagagccgttgtcctcgaatatgacgtctttgaaaaaattctttcctttaccgtacacgattacggcccctccgcgaaactggccgtcatctgcgtatccctgaatcacggatgctgcggtgaagccggctgtgtctccgccgccgtcgcggaggtatcaaaacgtctcagcgaaaacctgggactgagctgcgtaatctactgtgacccgaaagagatctgactgcggcgtctttcccgaaatcaaaaggcggcaaagacgccgcataatctccggagacagcaggaagtacttctgcgccgcagccgttcttctcgatgtccggcggaaaaagaacttctctgtccgtccaaaaaaaatccgaagtcttacagatcctgcaagacttcggatttttgattctgccgtcccggaaataccgggccggcgtttccgaatttaaggtatctctgtctctctcactcttaacattggccattttttgcacaaagaaacctctttcgtataagatcctattaaactatcaaagtttttcaccgatggataccgctgtacagaaaaagaaaaaatatgccatatctttcacaccgctgtgatattccccggaaaaaattaactcagaaaatactcagcatagtacccttcttcctccggttcagtatgccacgcatatctttcgatcagccgataacgtccgttgtcatactcgatctcttcccaaaaactcggatccttggcggaacagccgttggcttttccgaatctcaccgcctgataactttcgaatttctccatcttcgccggttttccttccgcctgcagtttctttagcctctgaagcgcttccctctcatcggtataaacattcagatcctgatcgagactctcgagatagactgcaaacaatttcttcatagaattcctcctctgtacgacttccgcagccgtccggagctttctgcgggcggctctctgtgtatattataatatatttctttgtataccgcaagaaaaataataagcatgcatattatttatcctgtccccgactttaccgcctatcatttccgcaaccataaatatatgcaccatccccgtcatttattcatagtataaatcaacacgatacagagcaggcagaaagccgtcagagaaagcggatgcttaccgcccccgggcggccgtgccgacgatatgagaggagaatacttatgtgtagcaaatgcaacaaccaacacacaaaatgctgccgccccatatgtccggatgtttcctgctggtgcagacctgttctgatcaccccatcgagaccagaaagcggcagctgcggctgccagaataacgataactgcggatgcggctgccagaacaatgacagctgcggatgcggtgagaagaaagaaaactgcagatgccgtaaatgctggcggcctccgacgatgatagcgccatgcaacacgtgcaggccgcggcctccgagacctccaagacctccgagacctccgttccggccgtgcgaccgctgcgatcagccttactggccgatccagccgctctaatgtgcaggccattcccgccgctgcagagctggggctgtattccgtgcccgccgcaggaagagaacagatgccactgtcctccgaaagattcctgccgcgaaataccggactgtccgcccccgcgctgcgaaccaccgcactgcagacggccgggcccggaaatctgtatcagccggccctgcggctgcgacagccgtcctcagccctgcaaatgtcctccgtgtccccctccggagccttgcagagaggactgctgcagtccgtccgggaattctgacctgcggcgcatcatcgatctgctctgtcagatactcgataaccgccgctgctgacggttccgacggatgacagatctgtccgaagctcaattccgaaatataaacatacaatcgttacacttggattccctgccctgcacggacagtagacgcagacagacgcccatccgattcgcagaagtatattcgcagaaaacaacgcagccctaagatgaattatttgatgaagtgaagaataaaaacggtatgcgacatcggattcccgtgtcatatcggccggaagcttttttcgaaaatctccggactgaatgtctgagacagaccggcttggtatcttaccgccggcacacaaagatacgcatctgctttcagccggaaaatttctgcagcgctgaatcaaccgcatgactacggagcttacatcagaaaaagaaacttcccatgcgctgcagactgtgagcttatgcacatacctgcaccgactcctgactccaatggtccgacatccgctgaggaaaaaacaccatttacatcactcaccgtactgaaattcaaagctaaaaatagttagcacagcctgactcgtatcgtgttttatacgcatcgtcaaatgacgatgcgtatttcttatagagcaaaaaacagtacgggagcgattgtaagttcgctcccgtgccgttttgcatttgttttggttttgtttcgtgttcgttttacttttgatttttgttggagagatttttatgaaaagaattctgcagcaaggattcgtttttgtcttcctccctgctacgtgtatatagtaccgccgctttgtgatgagtttgtaaagctctcctgaagaattaataaacaaaatcctactaaaatactacgccgccatatcccccatcatcggatttcaatctgacacgcatccatcgctgcaagggcggtccggtgactttccggcgtcaccccggcacagcagtccgaatggacgattatcgatgcttccggaaacgccgctttgcagatcatcgcgtttgaaatcacacagatatctgtacataatccggcaagatgaatttcctccggaggttctccgccgctcttttcaaggagaatcttcggaaggctgtaggccccgaatgtggttttatctacgaccgcagctcccggactcatgcacgcggcgacttcgccgcagatctgccagccggcagtcccttcgatacagtgcggtaccggcagttttccgccctcctgtgtctcaagataattctcccgatgcgtatctctggtataaattacatctccgtcaaaaccgcggatcagccggcacacaggctcaacgataccgagagcctccggcgttcccagcgcctgcgaaataaaatcattctgcatatcgataacgagtagatatttcatctccgcatttcccctcctttaccgtgcgtaaaacaccgcctacagtaatatgacattcctcttaatattagtttaacacgtttccctccagaatacgccatctttctgaaatgaagatgaaacatagacagatcattcacaggatggattttcatcggcaataataaaggaacgactgcagtcttgcccagagcgaacgacaggcgggacattattctgaaacatctccttcatgataagaggatcgctttttttattatctttccgttaaaataaaagcaaccattgggcccgtactgacttatttcgcttatcactactctattatgaaaggaaccattatgacaatcaacgccatcaaagacgaatacctccgcatctgccgtttcgaaaggaaattatcccccaacacagtaagagcttacgcttttacactgcaggatttttcagacttcctgaaatcagttcgtctgacggaaatagaaaaggttacaaaaaaagaaattcacgcttacattcaacatctaaacagccgtttgaaaccgacttcagttcttcagaaaaaagccgtcttacacgcattttttgaatacgctgtggcggaggaattcatcgagcattcccctttcgaccatgtaaatatccggataaaaaaaccttctctcctccccaagtccctcagcgaaacggagatcaaccgcattatcaacgccgcttacgacgatgaaatcggtcaatgggatggaaattccggcatagaacgcatcattcacatgcgagactgtctgattctcgagacaatgtttgctacaggtatgcgcgttcaggaactctgcgaccttacggcaaaatgcatagatttcagttccggtacgattcgaatcataggtaaaggcagcaaagagcgcaaagcctatatcgttgaacccgcgattcttatgctgtatcaggattataccgcccgacgtgcgctgctggggctgaacgacccccatattttcattacacgccgcggctgtaaaatgtcaacgcagtgcgtccgtcttcttttggaaaaatacacctgtatggctggaataccaaagcacgtcaccccacacatgatccgtcatacttttgcaacgctgctgctcgaagaaggcacagatattaaatttattcaggaattgctcgggcacagttccatcaccaccactcaaatctaccttcacatcaacgagcgtgcaatccgaaatacgataaccgagaaccatccccgcagccgtatgaaaatcaacagcccctatgccggctgttccgacgctgcccttctaaccttagaaagctaatccctcttgacagctttgctgtccgactcttatggccggaaatttttgcgtgacatagaattcaaatataaatcaaagtcttccttatatcgtatatttcttatttacgaattattttcatccatacatatggagggtcttctctaccatcgctgatttccagatctccgcctccgacaaatacaaacccgccgccatccgcattatagaatatatctcaaaatcttctgaaaaaaatgtcaaattatcttcagaaggggcggatagtttgtgctaaacagaaaaat

SEQ ID NO: 779 - DNA, 2274 bp, Unknown
  16S sequences of unknown bacteria
gaaaaaggctttgccaagatcaaggatttttttgaattggcgcccgatgtcaggaaaatcacaattgatttaaaaagcccaaaggatagcatttccgagctgaatgtatttggtcagggtacgctgccggcctcggtacaggtatgggagaacccggcgaaaagggcagacctcatggtggtctcggcacatgaggacgacgagctcctttggttcggcggcacgattccgacctatgctgtggaccagggcaaaaggacggttgtagtgtatatggccaactgcggacgtctgcgttgcagcgaggcgatgaatgggctatgggccatgggcatcaaaaatcatcctgttttcaaccattttccagacaagcgatccagaaccttggaagaagggttggaaaattggggtggagaagatgctgtggtagcaaaactcgtggaaaacattcgccagtataagcctagtgtggttgtgtcccatgatataaatggcgaatatgggcatggtgcgcataaggctacagcctatgccgtgcaaaaggcagtgggattggcacaggatgcgacaaagtacccagagtctgcgcaggcatatggcacctggcaggtgaaaaagctgtatttgcatctgtatcatgaaaatcccatagagatggattggcatcaacccttgcaggcgtatggaggcaaaaccggttatgagatggcatgtataggctatgccgaacacaaatcacagcaggatttttaccagatgcagcaaggcggcaaatatgacaacgcgaaattcggccttgcctatactacggtggggcaggatacgggaaaaagagatttctttgagcatattccgcacaggggtgcagtatccggtggagatgagggcccttccccagggccggaggaaagcccagcgcctgtgccggcaaagacagatcagggcaggggcataacggctgtgctgttgattgccgccttgttggttttgggcggcgctggctggtttgcatggtaccaacagaatcgttgtccgcacaaggtggtacaaaaccggcggcgaaacaactgtagaagatagaagaaaacaaaaagggctccttttgcaaggagttctttttcatattcaaaaggctaaatggcctgcaagacggcaactgaaatttacgattatgcatcagcggccgtattaacgacaaaaaacgtattttttcgcaggatgcccgcatatggataagggtgaaattatccgataggaggcactgttgacgatgaatccatttcaaatgaaatccattccgattgaccgtacgatccaaaactggtgtcagctatatccaaagtcctacaacaaaaatgagacggatccttatacgaaatgccggatcattctcatgaacggcacggaatttgaggccgtttggttttcccatcaatttcaaaggcattgccccaacaatgacttaagacgggaattggcgctgacaagaagaattgaacagcagcagcaaaaaaagatttccaatctaaaaccgatagatgagagcatcctggaacaaacaatttcctatgagcagctggccgtagacctaaccgcagcgctggcaaacatggaacaggacccacatgtaaaggcagcgatggatttcgctctgctggaggattttgaccacctgtaccgctatgccaacctgctggaaatggaaagcggcatcgccgcagagcagcttgtaggcggctataccgagattatgccggggcggcctaccatcgcacatcatcggtatccgtttgaatctgtcaaccatgataccaattataagacggcgaacctgcaaacaaaattgaacatcggcatcatcactgctgccgagcagcaaacgatgaactactatatgaatgcgggcgctttctatacatccgacattggacgccagctgtatcaagagatcggcatggtggaggagcagcacgtttccgaatatggaagcctgatggatacgacctccacctggctggaatccttgctgctgcatgaatacaccgaatgctatctctattattcgtgttatgagacggaagtggatccctatatcaagcaagtatgggaacaatgctttgaacaggaattggcacatctgcacagggcagcacagcttttacaaaaatacgaaggcaaggattggtgccaagtgattcaaaatggagaattccccagcgtactcaaactgggatccaacatcgaatatgtgcgcgatgtattggcggcgaccgt

SEQ ID NO: 780 - DNA, 4336 bp, Unknown
  16S sequences of unknown bacteria
tggatccagggcaatgcccgctactgcgcggcgctgggcacgcccgaactcaaagcgcgcgttacggaactttgcgacggactgtacgagatctcgaaagtttcgcccctgttcaacgacgggaaatccatgtacagtttcgaaaagtatctgcgaggctgtctggacctgtataccctctgcggtctggaaaaggggttggaaatggcgcagcgcatggtggacgcggtgaaaaacgaccccgcgtacgcgaacgccgaaaaacgcttgggggataacggttccgcgagcaacccgcaggaaatcgagtggtacaccatcgccgaatctctgtacgcctttgcggacgcgttgaaagccgcggggcgtcccgccgcagaagtcaaggaatacgcccgctttgccgccgaattcgagtataaagaattctggaacatcttctacgaaaacaaaaacttctacgattaccgccccgtttcggggcagaatatccagcatttccacgcgtacagtcatctgaattctttcaattccgcgggagcggcgtacggttggagcggcaacgattattacgtcgattccatgatcaaattttacgatttcatgcgcgcggaacaggaatccgctcccggcggctacggcgcgcacaccgaatggctgctgccgcgcgaggatatggtggatgccctgcaaaaatatcacgacagttatgaaaaccagtgcgacacgtacgccgtgtaccgcctaggcaacaaactggcgggctacacaggcgaggcgaaatacggggattggagcgaaaaactcttatacaattccacgatcgcctcgctggaaacggaggacggctacgccttctattattcggatttcagttcggcgggcgggcagaaaaacctgcgttacgactggcgctgggcgtgctgcgcgggctcgcggccgctcacggtgaacgaggtgctcaaaaccatctactatcaggacacccgaaatctgtacgtcaatcttttcgtcaattccaaagcggagatgaaaaacgccgcgggcggcacgatcgtattgacgcagcaatcggattttcccgagagcgacacgatcgtctttaccgtagaacccgaacagccgtccgatttttccgtcaagttccgtaagcccgaatggctttcgggcaaggcgcaggcaaaagtcaacgggcaggcggtcgggctttcggaggacgaatgcggctggctggtcctcagccgcacctgggaaaagggcgacacgatagaactgacgctgccttcttccctgaccgtgagcaaaatggaatacgaggcggactacggcaaggaaggcgtgttcgcgatcatgcacggtcccgtcgcattggcggcttccatgcagaaccctttgaaagaccccgccgacgtattggacggcaacggcgatatcgcggcgcagctcaaagaggaaggacctctcgcctatacggcgcttgcggacgaaacgctcgccgtcaaacccttctatcgctataaaaaacaggaactttacttcctgtacatgaatctatatcaatattaacggagacgcatatgatcaaaatcggaatggtgggaacgcatcaactgagttttcccggagagaaagagaacctgtacggaagaatgcgggaacaaatgcggaaaaacgcaagcgaaatgggcttcgaactgtacgcgtacgagaaactcgtcgtcacggaggaagaggcgcttgccgcgcgacgggcgctggaagaggagaaagttgactttctgctcattctcaacgtgtcgtactcggcggggcatctggtatcggcgttgtatcggatacgcggcgcgagggtgggactctgggctgtccccgaaggggcggcgagcgggcccgtgccgtacaattctttttgttcggcgaatatgtttcagggtatcaacgcgcactatctgcgcgattacggcatcaaaagcaagtggttttacggctttgcggacgacgcgcgtttcaagcgccgccttgcggtgaccgtgcgcgccctgcgcgcgctgaaaaaactgcgctcgtcgcgcgtcgcgctcatcggcgggtttgcgcccgggttcaacgatctgtatttcgacgagcgtacggcgttttccaaactggacggcatctatatcaaccgcctgcacgagtattcggagatcatcgcgatcgcggataagatatccgacgaagaagtgaaaaactgcgcgcaaagtctgggcgaggatgcgattcccaaaacgaaaaacgcggaaaaattatactcgctgagcctgaaaatatatctggcatataaaaagttcgcggcagaacacggctacgacgccctggcggtttcctgctggccgaagtttcaggatgattaccgctattcggtttgttcggtcctgggcatgctgaacgacgataagatcgtagcggcgtgcgaaggcgatctgatgagcgcgatttccatgctcgcgttgcaggagatgagcggggaaagcacggcgctgatggacttttccgcgttcgacgaaacggacgagagcgtgctcttatggcactgcgggcccgcgacgaaaaagttctgccaaaagaacgggtacaccctgggcgagaattacagcggcatggcgcacgagaaaggcaagatcaacggcgtgggcgttgcgcgggacatggagtttgacgaaacggaggcgaccgtcttccgtttcagcggggatatggaaaaatatctgaatctgggcggaaaattcatgggcaagggcaaaccgagtttctgcggcagccgaggctggctgggcgggctgaaaatgaatggcgaaaagatatccgcgctcgattttaccaacacgatcctcgcttcgggattcgaacaccattaccccgtcgcgaagggcgattattgcgacgaggtcgcggaactgaacgcctggctgggcatcggcgcgatcgaaaagatacggtacaaagatcatttgcaggaggcgaaaagatgaaaaacgatatgaccataacgcagatgatgcgcgcgtcggagaaactgaaaaaacagggacagcggttcacgcatctgggcatcggccccatgtcggaaaatttactgcgcgcggcgctggaactttccaaagaaaaagactttccgcttatcctcatagcgagccgcaatcaagtggacggggacgaattcggcggcgggtatgtgtgcggattcgatcagaaacgatttgtggcaaagacaaacgagatcgccgaggaaataggttacgacaacctctgctatttttgccgcgaccacggcggaccgtggcagcgtgacaaggaacgcgccggccgtctgcccgtaaacgaagcgatgaagatcgccaaacgctcgtacatagaggatatcgagagcgggtttcaccttttgcatatcgacccgacgaaagatccgttttgcggcaaggtcgtgccgctcgatctggtattgcaccgcacgctggaactcatcgaaacggtggaagcaaagagaaaggagttgggcattgagggcgtcgcgtacgaagtcggcacggaagaaacgatgggcggactgatcagcgcggaagcgttcgagggatttattcgcgaactgaaagcgaaactgagcgagcggaacttacccatgccgcttttcgtggtggggcagacgggtacgctgacgcggctgacgtcgaacgtgggaagttacgacagggctacggcgggcgcgctgggccgcatcgtggaaaaatacggcacggggctgaaagagcacaacggggattatctttccaacgaaattcttttagaacacccgatcatcggcgtgacggcgatgaacgtggcgcccgaattcgggttggtggagaccgaagcgctcttggaactgtgcgcgacggaagagaaatttaccgaggagaaaaaacgctcgaacgtgaaagcgatcgtgtcgaaatacgcgatcggcggagaacgctggcgcaagtggatggtgggcggaaaacgggaagcgagcgtaaaggagatcgccgcaaatgcggaggatgtagcgctcatcacgaaaatgtgcggtcattatacgctcaacgagccggaagtgaaagaggcgctttccaaactgtacggaaacctttccgcgctcggtttaaacggtcatacctacgtcgtcaagaagatcaaggacagcatcgaccgctacgtttactgtttcaacctctacggtctgaccacgaagttaaggaacgttctatgaaatattatttcgccgcggacatcggtccaaatgctgtaagcatacctaaaaacactagtataaatactt

SEQ ID NO: 781 - DNA, 32759 bp, Unknown
  16S sequences of unknown bacteria
ttcctgttcctcttgatttatccatttttgtatatacctttcaatatcctctcgacaaagaaacagcagtcagttatgaatctatgtataaaaagttaaagcaagagcccatgtttgaaaatgcaatcgatgtattggaataagatacagcattctgttagcacgattcttttataattgacaaaatacagaattctgatataatataattacagaattctgtattttaaattttaaaggagcacaccaatgacattacatgacttatcccaattactatatttaagaaaagaaattgcggtggaacaaagacggttggaagaattggaaaaagcagtagaaatacagcaaatctttcttcctaatataccgaatatttgtttgcagtcaatggacagcgaaacattgcaggaaatagaacgatgcaaacagttaatagagcaatgcatgaaaaaaagcattcaggaatacaaaaaattgattttatatattttacacattgatgatagtatgattcgccagattatatttttgagattcatacaaggccatacttgggtgcaggtagcagcagagatagggggaggcaacagtccagacagcattcgcatgatgatgaaacgatatttggccaaatgtaacatggagatacaatcttgatatttaggaaaaaagaaactattttttatggatttttggttgactttttttcaaaaaaggggtacactctatacagtactaaaatagtatgaatagtaaacattaagacagaggtgagcataatgcgtatgtttacgctttgtctgaacatacgtatgcgatgttcaggctgcaatatcacgaatgaatcatgaattgtatattgaagggagtcaggcaaaatggccaacatctataaaagtcttacagaactcatcggtggtacaccgttattggaagtaaccaattacgaaaaaaaacataagttaaatgcaaaaattcttgcaaagctggaatatttcaatccggcaggtagtgtaaaagaccgtgttgtaaaagcgatgattgaagatgctgaggcaaaaggtcaattaaaagaaggttccgttattattgaacctaccagcggtaacacaggtattggtttggcagccgtgggtacagccagaggataccgcgttattttaactatgccggaaaccatgagcattgaaagaagaaatctggtaaaagcgtatggtgcggaagttgttctgaccgaaggtgccaaaggtatgaaaggcgctattgcaaaagcagaagaactggctatggaaattccaaacagctttattccgggacagtttgtaaatcctgccaaccctgcggtgcatcaagcaacaacaggtcctgaaatttggaacgataccgatggcaatgtagatgtgtttgttgcgggtatcggcacaggaggtaccatcagcggtgttggtgcttatttaaaagagcagaatccaaatgtacacattgtagcggtggaacctgcttcttctccggtactttcgaaaggtaccccgggtcctcataaaattcagggtattggtgcgggctttattcccgatacgttaaatactgctatctatgatgaaattattcctgtagagaatgaagatgccatggcaacaggaaaagaatttgctcatacggaaggggtgctggtaggcatttcgtccggtgcagctctttgggccgcaacccaagttgctaatcgtcccgaatatcagggcaagaccattgtcgtattgcttcctgatacaggcgaacgttatttatccacagaactttttgcagaataaaaacaatcccttcccaaaacgggaagggattgtttttatttttccatataagactgcaaacgttcttctactttgttccagttaatcacagaaaagaaactgtcaatataagcgttgcgtctgttctgatagtccagatagtatgcgtgttcccaaacatcaatcagtaacagaggctttttacagtgtatgggcggaatgttttgattgggagtttttacaatttccaaactgccgttgtcatatacaagccaagcgtatcctgaaccaaattgtcccagtgcggcttctttcagttttgttttgaatacatcgtaaaatccaaagtattctgctatttttgcagcaatttcaccgtgtggatgattttcgacggaattgcttttatgcatggaggcaaaatacagctgatgattatacacaccaccaccgttgttttgaaccgcagtacggatatctgccggtatatcgtctaaattgcaaagtaattcctctaaggttttgttgtgcagttgaggaaatggagccaatgttttgtttaaattatctacgtacgtttgcaaatgcttatcatgatgaaaatgtaatgtggattggtcaataaacggttccaatgcgtcataactgtaagggagcggctccaattggaatggataatgttgttgtttcatatgatacacctcttcatctttatcatatgtttagtattatccaaatgatgaaaaaaatttatgttagctcagaaaagaaacaatatgtattactttgttggaactgtcacttcatttcaggtacaaccatgaaatcaattatgcaagattgatatttgtgttccgaacctctttcaaagatttccaagagacaaaattgtgggttggaagagggaacaggaaactaaggaaaagaaaaaatttctcagcaaaccaaaaagaccttttccacttccgggaaaattgggcaaaatggaatattaagttttcctaataaaacattttgggtactgtccgaaatcaatttagatatatctgtaatagtatacttttacaaaacagtaatattttgtaatttaagcagtattataacgcaatatatcataaaattcaagtattttccctctattttaaagtttttgtaaaagtataattagacaaaaaatttaaaaaagtgcttgacaggagatgactaaaactgtgacaattagacagacagaggcttggtctgcctgttttggcatacaaaaaatagaaagcagaaagcacagtaagtcggcacgtatgtaaacacgtgcggatttactgtgcttttttacatatggtcaagcaaacgaaaggaggtgataataaatcacggttgcaaaattcaaaagggaattgttaagatgcagaaaggagattcagaaatgaaaaagggacataccatcaggaaaagaccgttggcactgttcatggctttgattatggtctttggcctgttgcccgtttcgggagtatttgcagcaacagagcaaaccgaagaagatgtggtaaacggcagtacgcctcaagtaacctcccaagtaaaatttttaaatagtgagcttacaaaagcagaaatcatttatactgttaatccggtcaaaaaagaaaccggttccaacattatttttcttgtagatgcttcaaaggctgcatacagcactactgtcaaaaatttggtcagtgctatgcaaacaaatttcagaggtgcaaatttgctggatgcatatgatatgccaaatcaagcacaaattattgcctattacggtgataacaccgaaccttatatatccgatgtggtttctacatctacagattttttaaatgcaatcaataacatgccgcagcagagcggtgaagatactgcaagtaatatagaacaggttggactgcaaaaagcagctcaagcagttcaaacattatcggccaatgcaaatcccacagcggtaatatggctgacaggaaataaagattatgataatgtagatggtttacaggattctataacatcattgaaaaatgttttgggggagaataataaactgattacctttgagacaaaggatgagccgtctactatttttaaaaacaatgcatccacataccaaaatacagaccgctctggtttgtcaatagcagcttttggtggaaatgctaacttttatcccacggattataatcgcaaattattcgatgtggtaagtgccttccttctggatacttataccgatgagccgctggaaggtaaaatttccggattgacatataacatttcatttacctccgctgtaacccatatagatgaaactcttacccaaggaagtattccggttatggaacacattatgggtccacttgttgatataacggtagataatgagagttccaataaaaatattcaattgtccactatagatcaatttacgcaacaagacagctatgtgattcggatggttgttgacctgcaagaaggtttagacggaaaacagacgattattgaaccgtttgcagtccagtttccgttgcgtacaggactttttgacgagaatgcgcaaacggtaacggtcaactttcctaaagttgaattgaattttggcaacaatacaattgcttatgatttaggcgaaggtgtaacgggaagtgttgaggaacaaacagcaaaagtaaatacgcaggttacgttaaatgacggagccggaattacaaaagaaggggaaacctttggcggctggtatgtgaaacaagctgatgatacaagtttggtaggaacccgttacaatggcggagccacgattactatgccaaacggcaacataaccttagcgccgctgtggggtcatgttggtgtgaagctggaggttggaaaggcaactcctgctgagccatctccggagcaacacagtatcttgaacaatgcaggaagtcaaggtctgctggattttagcgagagttacattcacgatgaaaaagtgggacagcgtgttacatctattgtgacagaaacacagggactggattatgagtatgcaaaggaccctcaagaccaatatcgtgtatttctgccccaggttccggaagcattgtatgcccgccagattggtgaggaaggaagtaatgtcattgcctatctgaaagatgataataacaatggttttactcttgtattgactgcaaatggaggtattgacgcaccttccgaaagcaatttattatttggagccaaagatacggataacgcatggaatgctaatgtaaaaagtgtcgatttaacaaacttccgtaccgataatgcaacaacgctggcatttttattcaatggaagcaaaagccttgaaacaattacaggcattgagcatctgaataccactcaggtgcaggaccttacagcagcattccagtactgcgcagcattaacaaatcttgatttatcaagctggaaaacagacaatgtaacttcagtttcaaacatgtttttccaaaccactcaactgcaaacagttacaggcatggatacatggaatatgcctaaattaacagaagcacgggcattatttgcctattccggaattaccaaagtagatttaagcaattggaatccgacagaattacgagattttacacatgtatttaacggttgttcaaatttaacagaagtcaaaattgaaaattgggaagtaccttatttagatggaatttcttatgctttctacaattgtacttccttacagaaccttgatttatctacatggaaaaacacaatcttattgactaattttaacgctgctttttatggttgcggaaatctaaaaacgttgaacctatcaggacttgtacataattataaagattgtgtattcagtttaacatttgaaggattgagtcaattggaaactttaaatatttctaattggattatcaatggttctccgtatacagaatgggaggctggtatttttgttatcagaggatatatagacagtatgacaaaactgattgcagatggttgggatattcaaatggatttagaaaacggattcagcctttggggcggagaatttgtgacaccgattaactatttttcacaaagatcaggaactctggaaatttccgtcaatgactggaacctaaacgaccataaggttgatttatctaccatatcgagtatcacaacaaaaagaaccaagagttttaccggatggaccggtctcagtggtgttaccaacatggatggaatgtttgaatatatggatgatgttgaaacaatctctattacaaatgaaaatcttgcgaatgtgagcaattttgacatgttctccggttataaagggacagcgtcacagaagattgatttcagcggctggacaggtgtaaatactgacagcgtatctaaagtattcgcttcactgccgtcaaatgcagcaaattctgtacagttaacagtcagcgatgacgaaataggaacggcgctgacacagtcactggaaacagccaaacaaagtacttatcaggcgaaatgcacaagccaaacggcgtctgtggaagaacgtgcagacaatacagaaaatgtggcaagtgcagttatttccatgttgccggtgttctatcaggcatctgctttgtctgtggacaatcagactataggagaagcaaattctgctgtttggcacagcactccttccaatacaggtgaaacatatgatttaaaggcaacgattcaatttgcaggtaatgaaggcgctttatctggtaaagacgtgcagctgcgtatagaattaccggaaggaatggaaccgactgatacttcagcaatcattacaggggactttgcgtattttggaaatgaaggtcagtatcctgagagtggttctgtcataacagaggcagagttaaaacaagagaacggtaagtggattatgactgctaccgttggagatatgtttgcgggaacccaaattgaaataagttttccggtaaaactaacctcaaatggagtcacagagggtgcatatcaggtatgggatgcacaagccaaagtcaatgacaatcattcttccgcacaggcgacataccgtttttggaagcagaatgaaataccgcagcccggaaatgaacagcctgttatcaatgcagcggatatcgaattaacggttggagattcatttgatcctctggcaaatgtaagtgcatatgataaaaacggggttgacctaacctctggtatcaaagtaatagaaaatacggttgacacaaccaaagcaggagaatacaaagttacttatactgtaaccgatggttacggagtaacagcgacaaaaagtattaaagtaaccgtaagagaaaaaacggcttcgggacatatgaacgataacttaaattcggcccaaacaggagatacaacaccgttggtactgcttgcagtgattggcgtaacagcagcagtgctgtgtacggcagttgtacttgtgggaagaaagcaaaaaacaaaacaaaagatatcatatcgtgtgttatatcccataagaacagaataaaatattagaaatcaccgagtataacgtacatatactcggtgattgttgttttatatatccttgctttaaggagtaagttgtacatttgataaaaagaacctctatagtatgcgtgtatttgtttttttgttgggtggatattccatgtcgaaatgctgctataaaacatatgaaatttgatattaaagaaatatgatatcatagaaatcttactttgttttgaaaaatgattgtgctttgaccatagaaagtgatataataatttgtactgaaaaaataagcggacggaggtgctgattatggatgttcgtcccggggataaattaatgatgaaaaaacaacatccctgcggcagcaaagaatttctggtgttgagagccggtatggattttaaaattcgctgtatgggctgtggacacgaaattatggttccgcgcctaaaatgtgaaaagaatataaaaaaaatcatgcgggaaactacagagtcggagcaatagcgcagtagcggtgttttgggatttcaataaaaatgaaaaatttggagtgcagctatgtttgataatttagtggtgtttgaaaacagatataatgaaatcaatgaaaaattgtatgaccctgatattgtttccgaccagaaactatatgcggagttaatgaaagaactgaaaaatattactccgatagtagaaaaatacaaggagtatcaaaaagcgtccacggcagaagcagaggcaaaagaaatgctggatgcgggcggtctggataaagactttcgtgagatggtagagcaggaactgaatgattccagaaaacagctggaagtcattgcagatgaactgaaaatattactgcttcccaaagacccaaatgacgaccgcaatgtgattgtggaaatccgtggcggtgcaggcggtgaagaggctgctttgttctcaggcgtattgtttcgtatgtacagcatgtatgccgaatccaaaggctggaaagtggaagtgctcaactccaatgaaacagagcttggcggctataaagaaatcagctttatgattacaggtgaaggcgcttattcccgtttaaaatatgaaagcggcgttcatcgtgtacagcgtgttccggaaacggaaacacagggccgtgtgcatacctctaccgcaacggttgctgttttggcagaagtagatgacgttgagattgaaatcaatccggcagacctgcaaattgatacgtaccgcgccagcggtgcaggcggacagcatgttaacaaaacagagtccgctatccgtattacacacttgcccacaggtgtgattgtagaatgccaggatgaacgcagtcagctgaaaaataaagacaaagccatgaagattctgcgttcccgtttgtatgaagcaaaacagaaggaacaagacgctcagttggcagaagaaagacgttcccaggtaggaacgggcgaccgttcggagcgtatccgtacttacaactatccacagggcagaattaccgaccacagaatcggtatgaccgtatataaatttgacgatatgttaaacggaaacatagacgaaatggtagatgctttgattaccgcagacagagcggcaaaaatcgaaaattccattgagtctcaggaataacggcaagcagaaagaggggattacaatagaaacaaaacgattaaacggtaactgtgccgaagatattgtaattgccgcagaactgttaaaaaacagcggtttggttgccattccaacagaaactgtatacggtcttgcagcagatgcaaccaacggggcagctgtggaacggatttttaaagccaagggcagaccacaggataatccgctgattgttcatatttcctcttatgaacagctggcgcaattggtttctcacattcccgaacatgcaaaacgtcttatggagacgttttggccaggaccgcttacggtcatattgccaaaatcaaatttggtgcccgaccaagtcagtgcgggtcttcctaccgttgccgttcggtttccgtctcatcccgtggcgcgtgcagtcattcaagaggcgggagttcccttggcagcgccttctgcaaatgtttcaggcagtcccagtccgactgccgcagcgcatgtactgcacgatttagatgggaaaatcgacgcggtcattgacggcggtccatgtacgatagggttggaatctacggtcataacgttggcggaagaaacacctgtactgctgcgtcccggcgctgttacattagagcagctgcaacaggtattgggtacggtcaaaatggccgatgctgtgttgcatcagttgaaacaaggctccgttgccgcctcaccgggcatgaaatataagcactacgcaccaaaagcaaagttgatattgctggaaggttctgacgaggcattttttcattatgtgaatgcgcacgcagcggaaggggttgcagccttgtgttacgatggacaggaaaactgtttgtgtgttcctgctattacatacggaaaaaaagattgtcctcaggagcaggcacagcaattattccatgcgttgcgtaaactggatgacttgaattataaactggtttatgccgcatgccctcaatcggaagggctgagtttggctgtttataaccgtatgattcgtgcggcgggatttgaggtgcaaacacttgactaagatattgggattgacaggacctacgggggcaggaaaaacaaccgtatcccgactgtttgcggaacaaggctgcatcattctggattgtgacaaaattgcaagagaagtcactacgtatcatatagactgtttaagagatttatgttatgcttttggcagtgacattgtcaatgaaaaaggaatcctcaaccgtacgcttttggcacaacgtgcgtttgccgacaaagagcagacacaaaagctgaaccgaaccacacatccgtggattgtaaaggaaatccgtacgctcattcagcagtatgaaaagcagggagcaaatgtgattgtgctggacgcaccgactttgattgaaagcggattatcacaggattgtcataaaaccattggggttctggctcctgtgcaggtaaggctcaaacgaattatacagcgcgacggactaacggaggaacaagcgcttttgcgtattcatgcacaaccggaggattccttttatctgtcacaatgcgatgtcattttagacggttgttcggcaagtgcggaattatacgagcagatagcagatatagtaaggaaggcaggatgagtacaaatggcaaacacacatgcaaagtcttccgggaagaagcgttccaaacataaaaaaacaccttcctcaaaaaagtttgtatattctctggtaggaatcctaatgatgatttgtattgtgctgggcatttattttgtcagcggtggagaagagcaaattcaaaaaagtattcatcctttgggatacagtgaaattgtagaacgtgaagcgcaaaattatcatatagacccgctgttggtttattctgtgataaaagcggagagcaattttgacgccgatgcagtttccaatgcgggcgctatgggattgatgcagattatgcctgaaacgtatgagtggctggcttccaaagagggaattactgacgtttctcaggaagatttactcaatcctgaaataaatattaaatatggatgcatgtttttgtccatactattggagagatatccgcagttatcttctgctgtagctgcttacaacgcaggatttggcaatgtggacaactggcttgaggatattaccattgcacctgacggagaacatttggaacatattccgtttcccgaaacagaacagtatacggaaaaggtattgaaaaactaccggcagtatcaaagattatatgaagaatttaattcgcagtcagcgaatgtttaggaggtaagcatcaatgagtaaaaaagcagaaaaaacatctgtagaaaaattaaccgaagaattgttgattaaccgtaaaaacggttttatggacgtaacagatgagcaagtcaaaaaagcagataaattctgtgaaggctataaaacatttttaaataaagcgaaaacagagcgtgaagcagtatttgagaccattgcgtatgcagaaaaaaacggctttgttccatttgacagagaggcttcttataaagcgggagacaaagtatattataacaatcgagataaatctttaatcttggcagtcattggtaaagaaggctgcaaaaacggtgttcgtatggctgcggctcatattgattctccgcgtcttgatttaaaaccatatcctatgtacgaagccaacgatttggtattgtttaaatctcactactacggcggtattaaaaagtaccaatggaccaccattccgctggccatgcacggacgtgttgtacgtcgcgacggaacgtttgtagacattcgtttgggtgaagaaccggacgaaccgcaattctgcgtaacagatttattacctcatcttggcgcggaacaaatgaacaaaacattgtccaaagccattgaaggtgaaaatctgaatattttaatcggcagccgtcccattcgcgcggataaaggttccaatttattcaaattgaatattatgaagctgattcacgaaaaatatgatattgtggaagaagattttgtatcagccgaaattgaatttgttcctgcgtttcctgcacgcgatgtaggatttgacaagagtatgattggcggatacggtcatgatgaccgcgtttgcgcatatcctgccattgaagctgccattcactgtaaaacaccaaaacaaacaatactgactgttttggcagacaaagaagaggtgggaagcgacggaaataccggcttgaattcttccttcctgcgttactttgtggcagaccttgcaagacaggaaggtttggacggttatgatgtactgcgcaaatcaaaatgcctctcagcagacgttacggcagcttatgacccaacttacggcagtgcttacgaaccgctcaactcctgctatttgaacaacggcatcggtgtcatgaaatatacaggcgcacgaggcaaagcaggtacatccgatgcttctgcggaatttatggcagaaattcgtaaaacctttgacagcaaaaatattctgtggcaaacaggagagctgggtaaagttgacggcggcggcggcggaaccgttgctatgttcattgccaatttggatgtggatgttattgatgttggtgttcctgtgatttccatgcattctccgtttgaaattgtttctaaactggacgtttacatgacttatcttggtattgaagcgttttttgaagcgaaataaaacaatgtaatttgcaggtatgcaggtgcatacctgtttttgttatcagtaacaaacagaagaaaggatgaaaccatgcggcccaaaaagattcgagcacaaaaagtgatgcatacccgtaaaggctggaaacatgcggatggtgttaaacgtctgcgtatcattatggcaagcgttgcggcggccgctattgttttcattgcagcggcaggtgtagtcatatggatgatgttacaagggccgctgcagagcagtcaggacacaacacaatcggattctgcacagacttcggctattatactgcctgtttatgatgattcctttaatttagtactggtaaataaaaatagacaactaaagtccgatttttccgctcaattgactgaattcaaaggagttcaaatagaagaacggattcttcccgcactggaaaaaatgctggaagatgctaagcgtgacgggtgccacttaaatgtaacgggtggatatgttgataaagaaacacagcaaacgcaatatgagcaagaggtacagcggctgatggacagcggaggttacacaagagtccgtgcgcaggaagatgccaaaacaactgtacagccggggaactacagtgaactgcaaactggtatggcggtacagtttgcctctgcggaaagttctgatgtggattttggtacaacaaaagagttccgatggcttgagaaaaattccattcgttacggttttattcagcgctatccgtccggtaaaaccacagctacaggtcatattgcctctgccacccagtttcgctatgtgggtacggaacatgccacaaaaatgagaagtcttggcatgtgtttggaagaatatgatacctatgtgcgtaatcgttaaagggaatttgcgttctaatatatttaaaaaataatacttgcatttttatactatttgtgataaaattcatttgttacgttgaattatcgctgaaagaggtgacaagaatgaaagaaaatacacacccaaagttcgaaaaaactaccattaaatgtgcatgcggaaatgaaatcgaaacaagatctacaaaagataacatccgcgtagaaatttgttccaaatgccatcctttctttacaggtaaacaaaaacttgtagacacaagcggccgtgttgacatgtttaagaaacgttatggtatgcaaagcaagtaaattgcttcggtaagtaaattaccttaggcaaataaatttgtttcgataggtaaatttatcttaagcaataagccatttacgaatgattgttatttcttttggtttgtccttaaaattgacggacggtgcacatagctgtaccgtccgcattttttatatattggcaagaggagatttctatggaatcataccgtacggtaaaacaggaaacaagcgcagaatttatcgaaaaacgttctaagtttatcggctatatcaaacctgttcagacagaggaagaggccattgcgtttattcagagtatcaaatcgaagcattgggacgctacgcataatgtatatgcgtattcgttaagagagggacaaacgcgccgctattccgatgacggagaaccgcaggggacggctgggattcccacgctggatgttttgcaaaaagcagatattacagacgcggtagttgtggttacccgctactttggcggaattcttctgggaggcggaggactggtacgcgcttattctcatgcggcttccttggctgttgaggcaagcggtgtgctgtatatgcgccaatgcctgctggcagaattgatatgcgattatacgcaatacggcaaaattgcatctctcattccggaatgcgttggtgtgatagacgatactgtatttgaagataccgtgcacataaagtttcatatggcacatgaggattttcaagcatttgaaaaacgcttggcagacaccacttgcggagcagtgaaagcagtcgttacaggaaaagaattttttgccgtttcagagacataaaagtaaaaataaaaaattttttagaaaaaagaaggatatttgaaagcaatggcgtatatctacttaacggattttataaaggtggtgacgctatggctatcagagaacgcacggagctgttggaagagcaaattttgtcaccttttgctactttggcaaagcagacaaaaggaagacagcggcctgaacaggaatgcgatattcgtaccgcatttcaaagggacagagaccgcattatacattccaaatcgtttcgtcgtttaaagcataaaacacaagtgtttctttctccggaaggggaccattatcgtacacgtctgacgcatacgttggaagtagctcaaattgcccgtacagtggcaagagctttacgcatgaatgaagatttgacagaagccatagcggtgggccacgatttaggtcatacaccgtttggtcatgcgggtgagagagcactgagagaagtttctccgctgaatttcaatcataatgaacaaagcgtccgtgtggtggaacgcttggaaaaaaataatcagggattaaatttgacgtttgaagtaagagacggcattctttgccatacaggtccaaagcttgccgatactccggaaggacgtattgtgcggtttgccgaccgcattgcctatatcaatcatgatattgatgatgctgtacgcgcgggagtgctaaaccctgacgatattccccacaacttgaccgaagtgctgggcacgacaacttctgccagaatcaatactatggttatttccctaattgaaaacagcgtagacgtcaatatcaaaatggatgaagtggtaggacaagcgtatcatcagatacataaatttatgtttgataacgtgtaccgaaatcctcaagcaaaagaggaagaaacgaaagtgcccaatctgattcaaacactgtatgagtatgtattgcagatagaccatctgccaagtgacatgcagcaaattgcggaacaggaaggaattgaacgtgctgcctgtgattatattgcaggtatgacagaccactttgccgtggcgttgttccaaaaaattgtggttccaaaatcttggggcatttaacgaaaatgaaaaggaggaatgccaatggctttgccggaattatttttgcaggaattaaaactgcgcaattcgattgaagatgttgcttcctcctatgttcagctaaaaaggcgcggacgtaatctggttggattatgtccgtttcataatgagcatacgccttcctttaacctatatcccgaaagcggctcgttttattgctttggctgcggtgcaggcggagatgtcattacctttgtccgccgcattgaaaatctggattatatggaagctgtgaaatttcttgcagacagggcaggactgcaattgcccgaattgggtgtagatgacagcatgagcaagctgcgggcccgtattttggaaatcaatcgggagaccgctaagttttaccatggcgttttaaaaagtccaagcggaaaagtcggtttggattattttttgcagagagggttgaaaccctctaccattacacatttcggtttgggatttgcacctgatactcgttttgcattggtgaatcatctgaaaggaaaaggctatacggatgaagaactggtacaagccaatgtggccgtgaaaacccgttcgggaaagcctatggaccgcttttttcatcgcgtgatgtttcctattatagatttaaggggaaatgtgattgcgtttggcgggcgaacgatgacggatcagaaaccaaaatatctaaatacgtccgataccttggcttttaagaaaagttatggattatttgctatgaattttgccaaaaatagtggcaaggaacagctgatactggcagaaggatatatggacgtcattgcattgcatcaagctggttttgacaatgccattgccggtttgggaaccgcgcttacgacagagcaagcgcatttaattgcacgctataccaaagaagtggtgattgcatatgatgcggacgaagcgggacaaaaagcaacagctcgtgccatacagttgctcagaagtgtagggttgcttgtaaaagtgctttccattacaggagggaaagaccctgacgaatacattcgttcttacggagaacaagggccggtcagattcaaacagctgattgaacaaagcggcaatgatgtggaatatcgtctgcaaaaattaaaatctgactgtgatttggaatcttcggcgggaaaagtgcaatacttaaatggtgcgacagagctgttatctacattggataatcgtatggagcaggaaatttatgcaggcaagctttctcaggaaatcggagtggaacgtgcgaccgtgatgatgcaggttgaaaaactcagtaaaagacggcatcaggcacagcagaaaaaagagtttcgggaatttcagcagcaaaccatcggactgaaagaccaggtcaatcccgacaagagggaaaatttccgcgcagcaaatgcggaggaagctttgattgcgtatttgtttcagaataacgatatggctgaaaaggtccgttccgtattatcgccggagcagttcagcacggcctttaaccgccgtgtgtacgaaagcatcaccgataaaatgcaaaatggattacaagtgggattgaccgaaatatcagatagttttaccatggaagaaatcagcgctattgcaagaatattggcaaagaacaatgcagttgccatgggacagcatgacgcggaggaatatatcaatgttattatagaggaaaagacaaaattaaatgcaaatgacgcaaaacatgcgcagacacaagaaatacaggattatttggcgcggctgaaagagcaaaagaaataaacggccgcttaactgggaggaaacgaacttatggcagcaccggataaaaaaacggttatgaaagatttactggaaatgggaaaggcgaaaggacagcttaccacaaaagagattttagacgctttgggagagctggattttgagccggaacaaattgaaaaattttatgatacattagagtctcaaggtgttgaaattgtagaagattttggtgacatcgctttggatgacatcgaatttacacaagaagaaaacggagaagatgaagatttggagtcttctctcagcacagaaggcatcgcaattgatgaccctgtaaaagtatatctgaaagaaattggccgtgtacctttgctttctcctgaggaagaaattgaacttgctattcgcattattgacggcgacgaagttgccaaaaaacgtttgtccgaagcaaacctgcgtttggtagtaagtattgcaaaacgctatcttggaagaggaatgcagttcttggatttgattcaggaaggtaacctaggtttgattaaagcggtagaaaaattcgactataccaaaggatttaaattttctacttatgcaacatggtggattcgtcaggcaattacccgtgccatagcagaccaggcaagaaccatccgtattccggttcatatggtagaaaccatcaacaaagtaaaaaaagtatccagccagctgttgcataccaacggacatgaaccgactgccgatgaaatttccgacgagctggacatgcctgtagataaagtacgggaaattatgcgtgtggcgcaggaacctgtttctttggaaacaccgattggtgaagaagaagacagccatttgggagactttattccggatgacgatgcacccgcacctgcagatgccgcttcccataccttattgaaagaacaattggcagaagtattggatacactgacgcccagagaagaaaaagtactgcgtctgcgttttggtttggaagacggacgttccagaactttggaagaagtaggtaaagagtttaatgttaccagagaacgtatccgtcaaattgaggcaaaagcacttagaaaattacgtcatccaagcagaagtaaaaaattgaaagacttcttggattaatataaaagaaaatgggggcttgattatgcatctgacattggaagcggattacgctgttagaattgtagataaacttgccattgaaaataaaaagatagacgcacataccatatccgaacaaaccaatgttccattgcgctttgcactgaaaatcttaagaaaattggtggcaagcggcgcggtgaaatcctataaaggtgcgcatggcggttatatgattgcaaaagacccaaaagacattactttgcgcgaggtaattgaagcggtagagggaccgtttatgattagccgctgtcagcaagacgattattgctgtaccaatacctcctgccgtgtgcataatatttatgcagaaatctcttatatggtacgcgataaactggattcttataattttgctaactttaaaggcattggaagattaccttgtaacgatgataaacacgaataatatctttttggcataaagaaaaagcgacaacagagaattttcgcatctgttgtcgcttttgtttctattccatatataaaatagacaaaaataaaaataattcatatgtatattgacaaaccttgtatattgttataaaataatatactgcatcatcatggagaggtatgctttctgtatattttgtaattttagcataaatttcgtagaaacgcaagcagagtctttagaaatattgacagaattgcgcgatgtttgcaaaacaaagtgttattgaatatgaaaaagacggttaatatatgaatggagtgattaagccaatggtgaatgtcaaaccggtaaaattgggtagcaatacccgtatgagcttctcaaaaattgatgaagttttggaaatgccaaacttaattgaagttcaaaagaattcatacaaatggttccttcaagaaggtttaaaagaggtatttaaggatgtttccggtattaccgactacacaggcaatttagttctggattttgtgaactacaaactcgatgataaaccaaactacagcgtggaagaatgcaaagaaagagatgctacctacgctgcagcgcttcgcgtaaatgcaagattattgaataaagagagcggagaaatcaaagagtccgaagtttttatgggcgatttccctcttatgacagacagcggtacctttgttatcaacggtgccgagcgtgttattgtttctcaattggttcgttctccaggtgtttactataaaatggagtacgacaaaacaggtaaagagttgtttagttctactgtgattccaaaccgcggtgcatggctggaatacgaaaacgatgcaaacgatgttttttacgtacgtattgataaaaacagaaaactccccgtaaccgtatttatccgcgctttgggccttggtacagactccgaaattttagagtatttcggtgaagatgaccgtattttggctaccattgagaaagatccatgtaaaaatacagaagaagctttgttcgaagtttaccgtaaactgagaccgagtgaaccgccaacgattgaaagtgcgcaaacacatatcaatggtttgttttttgacgcccgtcgttatgatttatcacgcgttggccgttataaatacaataaaaaattaaacttggcaggccgtattgcaggtcagcagttaactcagcctatcatcaatcctttgacaggtgagttaatggcggaagcaggggaagtagtatcctttgaaaaagcacaggaaattgacaatgcaggtgtttctgtagcttttgtgcttgtcaatgaaaaagaaacaaaagtcatttccaacggtatggttgacattcagaattttgtaggctttgacgcaaaagaagagtgcggtatcaatgaacgcgttcgtttcagcgtattggctgaaattatggaaaccagcgccgatgaagaagaaatgaaagaagcaattcgtttgcgtgcggacgagttgattccaaaacatattattattgatgatatttttgcatctatcaactacatgaactgcttggcagtcggccttggcaatgtggatgacattgaccatttgggtaaccgccgtattcgttctgttggtgaacttctgcaaaatcaatttagaattggtttttcccgtttagagcgtgtgattcgtgaaagaatgacattgcaggcgcaagatttagaggtattgactcctcactctttgattaatattcgtcctgtggttgctgccattaaagaattctttggttcttctccattgtcacaatttatggaccaaactaacccgttggcagagttgacacataaacgtcgtttgtccgcccttggtcccggcggtctttccagagaccgtgcaggatttgaggttcgtgacgttcactacagccactatggacgtatgtgtccgattgagactcctgaaggtccaaacatcggtttgatttcttaccttgcaacctttgcaaaaatcaatgaatacggctttatcgaagcaccgttccgccgtgtggataaagaaacaggtattgtttcttccgaagttgtttatatgacagctgacatggaagacgattacattgttgcacaggcaaacgaacctttggatgaagacggacgctttttacatgcaaaagtaaacggccgttttagagatgagtttgtggaagtagagcgttcacaagcggactttatggacgtatctccaagaatggtggtttccgtagctaccgctatgattccattcctggaaaacgatgacgcaaaccgtgcgttgatgggctctaacatgcagcgtcaagctgtgcctttgctcaaaacagagtctccgattgttggtacaggtatggaatataaagcaggtgtagactccggtgtatgcgtacttgcccgcaaagcaggtgtggtacgcagcgtaagtgcggatgaagttaccgttaccaacgatgacggttccgtagaatcctaccacattacgaaatttatgcgttccaaccaaggtacatgtatcaatcaggtgcctgttgttgaccgtggggaacgcattcaggcaggtcaggtaattgctgacggtcctgcaaccagcaacggtgaaatttcacttggtaaaaatgcgttaatcggctttatgacctgggaaggttataactacgaagatgctgttttaatcaatgagaaaattgttcgcgatgacgtttatacctccattcatattgaagaatatgaaattgaagcaagagataccaaacttggtcctgaggaaattaccagagatattccaaacgtaaacgaagacttgctcagcgatttggatgaatccggtattatccgtgtaggtgctgaagtacgtgccggcgatattttggttggtaaagtaactccaaaaggcgaaacagagctgactgcggaagaaagattgctgcgtgccatctttggtgaaaaagcccgcgaagtacgtgatacttctctgcgtgttcctcacggtgagtatggtattgttgtagatgtaaaagtatttacaagagaaaacagccaggacgaactcagtccgggtgtaaataaagtggttcgctgctacattgcacaaaaacgtaaaatttccgttggtgacaaaatggcaggtcgtcacggtaataagggtgttgtatcccgtattttacctcaggaggatatgccatacttacctgacggtactccactggatattgttttgaatccattgggcgttccttctcgtatgaacatcggacaggtgcttgaggttcatttgggtcgtgcggcaaaagcattgggctggaaaattatgacccctgtttttgacggcgcccatgaagatgacattgcggaatgcttaaagcaagcaggattacgtgaagacggtaaaacattgctgcgcgacggacgtacaggcgagtactttgacaatcctgttacagtcggttacatgtattacctaaaactgcatcacttggttgatgataagattcacgcacgttctaccggtccatactcacttgttacacaacaacctttgggcggtaaagcacaattcggcggacaacgttttggtgagatggaggtttgggcactggaagcttacggtgcagcttataccttgcaggagattctgactgtaaaatctgacgacgttgtaggtcgtgtaaaaacatatgaagcaatcgtaaaaggtcaaaacattccaaaaccgggtattcctgaatcctttaaagtgttgattaaagaattgcagtctttgggcttggatgtaaaagtattggataaagacgaagaagaaatcgacctgaaacaaaactttgacgacgacgatgatatcggctttaaaccatctgaagatactttcgatgaacaacatgttgtcaccgatgaattggatggttacacagtacaggatgcggaagacggtctggacggtgtattcgaaaatgattacgcagccgacgaagatgcggatgaaactgatgatgaagacatttttagtgaactgaacgtacccttcgacagtgatttagaagacagcgacgaagaataaggcagggggttacacaatggaatttaacgtgtttgaatctataaaaattggcattgcttctccggataaaatcagagaatggtctcacggtgaagtaaaaaagccggaaaccattaactatcgtaccctaaaaccggaacgtgatggtttgttctgtgagcgtattttcggtcctcaaaaagactgggaatgccattgcggtaaatataaaagaattcgctacaaaggcaaaatctgtgaccgctgcggcgtagaagtaacccgttccaaagtacgtcgtgaacgtatgggccatattgaattggcagctccggtttcacatatttggtattttaaaggtattccttcccgtatgggtcttatccttgacatttctccgcgtatgctggaaaaagtattgtactttgcactttacattgttaccgacccgggcaatgtacgtgaattacaagaaaagcaaatgctcaacgaaaaagaataccgcgatatgcgtgaaaaatacgaagatgatttccaggctggtatgggtgcggaagcaatcagaacgcttctggaaaaaatcgacttggaacagcttgctgcagaactgaaagaagaattattcacagctgcaggacaaaaacgtgttcgtattttaaaacgtttggaagtagtggaagcattccgcgcttccggcaaccgtcccgaatggatgattttagatgcgattccggtcattccgccggatattcgcccaatggtacagttggacggtggcagattcgcaacttctgacttaaatgatttatatcgtcgtgtgattaacagaaacaaccgtttgaaacgtttgttggaactgggcgctcccgatatcattgtgcgcaatgaaaaacgtatgcttcaggaagcggttgacgctttgattgacaacggccgccgcggacgtcctgttaccggtccgaataacagaccattaaaatccttatccgatatgcttaaaggtaaacaaggtcgtttccgtcaaaacttgttgggtaaacgtgttgactattccggacgttccgttatcgttgttggtcctgaattaaaaatgtatcaatgcggtctgccgaaagaaatggctttggagctgtttaaaccgttcgttatgaaacgtttggtagaaacaggagcagtaggcaatatcaaagctgcaagaaaagcggtagagcgtgccaaacctgaagtttgggatgcattggaaattgtaattaaaaatcatcctgtattgttaaaccgcgctccaaccttgcatagacttggtattcaggcatttgaacctgttttggtagaaggacgcgcattaaaactgcatcctcttgtgtgtactgcttataacgctgacttcgacggtgaccaaatggcagttcacgttccgttgtctgccgaagcacaagcagaagctcgtttcttgatgttggcagcaggcaacctgctgaaaccttccgacggacgccctgttgcagttcctacacaggacatggttttgggctcctattatttgactttggaaaaagacggcgagccgggtgaaggcaaagtcttcagagatgaaaatgaagctttgatggcatacgatgcaaaggcagtgagcctccatgcaaaaattaaagtacgccgtaccatggaagtaaatggagaaccggtttccaaattggtagataccaccgtgggacgtattatcttcaaccgtccaattccgcaggatttgggctatgtggaccgttctaatccggataccatgtttgattatgaaatcagcttcttggcaggtaaaaaacaacttggtgctattatcgacaaatgtattaaagtacacggtactgccaaaacagccgaagttttggatgaggtaaaagcacaaggctataaatattccaccagaagtgcaattaccgttgctgtatgtgatgctaccattccacctgcgaaaaaacaattgattgcagaagcagaacagcaaattgatgaaatcacagatgaattcaatatgggtctgttgtccgatgcagagcgttacaacatggttttgaagacatgggaaaaagcaacaaacgatgttacaaaagcacttcaggaaaatttggaccgttacaatccaatctttatgatggcagattccggcgcccgtggttccatgagtcagattcgtcagcttgccggtatgcgtggtttgattgccaatacctccggtagaaccatcgaaattccgattcgtgcaaactatcgtgaaggcttgaacattttggaatactttatttcatctcgtggtgctcgtaaaggtttggctgataccgctttgagaacagctgactccggttacttgacccgtcgtttggtagacgtttctcaagaagtgattatccgtgaagacgattgcggaacaacaaaaggtcttgaagtatttgatatcagagaggggaaagaatccattgagtctttgtccgaccgtctcataggcagatacttgctgcatgactttgtagatgaagcaaccggtgaagtattggtttccaaagataaattgatggacgaccgtgatgcggatatcattgtaagccgcggcgttgagaaaattgaaattcgttctattcttgactgtacagcaaaacacggtatttgtaaaaaatgttacggtgcaaacttggcaaacggaaaacctgttgatgttggtgaggcagttggtattattgcagcacagtctatcggtgagccgggtactcagttgaccatgagaacattccacacaggcggtgttgcaagtgcggaagatattacacaaggtttgcctcgtgttgaagaactgtttgaaggacgtaaaccaaagcatcttgcaattatcagtgaaatcagtggtgtagtttcctttgaggaaatcaaaaagaaccgtcatgttgttgtaaccaacaatgaaatcggagaccaaaagtcttatttgattccgtttggttcccgcattactgtaaaagaaggtcaggaaatcaaagccggtaccagaattacagaaggttccgtaaatccgcatgacgttcttgcaatcagcggtacacaggctgtgcaggattatctgattcaggaagtacagcgtgtttaccgtatgcagggtgttgatatcaacgataaacacattgaggttatcgtacgtcaaatgatgaagaaagttcgcattgacgaagcaggcgataccagcttgctgccaagctctttggtagataagagtgaaatggaagctgaaaacagagcaattcgcgaacgaattgaagcaggcgaaaccgaattgcgtgaggctacttatactcctgtattgttgggtattacaaaagcttctttggcaaccgattccttcttgtcagcggcatctttccaagagacaactcgtgtattgacagatgcggcaatcaaaggaaaagtggatcctctattgggtctgaaagagaacgttattataggtaaattggttcctgcaggtacaggtatgaaatgctatagtgacgttgaaattgaatctacaaatcaagtattgacaaatgatactatctaatgatataattttaaatcgtgatagtgtattttgatttttaagctattacccaccatatacaacttgtatatggtgggtttaggcgttaaaaggaaagtactaaattgctgttaattgggtaaaatatacctaatttaacatataaattttgagagaggaggtttcttatgccaacctttaaccaattagttcgtactggacgccaagtttctgagaaaaaggcaaaagcaccagcacttttgaagggatggaactctaagaaaagagttgcaattaaccaaaattccccacaaaaacgcggtgtatgtacagcagttaaaactgcaacacctaaaaaacctaactctgctttgagaaaaattgccagagtaagactttccaacggtattgaagtttctgcttacatcccaggtgtaggccacaatttgcaagagcacagcgttgttatgattcgcggcggtcgtgtaaaagacttgcctggtgtacgttatcatatcattcgtggtacactagatgctcaaggtgttgctaaccgtatgcaagctcgttccaaatacggtgcaaagcgtccaaaagctggcgcagcaaaaaaataattgaacaaaggttaagttgaaagaaaccttatggctgcttgcagcagcgttatatagatatactttatttgtatgtggataacgctctgtattggccaacgggagattatctttcgagtacctatgatatcattcatgtgaaggagggaagcgaagtgccaagaagaggctctattgcaaaacgtgacgttttggttgatccactatataattctaaacttgttactcgtttaattaacaatattatgtacgacggtaaaaggggcgtagctcaaaaaatcgtttatggtgcatttgatattgtgaaagagaaaacaggaagagaaccattagaggtttttgaggaggctatggaaaacattatgccttctttagaggtaaaagctcgccgtgtcggtggtgctacttaccaagttccaatggaggttcgtcctgaaagaagacaaacattaggtcttcgttggatgactaactatgcaagacttcgttctgaaaaaacaatgaaagaaagacttgctaacgagattcttgatgctataaatggtgctggcggcgctgctaagaagcgtgacgatacacacaaaatggcagaagctaacagagcatttgctcactacagatggtaattccattgtagattttgtgatccaacacaacctaattacgataggaggaaattatggctagacaagtatctctagagatgactcgtaatattggtatcatggctcacattgatgctggtaaaacgacaaccacagaacgtattttgttctacacaggtgttaaccataaagttggtgaaacacatgacggttctgctactatggactggatggctcaagagcaggaaagaggtattaccattacttctgctgctactacttgcttctggaaagaccatagaattaacatcatcgacaccccaggccacgttgacttcaccgttgaagttgagcgttctttgcgcgtattggacggttctgtaactgttttctgcgcaaagggtggtgttgagcctcagtctgagactgtatggcgtcaagcggaagaatataaagtacctcgtatggcttacatcaacaagatggacattatgggcgctgatttctaccgtgttgttcaaatgatgaaagaccgtctgcaatgtaatgcagttccgattcagttgccaatcggcagtgaagacgaattcaaaggcatcattgaccttgtagagatgaaagctgacgttttctatgatgaattcggtaaagatatgcgcgtggaagaaattcctgccgatttgcttgaaaaagcacaagagtatcgtacccaactggtagagcacgttgctgaacaagacgatgagctgatggaaaaatatttgatgggtgaagagctgacatcagaagaaatcattgcaggtattcgtaaagctactttggctaactgcatggttcctgtatgctgcggtacttcttacagaaataaaggcgtacaaaagttattggatgcaatcgtagcttatatgccatctcctcttgatattcctgatatgaagggtgtgaatcctgaaacaggtgaggaagatgttcgtaaagcttccgatgacgaacctttttctgcacttgcatttaaaattgcaactgacccatttgttggtaaattgtgcttcttcagagtatattccggtacactaagcgctggtggtccggtttataactcttctaaagacaatacagaacgtatcggtcgtattctgcaaatgcacgcaaaccatagacaagatattgatgttgtttatgcaggtgatattgcagctgcagttggtttgagaaatacaacaaccggtgacactctctgtgatccaaaacatccaattattttggaatctatggaattcccagagcctgttatccacgttgcaattgaaccaaaaacaaaagctggtcaagagaaaatgggtatcgctttggcaaaacttgctgaagaggatccaacgttccgtgcttacacagacgaagaaacaggacaaaccattattgcaggtatgggtgagcttcatcttgaaatcatcgtagacagacttctgcgtgaatttaaagtggaagcaaacgtaggtaaaccacaggttgcttacaaagagaccatccgcagaaatgcagagtctgacaccaagtacgcaagacaatccggtggtaaaggtcaatacggtcatgttaaaattcgtatcgaacctaaccctggcaaaggctacgaattcgcaaacgaaattgttggtggtgctattccaaaagaatacattccagcagttgaccaaggtattcaaggcgcattgttaagcggtactttggcaggttataatgttgttgatattaaagtaaccttgtatgatggttcttatcatgaggttgactcctctgaaatggcatttaaaattgccggttctatggcagtaaaagatgcaattaagaaagctgaccctgtattgctggaaccaatcatgaaagttacagttattgtgcctgaagagtacatgggtgacgttatcggtgacctaaactctcgccgcggtatgattcttggtatggacgcagtaccgggtgcacaacaaatcaatgcagaagttccgctttccgaaatgtttggttatgcaactgatatgcgttccaaaactcaaggtcgtggacaatacacaatggaaccggctcactataatgaggttccaaaatctgttggtgaggaaatcatttccgcacgtggaaaaaagagtgagtaatttataaaaacacttgattttcaacaacagaattgataaaattgcgttatagacttttataataaaaacaaattcattttttggtataaaaaaggaggaaattccaatggcaaaggcaaagtttgaaagaagcaaaccacacgtaaacattggtacaatcggtcacgttgaccacggtaaaacaactactacagcagctatcactaaggttctaaacctaaacggtgaagcagaattcgttgattatgctaacatcgataaagctccagaagagagagctcgtggtatcacaatcaacacttctcacgttgagtacgaaacagacaaccgtcactatgctcacgttgactgcccaggtcacgccgactacgttaaaaacatgattactggtgctgctcaaatggacggtgctattctagttgtatccgcagctgatggcccaatgccacaaactagagagcacatccttctatcccgtcaggttggtgttccatacatcgttgtatacatgaacaaagctgaccaagttgatgacgaagagttgctagacctagtagaaatggaaatccgtgaactactaaacgagtacggcttcccaggtgatgatacaccaattatccgtggttcttctctaaaagttcttgagtctacttctacagacatcaatgctccagaatacaaatgcattctagacttgatgaaagctgttgacgagttcatcccaactccagaaagaaagagcgaccaacctttcctaatgcctgttgaggacgtatttacaatcacaggccgtggtactgttgcaactggtagagttgagcgtggtcaaatcaacgttaacgaagaagttgaaattgttggtatgactgaagagagcagaaaagttgttgttaccggcctagaaatgttcagaaaaattctagactttgctgaggctggcgataacgttggtgtattgctacgtggtgttcaaagaactgaaattgagcgtggtcaaatcctagctaaaccaggttccattaaacctcacacaaaattcagaggccaagtttatattctaacaaaagaagaaggcggccgtcatactcctttcttcaacaactatcgtccacaattctacttcagaacaactgacgttacaggtgttattacacttccagaaggtacagaaatgtgcgttcctggcgataacgttgaaatggatgttgagttgattactccaatcgctattgaagagggtctacgttttgctatccgtgagggtggtcatacagtaggttccggcgttgttacagctattaacgaataattaaaatcgttttgtaacgtaatataaaaataagaccatcggatagattccgatggtcttattttttacgttttagttattaaaaagtgtaggattgtccttgaaaatgtttgtttttatttgcgtgtttttcatgggctctgtttttctgcaattgattttgtgttgcttgagaattcacaatgtcacacatttcttcataagaattgcaatgtgtgcagctatcaattaaagcagtttgctcttcttgagaagcaagtgcaaaatttcttcttgcttcaggatttcttgcaagaacagcgccaatacccattggaatgttgttgtattgattgtaatgcatttttatcacctcacaatacttattatctccaacgacacgcaaatatgatttccaattgtatacggcaaaatttgtactgcttccattgcgtaaactatgtaaatttggcgctttcagactattttacaggaattttctgctaaaaaatttgtcaatttcaatttgtaaaaaatgtattttatcaaattttaaaatggatatttacattaagaaaaattcgtgctatactagctatatcgaaatttaaatatttccttatcaagagtgacggagggaacaggcccgatgatgtccggcaacctacatatttgtaaaggtgccaaatcctgcggtaaagccgagagatgaggtttgcaattcaccgaacggctgcgaagcgtgttcggtgttttttgatattttttattttttggaggatactatgtctaaatacttttttacttcagagtctgtaacagaaggacatccggacaaagtctgcgataaaatttctgattctattttagatgctattttggctcaagacccaaaggctcatgttgcttgtgaagtaacagcaacaacaggtattattaatgtaatgggtgaaatatccacagaatgttacgttgatattccttctcttgtgcgcgatgtcatcaaagaaatcggttacgatgatcctgcttgcggatttgatggcaatacatgtgctgtaaccacttcaattgatgtacaatctcctgatattgcaatgggtgtaaacgagtcttatgagtcacgtcatggcgcaacagatgaaaacgataagattggtgccggtgaccaaggaatgatgtttggttttgcatgtgatgaaacaccggaattcatgcctttggcaatttctttggcccataaattagcaaaacaattgacaaaagttcgcaaagatggaaccttatcatatttaagaccgga

SEQ ID NO: 782 - DNA, 23068 bp, Unknown
  16S sequences of unknown bacteria
cttctttctttcactatgaagttttcaaggttcctaagagcttctatcgctctttcgctgttcgtcttctttcgtcgacgaacattttatatattagcactttcgcaatattttgtcaacagctttttgtacatttttgcagatgttttttacaagctgtaacttaattttgcgacagctttttaatattaccaaatacttatgtccttgtcaacatattttttgcaatattttttgaaataataaatttgcttttaaatatgaatatcattcaatactctgcgcagaataagaagtaagaattttgctgctctctgcggtaaaagttatatacttatatgttaaataccggaggtgttatttgtgtttataatatgtttaaggacgattattctttatattactgtcctcatcaccatacgcattatgggtaagtctgagctttccaagatgtcgccctttcagttagttgtcatatttatgattgccgagcttgcttctattcccatagagtcacccgatgtttccattataaaaggaatggctgctatattcacgcttctgttcttacaagtgtttatttcatatatatctataaaaagtgaaggatttaaaaattttgtaaacggcaagccgagcgtgctcatagaaaacggcaagataaattacagggagctctcttctctgcgcatatctataaacgatcttatggaacagcttaggctgggaaactctccgtcccttgccgatgtagactacgccgtaatggagtcaaacggcgatctttcaataattcctaagcctggcaaacggccgctgactccagatgatatgaaaataaccgcaagcggagatgctatgcctcttgtcatcatctccgacggccatctttacagcgccaaccttcaaaaaatgggatacgatgagaacaaactcaaaagtacactgctttcgtacaatataaaatcatacgatgaagtttttatggctttctgtgatgaaaagcgcgaatttcatatatactgcaagaaagataacggcagagccgaggaggtgagcaaatgagatctttcatagtttctatattactccttctcgtgatcttgggctgctgggtcggatttgatatgtattcagacagcagacttgacagctacattgattccattgaagccgaaataatgcctcatatagaaagtgagaactggcaaaatgctgcggcatcacttgaaatgcttgaaaaagattggcacgaatacaggaaatatgctgaattttttctcggaacaactgacctaaatgaaataagctataccataacaaagtcgaagtcttacattgaaaacgccgacgcagcaggtgccgcaggagagctttcatatctaaaatcacagataagctttctcgacctcaacgaaaaagtaagcgcgggtaatatattctgatacagtttaattatgacattgtaaaaaggcaaaaacagctgcgcgaacttatttttatgcccgcgcagctgttttatattatttcatacatattgacagcatcctctttctttgatgactctgtcaaaagcagcactcttgccgttatttcgctgctgccgaatttgatatttattatatcacctatatttacttcgcttcccggctttgcgaccttgccgtttatggtaattctttcctgctcgcatgcctctttagcgatagttctcctttttataagccttgaatttttcaaaaatttatctatacgcaaatcaatgcctccctgcaaatattgttttaagatgaaataaaaacggggtgaccgaaaaatcaccccgatactaacaaataaactgtttactatttgtttattgcgtctttaagcgccttgcctgccttaaatacaggagcctttgaagcagcaatctggataacttctcccggttttctcgggtttcttccctgtcttgcttttctctctcttgtttcaaaagtaccaaaaccgataagctgcaccttgtctcctttaacaagcgcgccttctacacatgatacaaaagcgtttacagcagcttcagcatctttctttgtaaaccctgttttctctgcaacagcagtaactaattcggccttattcatttatgattcctccttaaacaatattaaaacttttttattaaagatacggtttacttactcactttttcaagcacttttgcctcatcccagagcttgtccatttcctcgatagtcatatcgttcagaatttgcccccgctctttggcagtccgctcaatatacgaaaaacgccgtataaacttgtccgtagcttcggatagtgcctgctcgggatcaaccttaagaaatcttgctacatttactacagaaaacagcaaatcaccaacttcattcttaattgaaatatggttgtcagacacacttgctgcaagcagttcttccgtttcttcttttattttttgaaaagcgcccgacacatcatcccaatcgaaacccacatccgcagcttttttctgtattttgtatcctctcgtaagcgccggcagcgcccgcggtacattctccagaacagatgtctgtgtcgtcgttcctttctctttactcttgatattctcccatttttcaaggactttgtcaacacttttaatgctttcttctaaaaaaatatggggatgacgccttatcattttctcgcattcgtcatttattacagatattaacataaaatctccattttcttccgcaatagcgctgttcatgagcacttgcagcataacatctccgagctcttctctcagatttgtcatatcttttttacttacagcatccaccgcttcgtatgcttcttcgagcatacatggcacgagactttcatacgtctgctctttatcccaagggcactcgcgtctaagcacctttataatctcccaaagccgcaaaaaagctttttgacttgtctccgcacggtttcttaaattcatatacttatcttcattcatagattttcctcttttgcatatgcaatctcttctcgaaagcttcgatttccagactatttaacaaattttcctgctatcttcgcaagcttttctcccttaggcagcatttttaactcttcctgcgatatcgcttttgttctgagcagcataagcccatatataagcgcagcaagcgctattgctgcgagcgtggcaagagaatttccaagataccctacaagtaccctgtgcgtaagccaagctgctgcccccataacaatcgccgatattcccggtctgccgtatacagtcataaagtcaaattttgtacctgtatagcggcttaccgccattaaattgagtacagacgctatgatgtatgccgccactgttcctatagccgcaccttttacgtttatttccggaatgccggtaagccagtatgtgagtacgactttagcgactgcgccgaaacacatatttattaccggtataaactgtttgccaacgccttgaagcacgcctgtaagagtctgaatgctcgaaaggaatatgacaccaaaagccattatcttgaggcactcggctgcaccgacagcgcttgctctctgcataggataaaaaagcagcataataggttctgctatcaccatcataccgacagcgcatggaagtcccattattatagccattctgtagcctgtatatatgttgtcgcgaaggtcgcttgttctgccgagcttgtgcatttctgcaaccaccggcacgagactcatcgataccgcctgcgtaagtacctgcgggaaatttatgagcgagcctgtaaaccctgaaagctgtccgtaaagcgctttggcctcggccggcgaaaaacccgccgcattttgcagcctgttcattacaatgggcacatctatcgcgttcattatcggcattatggcagcaccgagcgtaataggcactgcaaaagcgaatatctttaagagaatcgagctcgcactttcataaatcttgcctgcgcttctttctatatttactctgtatttgcctctgccgctaaaatatataataattactacgagaatgcctcctatcgagcctgccgttgcgccgaacgctgcgcccgcagccgaaaattcaagtccttttgaaagaaatacgtatgcgagcgcaagcccaaccactactctgaagacctgctccattacctgagatattgctgtcggcgtcatattctgattgccttgaaaatacccgcggaaagacgccatcatcggtacgagaagcagcgccggggcaagagccatcatcgcatatttcgcttcgggtattttgcaagccgtaaaatacggctctgcgccgaaaaagcataaagacgccgatactattcctatagcaaacataagaaagaacgatattttaaacactctatagccttcgttatacctgccgatcgcgtttctctccgataccatcttggaaatcgcaacgggtatacctgctgttgatacggcgagaaatatgttgtatacagggtatactgcctgataatatgccattccgacatcgccgatcagattagcgagcggtattctgaaaaacgctcccagcacctttactaaaataccggcaatgccgagtatcgccgctccttttataaatgattttttagccatttattttaattctcccaaaattctgtttactgccttttttacctcagccattgtccgctctatatcgattgtcgtaaattctccgtttttatacagaatttttccgtcaaccattgtcagcactacatttgccggagagcacgagtacacgagattatcttttatatcgtgaagagggcagagttcaggtgcagctaaatctattacgatgaggtccgccttatttgctacagcgacactgccgcagtccgctctgccttgggaaagcgcgccgttttttgtcgctataaagagcacctcatccggcgagagcgcaagcggatccatactttttaccttagcggccagcgacataactttcatttcctcaaaaaaattgaggctgttgttgctgcttactccatcggttcccagcgttactctgatgcctttttcgagcattttacctatgtccgcaataccgcttgcaagcttcatattgctcactggattggtcgcagctgtcacgcccttttcagcaagaatgtcaaaatcttcgtcttcaagccatacacagtgagctgctgtagtcttaacatcgaaaagcccgagatcacagaagtagcgcgcaggcgttttgccgtagcgtgccttgcactcctcatgctcgctctttgtttccgatagatgtatgtgcatctgtgcgccgttttcctttgccagttcagcaagagcttcaactgccttagggtttgaagtatattcagcgtgtatcgaagcttctccgatcagccgtccctgcgctttgaacggaaaggcttttatgagattctcagcttcagcatatttctccgactttttggggtcggaatcgtcaaaatgaacgatgccgcgcgctatgttcatcttagctcctgcatcgagcacagctcgcgctatatcatcacacagactgtacatatcagtgcttgatactattcctgatttaaacgattccgccatagcgagcatcgtgccccaatatgtcgcatgcgaatcgagatgatcctcaaaaggaaatatcttcaaatttagccaatcctgtaaattaagccctccgccgtatccgcgcataagcgtcatcggcgaatgcgtatgcgtattataaaatccgctcataagaagcttgttttttccgtcgtatatttcgtctccgtcatagccttgcggagcttctttaccaatataatctattcgttctccttttatgcctacatacatattttcctgcaaatcgagattttcattcaaaaccgcgatatttttaaaaagcatatccttctccttttatataaatcaaaacaaagcaatattttttcggttaactatataactataccacaatatgccttctcattcaatataaaagcaggcatacaaaattgcgtgcctgcttattctccggctgttattttaatatttcctcgtttatcttttctgcgtatctcactgtttccatagcatctttacagtatttgtccgcgtctatcatatcggcatactcctgcgtcagcacggctccgccgacggcaaccctgcaccaaggcgtgcgcctatgcagcagctttatagtctcttccatagcgggcacagttgtcgtcatcagcgcgctcaaacacgcaagcggtgcatgcaggcggcaaacctcatccgctatgcgctcaggcgctacatcgcgtccgagatcagtcacagcaaagccgtagttttcgagcagcagctttacaatgttcttgcctatatcgtgaatatcgccttttacggttgctattacaacgctgcacttaggtgcggcgccgctgcttgacacagtcatcgcttccttaattttttcaaatgcctgccctgcggcctcagcactcacgagcagctgcggcaaatagactgtatttttttcaaaaccctcgcccacaatgttgagtgccgggataatttcattctgcactatttccagcggcggatatcctccttctatgagtcttgctgttatatctgctgcgcttaccttaagtcccttaataattgccttctgcaaatccgaacttcttccttcatccgcactttttactgctgtctctttgttatacgtattgctcttagatgccgtctctgtcgcagcttgggcaagtttctcttttctttccgcatatttttcggcaaaccctatatactctttgcagttgtcgtcaagtccgcgaagcgctcggtatgcgtaatataccttcatcatatcctgtgattcagggttcattatggccgccgaaagtccgttttcaagcgccatcgcaaaaaaagtactgttgacggcatttctctccggcagcccaaaggatatatttgaaactccaagagatgtgagacagccgagcttttgccgtatttcagaaagtgcggcaagcgttgtcacggccgcatttttcgacgcacttattgtcattgcaagtgtatcaaatattatatcctttttttctataccgtactcggatgccgtctctaaaatcttttccgctatttttactctttcctctgctgtttcgggtatgcctctttcgtcgagcgtaagcgcaacgacaagtccgccgtattttttgacgagaggaaagatgcttctcatactttcctccttgccgtttaccgagtttatcatcgctttgccgttatagcgtctcaacgccctttccatagcttccgtatccgcagtgtctatctgcagcggcaggtttgttacggtctgaagctcacaaacggtgttagtcagcatttccgcttcgtctatttccggcagcccgacattgacatcgagtatatgcactcccatttcctgctgccttattccctcgtttaagatataggcaatatcgttttcggcaagcgcctgtttaaatcgtttcttacccgtaggatttattctttctcctatgagcacgggtgcttctccaaatataacggcatgtgtatacgacgatataaacgtgatatttttaggctttaccgcaagcggtctttccatttttgtgagcgcggtaagtttcgctatatatgcgggcgtcgtgccgcagcagccgcccgcaatacgcacaccgttttttataagccctgccacatcctctgcaaattcgtcagctttgacatcgtataccgtcttgccgttatttatctgcggcagtcccgcattaggcttaaagagtaccggcacagacgcatatttaagatattctgcaactaccggtgccagcgcttttggtccaagcgagcaattgacgccgattgcgtcagcgcccattccctcgagcaatgcgaccatcgcggcaggttcggcccccgtcatcagcttgccgtcatcgctgtaggcgtttgatacaaatacaggaaggctgctgttttctttggctgcaagcagagctgcttttgtttcatagctatcgttcatagtctctatgaagataagatcaactccgtatttcactccgagttttatcgtctcggcaaatgtattcacggcttcctcaaaatcaaaatctccgtatggcttgagaagtctgccggtcggtcctatgtcgagcgctacgaattttttatgaggcgatgcacttttttccctcgcttctttggcgtttctgacagctgcgcacacgatttcatcaagctctgtccctgaaaatttgagtatgtttgctccaaacgtatttgtatttactatattactcccggcatcaaaataatccttgtgtattcccgaaataatgtcggggtgagttatgttccagcgctccgggtattctcccgcgggaagccccgcgctctggagcagcgttcccattcctccgtcaagataaacaatgttatcatttaaatattcaagcacattcattttattatttttcctctctcctatacgcacagtcctgttttgtacagctttcgcatttattttcattatctgcgcattccggtttttcatcgcagacaccgataatcgccgtcaccgattttgagggagacatcagcagactttcgttaagagttatcccaattttacgcgggcaatcgagcacggcgaaaatatctttctgcaacgcaagcgacaaatcaccgtatccgggactgaatctcggtcttaaaaacaggcctttcatttccgcttccgctctcatttccttgcaaaacgcgtcgcacaggctctctattctctccgcgcctatcgcctgaaagaagagagccttcactgcggaaatcctgctatactttgcaataagcctgtctatctcgattccgattgtcgccgcaaacagaattatgctgcggcatccgcgcaaattgtatgcaagcgcctttgaatgcacctcggcaaatcctaaatcaattgacatatcgatatcattatttttcgataaactttcattgtttttacagctatatttaagcaaaaactcgctgtaacacactttatatgacaacctgtctcttatttcttcgagacattcatcgagaaccgcaagtatttccttatcaggcacctccgaacatcccgcatatctcagtatctcgcgcctgttaagcggcggcgcatcgtaaaaccttgtcaaaacagtattatttacagtaccgcctgcatttacatctaagttcatattttctgcctctgtatttcatagttcatatccaagcatatccgaaagattctcttttatcttcgctgccacatcaggtttgttcatcgaataaacgtgaacatttgtaataccattggcatagaggtctattatctggtctgtagcataagctatacctgcctgcttcattgctgcgggattagcaccgaatttatccacgaggcttttgaaacgctgcggcacaaatgaacccgaaagcttgactgctctttccacctgatttgcgtttgttatcggcattactcccggtataacaggcaccgtaataccggcttcacgtattttgtagagaaagttatagagcagattgttatcaaaaaacatttgcgtcgttaaaaattcacatcctgcctccactttttcctttaaatatttaatatcttccttttgatttgcactctcggggtgtatttcgggatagcaggctcctccaatgcaaaagccggctccgctttctgcaagctcatatacaagctctgccgcatgatggtaatcacagtctgcaagccccgatttttcaagctctggtgtcagatctccgcgcagcgccataacattttctatccccgcatttttaatatcttctatgcgctcttttaccgtagcttttgtcgatgatacgcatgtaagatgtgcaagcgtcggtacgccgtgttcctgtttgatattttttgctatgtcgagcgtgtatttgctcgtgcctcctcccgctccgtatgtaacgctcacgaagctcggatgcagctcggctatttgctcagttgctctttttacactttcaaaggccgtatcggttttgggcggaaaaacttcaaatgaaagcgacagcttattttgtttcagaagttccgatagcttcattgggaatcacctctcatatattaaaacgttaaaatttctccttttaaaaaacatcatagcttataatactaccaaactcacacataaatcaagtgctgcaataaaaaagcaggccggcttttttaagtcttcctgctcttatcttgctttacaaattatttattttatcggctcaaaatccgcagcaccgtgcttgcagagcgggcatatgaaatcaggaggcagtgtatcgccttcgtacacatagccgcatatcttgcatacaaatccttttttgctgacctccccaggctttggcttgacattgcaaagataatgagaatacgtcatgctctcttcatcggaaactacttccgcctcagtcacactgcaaataaacatcgcatgagtaccgagatcgactatgctttcggttttaagcgacataaacgcatttgtatgctccttgacaataacaaggccattttgcgaacgctctgtttctttatcctctttatccgcaaatttatccgtatctcttccgctcacaaatccgaaatgcttaaatacatcaaacggcgcgctttttgacagacagcagagattcataatacctgtgtcctttataatatcgcaggaataattctttttatttatagctaccgctatacgcgcgggatcatttgttacctgatttaccgcatttacaatgcagccgttatcctttttaccgtcatttgaggtgacgatgtaaagtccgtattcaatattgtaaaaagcgttcacatcaatttttccactcatttttgctccgattttcctttcaaatattgctgagctcatctgcaagagcttcaagctgcgctgtgctttctttgcttagcgccgattttaccgttaccgtattttccgcaaatctaatatctttgcagccttcaagcatgcttctcatcgtcttagccgcagtaggcgcccaagttccgttttcgataaacgctaccgttctgttctgatagctgtgttcttcaagacggtttaagaaatcatgcataaacgggaatatgcttccgttatatgtaatagttcctaatacaagcgtaccgtacctaaatgcatcctctacagcttccgccatatcgcaacgtgcgaggtcgtgaactactacattttggcctcttttttcaagaagctccgcaagcttttcagcagccgcttttgtgtgtccgtaaacagacgtatatgctattactatgccctcggattcaacacgatatgacgaccaaatgtcataaagatttatatagtgtccgagatcttctgcaagaaccggtccgtgcagcgggcagatagctttgatgtccagcgccgccgctttattaagcagcgtctgtacctgctttccgtacttggcgacaatacctatatagtagcgtcttgcctcgcagtcccattcttcatcagcgtcaagcgctccgaatttgccaaagccatctgctgagaagagcactttatcagtgctgtcataagtaaccattacctcaggccagtgtaccatcggcgcaaagacgaatgtaagcatatggtttccaaggctgagagtgtctccgtcgtttaccacaacctgcctttccgcaaaatccgtaccaaagaactgcttcatcataacaaacgctttagtatttgaaacaatttttgcatttttgtaaacttccataaagtttgctatattggctgagtgatcaggctccatatgctggataacgaggtaatcaggctcacggtctgcaatcacaccttttatattggcaagccattcatcattaaaattcgcgtcaaccgtatccataacggcgactttttcatccataattatatacgagttgtacgccataccgttcggcacgatgtactgtccttcaaatagatcgatcttgtggtcgttgacgcctacatattttatatcctttgtaatttccatttcaatttccctcctgcttccggcatcagctgcctttttatttttttcgttcccatttcgaaaattataatatcatatatatgcatttttttcaatgcgcaaaatcataaaatgccatttgcggcgcaatattaccataagaattcaaaaagtataaaacaagtgccgactaccaaacttcgctggcagcagtgttttttcatacttcaatttttatgctatgtctgcttgcgcatctataacgccgaattgccgaattagtccttaagcataaagagggacgttctgtataatcagcagacgcccctctttttatttttgctttctgtctttaattttctgcaagttcggagaaacgcataagaatctccgcggcctgagcacgtgtcgcaatttcttttggcataaacattcctctgtctgtgccttttacaagaccgcgagatgatgcccagtttgctgcactctgtgcatattgcgaaatattgctgctatcttcaaatgttacgctttttattgcggaagaatcttctgtttcataaattcccgtatccataccaaggtaagctgcgtatctataaagtatcgccgcaagctgttcacgggtaatactgtcatcaggtccgaatctgttttcatcataaccgagaactatttcatttgaagcagcccagttaacagcttcggtataatatcttcccgactttatatctgtaaagtttacagatatatttccgtttgcagaaagtctctgctgattgccgactgcctgctcgtccttttcttttgccagtctgtgcagtatggttacaatctgtccgcgtgtcaccgcaccgtttggagaaaatacattctcactcgttccgagcataagtccgtttgaaacagcataatttacagctccgtaataccagcttcctgaacttatatcagtgaatgcatctgctgcattttttaaatctgaagattcttcttttttcgaatcatcatcttcagtttttttgtctgtattcgaggcgtttccgccggacggtctgctcgatgagcttccctttttagtcgtcactgcagcatttgtgatgtcgcttcgtccgacagggttctctgcataaatttttaaatcataagctgtatttgcactgaggcccgtaaagacaattgaattgtcatctccgctgcatgaagctttcgccgcttcttctccgttcagataaagcactgctgtataagtttccgctgcaggtttattgtctaataatacaggagtctcaattgaaactgtcactgaatttttcgtttcggaaagtgaaacagcaggtgcgtccggcacttcaagctgcgctgtaatcgagccgtaagctccttcctcagtcacagtcagcgacattcccatcaatttctcggcttcaattccgcgtatagtatcgccgctttctccgtttttccaaagatatgtatattgcgcctcgtctcttccgtcttttactgaagcggtcatcgtgtaagttccttcgctgtctttttctatcattattacggcgatgccttcaatttcctgcattcccgtcaaaataagatactgttctttgagcgcgtcaatattttctctaaggagttcaatcggcggctcatatgttgcaagagcttcgttcgcacttgcgagagctgttttaaattcttcccagttctgcgctatgccgtattcctcctcactcaatttttcagcatcatctataagtttatcgagttcaaggagcgcctgaaatacctcatgttcatctgctatatccgatataagctgactgaactgccaatctttgttgtaatctgtcatgacagccttatgatctatacggattcccttttccgtcatcatatcaaggaatctgtcaagttgcgcttccggcatattgcatatgagcataaactctgatgtactgcctgcgcctgtataagtctctcccgcagcctcatagcctgcaagtcctgcaagatagccgacagtttcattgagatgctcgtccgtcatcgtctcgcatacaactgccatatcattgagaattgaacgcaaaacagctccgcgcgacgaatcttcaccgaggttataaagtataactttcgcagttggaatttccgttccttcttctatgatcggcaccgaagccgaaatatagtccacttcttcaccttcccactcagtatgcggcagccgcagctttataatcattctgtcatcaggtgaaagtactgcgctttcaaagagaggcaccgtaaccgttcctctcgtttcgtcgccataatttgaatttatctgccctacgcgcttggaaaacgatgtgctctcccaaagttccctttcttcaaactcttcgtctgtatatgaagctgagaatgtataaagcgacacatcacagtaaaacgcgcttccaaggctcatatattcttccgcataagttatatttacatctaccgatttatcgtcggtgcgaacagcgcttacttcaaacgccgcatacggcgttccccaatccggcgacggctctactgtaacagcgtttgaaaatgcgcttactccatctgccgtgagaacaatttgcagcttatctcctgctgcgattctgcctgttccgagatatatgatgcggtttgtatcacttctgtaaagtattcccgatgaaagaacagctgctgtttccgtatcaagcgtatctcccgtaaatttgtaaagcacaaagtttgcattgtccgtacttgggtctatcgtcagcgacgctttgagctgcgtatcacccgccgtgattgtctcatcaataattcttacatccggctgctgtttttccggcattgcttgaataaccttaacattggaaagtgtatctgtactgtttccatctttatctgtcaaagtcagtactgcaataattttatttcctgccgtaagatctgcggtaaaatcaatacgactgctcgtctcgctcggcgttatttgcatccactttataatttccgcagaattcacgtcgaactcatcgccagaataggtatacagcttaaatacgccggtaaatgatgcatcgaaatttgcaatcgcataaagcagcgacgcatcttcccgaatttgctgcgtcacaatttcaagctgtgtttccgtagtaaggccgctttctgtgataattccaacagcctgactgtatttatagatcgtactgtcgtcatcaaaattatatttgtaaagatgcgcctgtactgtatctcccgctttaataagcgatgaattaaaatcgagagaatatgttcccgcacctgtaaagcttacgcttgcaagtcttgtcctgctgtcagcatcaaaattcgtagccgcgtctcctgttgtcagtatgagatgtccgcctgcaaactcatcgcagcccgcaacgactattgctgccgaatttgaaactccggcgacaaattcatcctcgttaattacaagactgtcatcggccgcagactttgcttcttctaccataaccggcgccgatactgcgacaggatttcccgaattcaatattatagctacaagcttcgtgcccgcaacaagcgaacccttctgaggtgtaatcgtgttgctttcctttatatcgaatacgcttcctacccatgtgccgccgtttgtcggatattccgtttcggaggcttcgtacgcctttacgagaagaaccacattgccttccggaaggctgccgcttaccgcaatatttattgtacttgcgttgtcataaacctttccgccgtttataactgcgctcagcgttttcggcacatcgggatcagtggtttcttcgccttccgaaactaaaactgagtcatccggcctcgaaaacatcttttcgtaatcgtttcctttaggaaggaaaatttcagtattttgtgaccagtacgtaattgcgcgcactctgtacccggcgcgcagcggctctgacagcgtaacttccacattgtccatcggcgctgtaacactgtaattgccatagagagttttctgatcctcgccttcatccaagtcgatttcatcaccgtctctatattctcttacgattaccgatatcgcaatttgattttcctgtgccgctttaaagagtctttcatctcccgtaagatttatatgcagtttagttgttcccgcctcaatttctgtttcgcttatagatgcgtccgggtatgtataatcctgaaaaacattgccgtcttcatcagcaacatctatcggagatgacacaaccgagcgataatatacatcgccgtaattgtcatctccgcatggcacattaagacaggctattactttatatcctactttaagaggaagctgtgcgctgctgaaattgcatgttcccgtatatccgtcagttacaaggccagaccagagccttatattctgcacagcatctgcgtcaaacgcagtatttccggcatacgcaaagattgtgaggtagcacccgttctcaatcgaatcatcaagcctcacggctacatcgacagctgagtcattttctttgaaaagctctgttcgctcttctccgtcttgcatcatagttaccgaacagtttgcgagaatagtttccggtttcttattcccttcatccgtattcccgccattatccgataccagtactgcattcgagatataatcaacaggattttcgccgctgctgtcgcgcagcactgctaccagtttttgtcccgcctgcggagccgcgttcagcaaaagattactgtcaccgacgctaagcgtcgtatcgctgaaaagataagcgatataaagctcggtatatgttccatcaaaaaaatgagagctatcaaaatcctcacttccatccaaagcaaagactttgaacacccctaaagacggttttgccgtaagatttacggtaatgctctccgcatccggcgctatcacgtcatccttgattgttacttggacagtttcctgccccgccgcatgcgcaaacggcatagaaattaccgagaatgaaagcagtataagaagtgctaaaatcacacttataatctgctttgtttttactcgtgtcataaatacctccttttaaccattcaattttcacaattttgctgtcattgcgagtagtatatactaatcgcttgacagcgttttagagttagctcaggctaacccaatttcaataatttagagttagctcaagctaactcttttaaaagtatagcacagaaaattttaccggtcaatataaaagtaaaattttcttgggacacccagatgttgtatatcacgcgttttacaaaatgaaaaaacaacatttgggtgtcccaaactttttcaaaaatttttacattttcaatatttatattctttattttacagtttgcttaaatccataactctcttacctgctttgcattttttatcgtgactctttgcccacaaagcattaagtattccaaatatacagttaattatgaggaaaataaaaataaaattaaatcctctgtttccgtaattgtcaatccatgacccaaacagcgtcggatacacaccgtcaacaggcataccaaaaacattgcacagtcctattgccgtacccgaaactgcaggaggtatatgaagttctcttaaaatagaatatgttacagaataaagcgcaaatatgacaaatgacggaagtactgagtaaacagagacaagtgtcgggtttgaatccggcccaaagaggaacggtattgcaaacataactgccgaaatcgaaaatgcaactatataccatgtagaagtcgacttgaatactttatcagccattattccgccgacaggcgctacgagcattgctccgtaagaacgtataatcgcatacacagacgatgtatccgggtcaataccaactacatttgtcagataaggattgaaatatgacacatttgaatacatcgtatatgtagtcagataggcaaaccctattatataagttcccggccatttcagtacatgaggaatatgttttaaagttatcgggtcatctcccctaagatatacgcctcttgaagccagctttttctcatcatccaggaaaacaactgccattatcgttgctatgagagtcataataccttgtgttattataactgctctgaacgaattaaaatgcgaatatgcccataaaggaattgcatttcccgcaacacccgacaatccgtttataaaataatacgtaccgaacgatttaccggactccccttcgccgccgagattgtttatatatttaacaaggcacccccaatacgccattgtaataaatgccatcgaaccccatacaattattgctattgtgtagcttgtgacaaacgccgcataaagaaatgttaccaccgtaacacctccgatagtgaaaacaataactttttttgcatcgaatttatccgacatatatgcgcccggaagcaccgtaataaatccgagtatcatgcagactgtattcaaccaaccaagctgtgcattgcttatacccatagtctcaatcatctgggcatagaatacataacgcacatacatgagaaggaatactgttcctccgacatagccgagagtaactattcccgcccattttctaaaagtactttgctgtttcattttataacctcttttcgtttaatttgtactactaaaagtatataaaacacagcattttgtgtatatcacaagaaaatttatacaatttaacaatttttgtgtatctcttcttttaactccttaactgcctctataaatttactcgttgcctcagtaggttctgcagaataaacaaagccgattgatgataaaacattccattcaacagggatttttacgatgaacggatggttaggagtcatatctccgggatctatgattatcgaattatcagaagcgcacgcatttactatatcggtaccataatactgcgtgttcactatttttaccgtccgatatttcttcgtcatatgactgcgcagtgcgtccacggctatactgttttccggctctatcatcacgagtgtttcgcttcttaaatcttctgttttcagaatttcttttgaggcaagccgatgatttatattcattgccgcaagcaccggctgccttttaatcaccaatattctctgcgtattaaaaatatatttttcatcggtaatcccaaaaaataaatccgtttctactcctacatttttccatattttacttgcaaccgaatatataatcggaacaaaaatcatttctatatttatatcaggaattttcagttttacatttctgcatatattttctaaaaaggccgtgtctcttcccgattgtacggcgattcttactatattgttatcggcagaagctattcctctcaccttatcctttgaagtctcacaaatgtcgataatttgaagcgcatcttcataaagcactttgcccgctttggttaattctattcccctgtggcttctttcaaaaagcttcactccgccgagttccgcttcgagtccgtttatttgctgcattatcgcattcgcagacataaatatttcatcacttgccttattaaagctttttaattccgccacctttacgaaagtcaaaagttgatttatattatacatatcttgcctctaacctattattttggtatttttttaatctaattatacattaaaacagaataaaatagcaaaaaacttccgcatattttcctgcatttcgcaaataatatgactacaccaatcaactgcaattaaaggagatgaagcgatgaaagcaacaggtattgtcagaagaatcgacgatttgggacgtgttgtgatacctaaggaaataaggcgcgtactcaggatcagagaaggagatccgcttgaaatttacacgaacaacagcggagaagtaatattaaagaaatattcgcctataaatgagctcagccattacgcgagcgaatatgcggaaacagcggcaaccattctcggcgcttcggtgctgatttccgatacagatcaggtgatagccgtatcaggcggtcttaagaaagatatggtagacaaaaaaatcgactacgagctcgataaaataattcagagcaaaaatagatttttaaacgatcacaaaattgtcgttcctatcgtatcccagggagacgcaataggttcaataacagtaattccgaaagaacaggacaaagtcctcggtgacgcggagcttaaagccgctgaaataggcgcaagttttcttgccaaacaaatggaaagttagagcttaaatacgctctaacttttttcctttttttattccgataatagcgcttatacagcctatgatacaaaacgccacacatatgaacatcgacatcgtaaaatctccgccgtttaagtctgctataaatccccacagcgactgcattgccgcattgataatcccgttgatgagtgaaatccttgcctgtattttcgtgtactctcttattccgaatgcatctattaccacgagtggattgagtactgtggcagacgcataaatcataccgaacatcgcagctccgatctgcattatcaatgtcgatgaagagccaaagaagagcataagaaaaagtccggccacagaaatacccgcacctatagtaaccgcagcaggcgtattcctatcggaaatagcgccgagcgtatttttgcccacgagcgtacctatttgcgatacacctgcgagcgttgccgcaaatgtcagagaagcgccgagagatgacgcatacgatggcaaaaacggcacaaatccgctcgccgaacctatcatcataaggctgagcacaatgtatataaacgcgcttgaatgtaccgccttttccaccggcactcccgtcgctgatttggcagtcgccttttctgctgcatcctcactctcaaactcttcaatgccgtaaggtctgatgcctatatcgcgcgggtcgtccttaaaaacaaaaatcgcaaacggcagcgctataaaagctactattgccgcatataaaagatacgtcttttcccagccgaaatgcgccataaatttaccggccagcggattgatgattataccgcttacacccgtcatagatgaagcaaaaccgataaaaaatcctacctttttcttaaaccacctgttaagcacgacagtatttaaagtcgaggtcgtaaacgccgaaacaaatcctaaaatgacagctgtaatgtagaagaaatatacttttgtaaacagcgcctgcagcgcaaaacaaacagcctgcagcatgagatccactattagaatatgcttaagcttaaagcgctctatgagattgctcacaaacatcattgaaaccgagctcgcaagagacatcaccgttgcataaaaagcaaacgtaccgcggcttactccgagcgcctcgcttaccggtgtataaaaaatacctgcacagccaaacataagagctacgcttgtaaacgaaaatacacagcagcaaattactatataaaatccataatgtattttttgtttccccatcgaattctccataatcaactttgtattttttatcctctcgaacaatttattctatataattactcacatcttgtcaactttcaaattctaattttggtgatgcaaggtttcaagaagctcaagtgtctcgctgagcttatctttcctaccgctggcaagtacgtatctcacaaacggttttactccgccatgtataaatatatgcttgccgtataacgatacagcttctgcaagcgcctccggtttaagtccgtttctcgcagcaaaatcgagcactattctcttgctcggctttcctgatacggtaacagtttcttcgcgcacacgcgtcgcacctatgctctccgccgctgaccttatacgcgatattttcataagattaatcgtctcttgcggtatatctccgaatctgtctatgagctcgtccgtgagttcatcctcttcctcagctgtaacgataccggctattctcttatacatcgcaagctttgttacctcgtcgtttatatatgtatcaggaatgtaggcagctgcggcaagctcaattgaagcttcttccgcatccggattgacaatttcacctttgagagcgcgcacggcatcatctacaagcttgcagtaaagctcatagcccacgctcatcatatgtcccgattgcgccgtaccaagtatattccccgctcctcttatttcgagatcgcgcatagcaactttaaagccggcgccgaattccgtaaactccttgatcgcgcgcagtctcttttccgccacctctgtaagcactttatctttttgatacataagataagcatatgccattctgctgcttctgcctaccctgccgcgcagctgatagagctgtgacaagccaagcttgtcggcatttaaaattattatcgtatttacattcggtatatctataccagattctatgatagtagtagcaacgagcacatttgtctctccgtttatgaacgccagcattactttttcaagctcgcgttcatccatctgcccgtgtccgactgccactctggcatcgggaacaatatctcttatttcggccgcgattttatttataccctgtactctgttaaaaacaacataaacttggccgccgcgcgaaagttctctttcgataatttctttaataagcgcatagtcctgctccagcacatatgtctgcaccggatagcgttcctcgggcggctgctctatgatgctcatatcttttatgcctgtaagcgacatatgaagtgtgcgcggtattggcgttgcggacagcgtcagcacatccacattttttttgagcattttgagcgcctctttatgctgtatgccaaagcgctctgcctgcat

SEQ ID NO: 783 - DNA, 3408 bp, Unknown
  16S sequences of unknown bacteria
ctgccgtttcagcatctctcgctgtattcgctgaccgtcgaagagcattcgctgtttggcgtgcagggcgtgaagcaggcgagcgatgagcttgaatatgccatgtatgcctatgcgatcgatgagctgaagaagcatggcttcacgcagtatgagatcgccaactttgccaaagcgggcgcgcggagcaagcacaatcaggtttactggcgctatgagaattttcatggcatcggctgcggtgccagcggcaaggaagactggggacgttatgacaacacccgttcgctgcaggaataccttgagcgcggcccatgcgcgcaagagatcgcgctcgatgcgcaggaacagatgtttgaggcgctcatgatggggctgcgtctgcgcgagggcatctcgctgcagcagttcgaagcgcgcttccatgcccgcatcgaggagaggttccccacggccatggcccagcatctggggaaggacttgtttatcgaagaaggatatctgcgcgtcagcgaggaagggaagttcgtcctgaacgatattctcgtcgattttctctgaggccttgcaatcctcctgtgtttcatggtataatcatctcgctttttgactgggatcaagccatcctcggacttggtctcggtgaggaaggacaaaagataagacaggaggaattagaacatgctgctgaaaagcgaaaaacaggccattatgaaggagtacgcccgtttcgaaggcgatacgggatcaccggaggtacagatcgcggtcctcacagagagaatcaaccgtctgaccgagcacttcaaggagcacaagcacgattatcattctcagagaggtctgatgaagatggtcggacgccgcagaaatctgctcgcgtacctgaagaagaaagatctggagcgttacaagacgctgatcgaccgtctgggtctgcgtaaataatgggaaacaagtccggcaacggactttttcttttgcccttttgcacgttcattttgtgcattattattttgttttcccttacaaattatgatatgataagatggattgaaaaacagaggtgaaaaaatggctaaacaagtgtttcgtttagatttctgtggtcgggtgatcacagtggaaaccggcgagattgccaagcaggcgggcggttcggtgctcgtgcgctatgacgatacggtcgtgctgtcaacagcgaccgcgagcaatcagccgaaggaaggaattgacttttttccgctgacggtgggatatgaagaaaagctgtattcggtcggaaagatcccgggcggattcttgcgccgcgagggcaggccgagcgagcatgcgaccctggctgcgcgcatgatcgaccgtccgatccgtccgctgttcgcggatggtttccgcaatgaggtgcaggtggtcaacaccgtgctgtcggtcgatcacgactgcacgccggagatgaccgcgatgctgggctcatccctggccctgtgcatttccgacattcccttcaacggaccgatcgccggcgtgcaggtcggccgcatcgatggagaatacatcatcaatccgtctgtggagcagtgtgagcaaagcgatatcagcctgaacctcgctggcacgagcgaagccatcaacatggtggaggccggcgcgaaggaagtgagcgaggaagatatgctcggtgcgctgatgttcggacatgaatacatcaagaaactgtgcgcgttccaggaagagatcatcgccgctgtcggcaaggaaaagcgcgagatcaagctgttcacggtagatgaagagatcgaccgtgaggtgcgggatcgctttgaggccgcgatccgcgaagcggtctccatcgaaaagaagctagagcgttatgcgaagatcgacgagctgagcgaagaagccgtcgcgctgtttgaagcgcgggaatatgaaagcgaaaaagagaagaacacggtgctcaagcaggtcaaggagatctgccacacgatcgaggcggatgaggtgcgccgcctgatcatcgaggataaggtgcgtccggacggccgcaagatcaacgagctgcgtccgctgaactcgcaggtagacctgcttccgcgcgcgcatggcagcgccatgttcacccgcggagagacccaggtgctcagcgtgacgaccttgggtgcgatcaatgataatcagatcatcgacgatctgaccgaggtcgagagcaagcggttcatgcatcactataacttcccgccgtattccgtgggcgagaccggccgcatgggcagcccgggacgccgtgagatcgggcatggcgcgctgggcgagcgcgcattgctgcaggtgctgcctccgctggaggagttcccatatacgatccgcaccgtggcagaagtgctcgaatccaacggttcttcttcccaggcttccatctgtgcgggcacgatgtcgctgatggcggccggcgtgccgatcaaggcgccggtggccggcatcgccatgggcctgatcatggatgaggaaagcggaaaatataccgtattgaccgatattcagggcatggaggatcacttcggcgacatggacttcaaggtggccggcacacagcagggcatcacggccatgcagatggacatcaaggtcaagggcatcacgaaggagatcttcgaagaggcgctggcgcaggccaagagcgcgcgcaaggagatcctggcaaacatgatggaggccatcagcgagccgcgtccggatgtcagcccgtatgcgccgaagacgcatgtgatgttcatcaagaccgacaagatcaaggatgtcatcggcccgggcggaaagatgatcaaccagatcatcgacgcctgcgacaaggtgaagatcgatatcgatgacgacggacaggtggtcatctatcatacggaccgcgaggccatcaacaaggccgtgcagatgatcgaagacatcgtgcgcgaagcaaaggtcggcgatgtgtatgacgccacggtatcacgcatcgagaagttcggcgccttcgtgacgctgttcccgggaacggatggtctgctgcacatctccaagatctcgcacaaccgtgtggataaggtagaggatgtgctcaagatcggagacaagatcgaggtcaaggtgacggagatcgacagcaagggccgggtaaacgtcagtgcgaaggcgctgctgcctaagccgaagcacgaacaccgcgacgcgaagaagccttctcacagcgaaaaatagacactggacagacgcttgtgcacctttgcacaagcgttgttactattcacagcagggaaatgaaaaggcgcgggaaaaacacgatgttagaatcagtcttctgattctgcatcgtgttttttcatttctgcaattgtgatatatctttctcctaacgccctttttatcaattcg

SEQ ID NO: 784 - DNA, 21547 bp, Unknown
  16S sequences of unknown bacteria
gcgccgacaatacttggctggcaacggcccgggaagataggtcactgccggattctattatattcctccatagctcagttggcagagcacgcggctgttaaccgcggtgtcgtaggttcaagccctactggaggagccataaaagccgaagattatcttcggctttttttgttgtttcttatttaatgcaaatcatatacaaaatatcatgatacgtttatataaagttttaaagcttaaaatctttgcgtttgagggtacctgtgatgagcaataaaaccagatagataacaaacgataagagaatggaccaaacgatggtcaatccagagaggcaaagtatgcgaagcagcagtacagaaattgcaatacaaatggtaggtgataggatccagccctgaaaatctatatgaaacttggtaaccttgcacagccttcgaatgctgaggagagcgttcagggtttcagttataaagataacagcaatgtatccggctaatccccaccagggaagaatggtgtaaataagaccgatccctacgatagtatccaatatattgatgccgaccaccctgacctgttgatttagcccctttaggatggcatctacgatttcatcgaaatacataagcgttaccagcggcgctaaaattctgatataaggagcagcttgtaagctatgatatagcgccaagctaagttggtctgcaaacgcaaataaaataccactgatgcagatggaaaataaaagagtgattttgaaaatgcgcgataaaacgtggagtatctgtccatttttgtgctgtacatttttttccgagatttctggaatcagtaatgtactgacggatgaaagtaaaacggagggaaacatgatgacaggcatgaccataccgccgattagaccgtattgtgacatggcttcatcacagctgataccagacttttccagtccatttggaatcataacttgttttattgtgacaagcgccgagcgtacatatgagctgaaagcgatgggtagacagatccccaacattttttttgtgagctgaggatgtttttttgttttttgtgcttttttcctctgatccacgattagaagcaaccccaaatataaaaaggaaaagacttctgccgctacatcgcctagaaccagagataagcaggcgccatctatgccctgcgggaggtattgccgtaaaaggagaagggtaatgacgattttgatcccctgtttgagaatttgtgcgctggcgtttttggttgcattgcgtaatgcggtaaaatatccggtaaagacagaggagagcgccagtggcggcaaactaagcgcaagggctgataaaggtcttactgtgattctattatgtagccaaatactggtcatccatggcgcagcaaagtatagggcaaacgccgtgccaaaactaaagcaagcgctgtacttcaaacatttgtgcagcgcggccttggctgtaccgggagagcgaacggacaattcctcggtgacaagtcgagtagtcgtaaggtgaatcccagaggtagctacggtgatggaaaacatataaatagaggtaatgagctgaaatacaccgatgccttctgatccaatttgattggcaacatagacgccgaaagagacgctgaccatgcgaaccaataacgaagtaccagataaaatgatagcattcagcaagaactttttcgcttttcgcatggtgctcatcctttctcatagggtcaaatggcaagtaagaaccttacgactaaccttatgagaacaaatctctggttatccccgagatttgacaggattcagtaaaattgtgaaagatagcgtactaagttttgatgagcgatcttatccaacagcgatcctcgaataccggcgttttgaaaggcttgcaggatcaacgaaaaatcttgtgtgccatggagcccgtatgggagagccgtcacgccgtcaaaatccgaaccgaatcccaaactgttttctccaccaagatctaggatgtgcaaggcatggcgaacgatatcttgtacgctgctttgagaagtggagagaaaggctgcattgaagtttaagccgatataaccgtcttgctcgatcagagcccggatttgtgtatctgtaaggttgcggggatgaggacaaagcgcataagcgttgctgtgagaggcgaataaaggcgcctgtgaatacgagatacagtcccaaaacccagcaggattcagatgggaaacatcgatggctacgcggtattcgttcatgcaacgtacaaaccgcattccttgcgtggtaaggccgttttgggtgtgctggccatccaaagccggatatgcaagcgtattggcatgattccaaacaagagacatggcgcgaacgccgagacgggcatacagttgcaatagctcggtgctatcgtcacatgcttctccgccctctatggatagaacggcccgcgtagagccaaaagggcaggccagggtgtccagttctgcggggaggatgaaatacgggccccatgcattcagcatgcgatcataggcgcatagctggcgcaggcactgcgaaacgggatgttccggccggctgctgtcgataaacagggcaaagatctgtaaaccgatctttccttgctgaagtccggccaggctaaattgtccctggtcggaagaattaggctgcaggatagatgcattgtgccaaacacgggacaaaaaatccgtgtgcgcatcggcaatccaagggaaagacatagagcgcctcctttgcgttatcaccatatgcaagggcggacagagaaagaagcgaaagaaaaggccctttttaaggaccattgcgcttactctccttttgctggggtagaggttttggattgccgttctttttgccccaattctttccagatcgtacaaagcatggtgataaagcaagcgcctcctccaatgaaattggagatgggttcagccaaaaagactccgttgacgcccaaagaaaagagcctgggcaaaatcaaggttaaaggaatgacaataaacgccttgcgcagcagagagaagaagatcgcttgtttggagcgccccaggccaacagcagcagtctgcccggacatttgcaatgccatcataaagaaaccaaagaaatagatgtgcatggccggcaccgttacggtaagcagagtagtatcgctggtaaaaattccaataaaaggatgagggaatatcaaaagacacagccagatgaaggtggtataggaaacacataaaacagacataaacttgatgccctgccgcacacgcgcatattcctttgcgccgtaattgaagcccagaacgggctgcgctgcacccgttaagccattgatgggcgcaaaggctacctctcgaagggaattgatgatggtcatagagccgacatatacatcgcccccaaagagctttagcgtggcgttgcatacgatttgtacgccactgttggtgacattcatgataaatccagataggcccagggctacgatctcgcgcacaagcgggaaggagaggtgcatatcctcttttttaagctgaatgagggcctgcttgccggatagaaaggatatggcccacaatgcggaaacaaattgcgagatcactgtggcgatggcggcgccttgaacgcccatgccaaagacaaaaataaaaaggggatccagcacgatattgataacggcaccgatgacgacggtaagcatgccttttcggccaaatccctgggcattgatgaagccgttcatgccaagactaagcatgacaaaaacgctgccgcacaaatagatggtaagataatcattggcgtagggaaaggtagcgtcgctggcgccaaataaatagagcgctgggcgctttagccaaaagccaactcccatcaacaggatgcctgttatgatcaataggacaaatgtactggccatgacatgagaggcgcgcttggagttgccttcgccgcgcgcgatggaaaacaaaggtgcgccaccggtgccaaacaggttggcaaatgccgtaatgatggagatgatgggaaaggtaaggccaatcccggtgagcgcagcggccgaaacctctggcaaatgcccaatatacatgcgatccacaacgctgtaaagcacattgacaagctgggcaaaaatcattgggacagcgagttgcagaatattttttgagacagttcctttggaaaagtcgctggtttgctgtagcaaaacgcagtcctccttttacaatgctcttatacataatactagcgtattccacttttttgtacaacagacggaaagctgcaaaatacgaaaattcccatacataaaagcgacggtacacgcggatagtaaacccagaggcatcggggcaaagggaggaacgttatgaaaaattatgataagatccgcgttgtgcaatacggatgtggaaagatggcgaggtatacgctacggtacctatatgaaaagggcgcagagatcgtaggggcaattgacgtagatccaaacatacttggtatggatgtcggggaatttgcagggctgggacgcacgttgggcgttaagatttgcaaggatgccgataaggtgctatcgcagtgtgatgctgatgttgtggtgatgacgctgtttagctttatggaggatatgaccccccatttggagctatgcgcccaaaagggaatcaatgtgattacgacgtgtgaggaagcaatctatccgtggacaacctcgcccagtgtcaccaatcgactggaccgtatcgccaaggagacgggctgtaccattgcaggctctggcatgcaggatattttttggattcatctggtttctacggtcgcggcgggcagtcatcgcattgaccgtatcgaaggggccgtcagctataacgtagaggactatgggctggccttagcaaaggcgcacggtgttggattgacgccagaggaatttgaaaaccaaattgcacatccggaaaccctggagccggcctatgtatggaattccaatgaggcactgtgcaataaaatgggatggaccatcaaatgccaaagccaaaaaagcgtcccctatttttatgataaggagctatattcccaaacgctgggacaaaccattccaaagggaaactgtatagggatgagcgcagtggtaacaacggagacgtttcaagggcccgtcattgaaacgcagtgtatcggaaaggtatacggcccggatgatggggatatgtgcgattggaaaatcaaaggagagccggatgtttcgttttatgtggaaaagccggctacggtagagcatacctgcgctacgattgtcaaccgcatccccagccttttagcggctccggcagggtacattacggtagaaaagctagaagaggtacagtacctatcctatcctatgcatctgtatcgcgaaggcggatgctggtaaaaaagaacagcctttacggctgttcttctttatgtcgtttgctagccggccaggcccggaggacgggcgtatccagcaacggcagcacctccgcagccccatcttgctgcatcaaggacagcacggcacagagcgcatccatatatcccgctatatatccatcgctgtatgcagcagagcggagccctattagatgccagccttgctcttgcagagcatgtgcagtatgttcgcttacagtactatctacccgaaggtgggggtgggtaagaatatagacgcggtccggtgccttgggttgcataaaatacattcctcctactctagcttttgtatgtgcgaaactacatagagaaattcagattcagacgcattgggcatactgatccgaagcaagcaatgcagagacggaaactctacatgccctattacaccgtcatggtccacataatattgcatggtttgcccgtaaaaggggacggagtgggcagacggtgtagattcctgatcagtgaagaggaactgcgtacccatttggttgtgctcttcgatcatggtgatgataaaactctggtactgtatgctacgaatcaaagaggagtcgtcggctacgaaagtacgtgtaacgaattcatccccacgaagatcaaaatgagattgcccggatgccgaagatgagggggccggttctacaaagctacgatacccccaagtaccaacgggaataaaagccataaggcagaccattgcaaatagcaacaacttagaacgtctgaggcgaggcctacgagccttagaagcagtttgttctacttgcagcgatttttcggcttttcgcaaggctgaaagcatagtctcgtcgctaacatcaggcccaaccagacctagacggcatttcttatcgttttccttttgaatttgtttgacccgcttgatgctcatttgctttcatcccctttcaagacaatctccagttcctttttcaatcgatacaggtgtttggataccgaaggaacacgcatatgtagttttttcgccaaatccttcggcttttcgtgataatacaggtgaagatacattgcagacgcccattgagcaggtaatgtcattagaaaatctaggatgatgatatctgtcaacgaatcgttcgctatatccggtgtgatgagaagatttggcttgtccgtcaatgagacggactcgggaacagcggtacgatgataatccgcaaccacatgctttgcgatggcgaaaatccaagaataaaatttagccgggttgcgcaggctagaaaaattcttaagcgctttatacgccacgatttgtagcagatcctctgcatcagcaggctgacaagcatgtgccaatagatagccaaagataggtcttttgtaccttaaccacagggtttcaaatttttcttccataaatttctcctttcgttgtccgattttgctgcgaacaagcgtcttactatatggctggtcatcataggtaggtcgacaaccaaacgcaaaggagaaccagatatgaagaaatttttgggaatcatgatggccgcgttgctgatgctgggtggcaccccagcattggcggcagcggatacagactctatcgttttagagcaagcagaacaggatgcacagacacgcgccatagcagaagctggctgtatattgacacgtcacaactctacacagatgaaaatttatgttacctgtctgacaaactatagcgcggatatcatagacttttatgtagtgttgcaacggtggaatggctctggatggacaaacgtacaatccttcagcgccaataaaaacggcaactatctttccatgacgaaatacgtttcgccgaccaagggctaccgctaccgtgccaaagcctatgtatcaaccgcgtcggccggatctgccgttgtaacgtccggcgaagtaaactggtaaatccccctttctatacagaatagacgaaccttacgatgaccggctatttaactacccattgatattgtgaagattcgtaaattatctgctaatttacataattatactgttcagtttccatgctgtccaggagaaatacccagggagttagaacgcggttgttataatttttataaataggaagaaagcgaatgatcggatgactgaaattgaatacgtaaaacaaagaattacggcactgcgaatgaaactcaggatatccgaacgtcagctttccggtatgctggggaagagccccaattacattggtgcggtcttggatcaaaaaaatccagatggcgggccttcgatgaagatgttctttaagatctgtgcactgttgcgcgtaacgccatatgaattttttgatgaaatgaatccctatcctatccagacccatgccgtgatagagcagctctttcgtctgacagagagaaaagaagaacgcatggatcagctggtagctctcttggagaggatggacccggcatggttttctgagatgctgaacctggcagaaggcagccaaaaatagataaagagacatgcttaaatcacgctttacttttctatgctgtgcattgcgcaatccttctagggatggtatgctacaaaaggcataaggaggtgtggagcatggaaacagcaaagatcctggtggttgaggacgatgcagatatcaatggccttttgactgcaatcctcaaaaaacagggatatgaggttacctctgcattttccggaagtgaggcggggctctgcctgcagaacggaacataccagctggtgctgctggatctgatgctgccggggatcacgggagaaacattgatagagcagatccgaagcgaatacaccatgccgattcttgtcatatccgccaaagggcaggaggataagctcaatgtgctgcgtatgggcgtagatgactttatctcaaagccgtttgatgtggaggaagtgatagcgcgcgtacaagcccagctgcgtaggtatacgcagttctccattcataagcaggaggcgggaaagcttcgctttaagcaaatgaccctggatacagatgccagggaagtgcggatccagggtaagcgtgtggcctttacctcccatgaattcgatatcttaaagctgttgatgatgtatccgcgcaaggtgtttacgcgggaaaacctttttcagaccgtatggggcgaagcatattacggcgacgacaacaccatcaacgtacatataagcaatattcgtagcaaaatcgcacagcaggacccagaccgggaatatatcaagacggtttggggcgttggctttaaaatgagtgatgactagacatttggcaaaagggcgaatacgccctttttttatcgccaatctttagagtttcttaagattttctttagggtttcttggcaatgccctcttacaatacacttgtaaaccaaaaagagagaggacaggaatatggcagaaagcattttacaaaccagacagcttacaaagcaatacggccatgctttggcgctggatcatgtggatatgcatttggaaaaaggtcaaatttatggactggtcggcaaaaacggagcgggcaaaacaacgctgatgcgcctgattacggcgcagagctaccctacaagcggggaaatcgtgctctttggccgtacagagccggatagcgtgcgcaggatgaggacacgcatcggggcaatgatagaaacgccgtcgttctatccgttcatgacagcggagcagaatttggagtattacaggatacagagaggcatcgtaggcaaaagctgcatccaagaagcgctggaaatggtgggcctgacggatacacgcaagaaaaagttcaaaaacttttccttggggatgaaacagcggctgggcttggcgctggccgtgatggggcatccggatttcttggtgctggatgagcctatcaacgggctggatcccacggggatcattcaattcagagaaatcctcttacaattgaatcgagaacagaatacgacgattctgatttccagccatattctatccgagctgacaaatctggcaacgcattatggatttatagaccatggatgcatgctccaggagattacggccaaggagatcgagcagcgttgccgtgagtttatcgaactgaccgtggatgatacggctaaagctgccgttgcgttggagagcaggctcaactgccgtgagttcgaagtgttgccggataataagatgcgggtgtatgcatatttgtccgcaccgggcaaggtggcgcaggcgctttctatggccggggttggtttgctttccatcaatacgcatacggccaatctggaggaatatttcctttccttgatcggccaggacaagtaatgtaagaggaggagcagatatgtttaatatcattcgcagcgaactatataaaacaaggcaccgtaaatatccttatattttaatcggcatattgagtgcatttatcttattctttgtcaccgttacggcgtttcaaaatagagtcaacaacgcaaacatagggctgggggacgttttactggcatgcgttccgctgctgagcatgggcgtctatatgacaatactcatcgtagatgcggtattttctgacgaatataaaaaccagacgatgaaaaatacggtggcattcggcatctcaagaaccagcctattttttggcaagctcattgcggaattgattgtagcagtcatcagcctcatcgttttgctggcggtactgatcctcagtacgctgattttgatgggcccgggggaccagatggtcttgcaggcggcgcttcctatctttttccaaagggtcgtgctatgcctgccgctgtttgtaggggcgttgtgcgtggcaaactttttgtcctttaccatcaaaagcaatggagtttgcatttcggtattctttatcatgtttaccttgggcgcacagttctgcagctggctggcgcagctcctgggcccggtattcttgaccattcgcagttggcttttgatgccccagttcgatagtattgtaaaaaataccattgtatttggtgatgtgcttggaaaatgcttaatcgtaggccttggctatgccattgtggccacggtggttggcttggcgctatttcagcgcagagagatcaaataaggcgcgttgaaaggcggaaccttctggttccgctttttgtttatactacggtatgatatgatgaaaaaaaggagggaatagcatggcatggctctggatcacgatatcctggataattacggcggtaagcatttgcattgtctgcctgatcaaacgcaatatgcggcaggcggctcgctctattcgcgaaatcgtgcagaccaatacgacgcagcagctgcttttatctgtgccgcaaaaggatacagaagcgttgtttaaggagatcaacggcctgatcagcgccaaaagggaaggagatttacagcatgcgcgcagggaaaatgagctaaggcaagagattgccaacatcacccatgacctccgtaccccgctgaccagcgtgctaggctatttacagcttatgcaggatgataaactgcctgaacaagaaagacagcgctatctggatattgtgcaaagccgggcgagggccttacaggcactcatcacagggctatatgatctatccaggctggaagccggcggctatgtgttacagcgcgagccgatccaggtgcagagccttttgtatgaattggccgcagccttttattacgattttcaagaagcgggcatagaaccggatctagagggcgtgctacaagacatgccgcccattcaagcagataaggaagcggtggctcgggtgtataccaatctgttccaaaatgcactcaaacatgcatcggaaaagttggtcattacggcctattgccagggaacatggctccatacgacgttttctaaccgtgcagaaatgttgacagaagaagatgtagcgcatctgtttgacagattttataccgcagataagatgagaatcggacgcaataccggcctggggttggccatcgtgcgcaatttggtgcagcagatgggtggccgggtatctgccaagctgtggcagggtgtgctgacaatctatgtggactggccgctgacctagaaagcaggcagtgggcaaaccattgcttgcggcggcaaacaaagctgtgatatgataagacaatctatgggaggtggcaaggattggaaaaggatcatccgactaccataaaagatttttttaagcgacgcttgatcatttgtggcattgtgcttttgatcggtgtggttttgtttttgtctgctatgcaaatcaccagcgcaatgatttttggcgacgaggccatgtcgacgtatatcagctataccttatcgcaggatacccaggacatcacgagggaaaccttgggacagtatttttcagattcccttgtcaatagcggcaagctggatgagcaaaaaaccatctatgaccagtattcgatttcaaattttgtagaaagcaatgaaaccaattgggtatgggcatggccgtggggtttttccgcaacagttaagattcacgtttcggtgaaaaatctgcaaggcgattatgctgtggaaactgaggagggagatgaggtacccgccattccggcttttgccaacggtatatacagcttgaaactgagaaagagtggcggacagtggatcgttacggatatgcgctgtatttcccaggacccggtggaaagcatcgccccgatgccgactttggccacgacgcctacgccagaggccgagccggaaacgcagacaagcccttcgccctcaggagaatgatgggatatggtgcggagcatagaccaaaaatggaacattgggtctgttgtcttgccggggcgcatgctgctggcgccgatggcagggattacagatcaagcgatgcggctcatctgtgcacagatgggctgtcatttttcatatacggaaatggtaagcgcaaagggatatttgatgagcgcaaagagcgcagagcttttgcagatccatccggaggagccgccgcttgcagcgcaaatttttggcagcgatccgcaaaccatggcggaggcggccaaacgtatccaagacagagaagacaggcgcatcgtaatgctggatatcaacatgggctgcccagctgtaaaaatcgtaagaaacggggatgggagcgcgctgatgcaaaatcttccgctggcggggcgtatcattgaggcagtggtgcgtgctgttgaaatgccggtaacggttaaaacaaggatggggtttttcgaaggccagaatgtgagcgccgcatttgccaaaatggcggaggattctggggcggcggcgctgaccatgcatggaagaacgagagaacagggctatgctggtacggcgaattgggaggcagtaaggcaggccaagcaggtagtgtccattccggtgataggcaacggcgatgtaaagagcaaggcggaggcggaagagcgcatccgagagactgggtgcgatgcggtgatggtaggccgtgcggccatgggaaacccatggatttttgcagacaaggcgccgacggcggaagagcagtatgcagtggtacaaagacatattgatttggaagtagcgctgcgtggggagacctttgccgtgccgtttttgcgcaagctgatggcggcatatattcacagtgcgcccggcgcggccaaggcgcgcgccagcatcaaccaggcagaacgggccgatgaactaaagcagcgcatgaaagatatccttttgggcggatgaaaggccatttttgtaaggaagcaccgggctttttgagttgacaaagtagcacaaggccccgtataataaatagaaattcatggagggcgtcatacgcccgtcctttttattttgtgctgtgcggaaggagcataaacagaccatggcgaatgaaacgattttaaccgccgaaggcgtacgcgaactggaagaacgactggagtatatgaaaaccgtaacccgtaaggaaattgcggagcaaatcaaggaagcgcgcggctttggcgatttatccgaaaatgcagaatatgatgaggcgaaaaacgagcagagccgtatcgaaggcgaaattaaacagctggaggagcgcctgcgcaacgctaccatcatcgatgaatctgcattgaatacaaagacggtgagtatcggctctaccgtggtggtgcaagagcagggcaacagcgagaagatgacctatgtcatcgtcggctccacagaggccaatccgctggagggaaagatctccaacgaatcgccggtagggcaggcgttgattggccacaacaagggagacaaagtagaggtcacgactccgggtggagctgtagaatatacaatcgtaagcattaagaggtgagcagcatggatcaggaaaccttgtccagtcagatggagcaggataccagcgaacaggagaccatacggcgcgaaaaattggcgcagatgcgtgaaaatgggatggatccgtatgcccataccactttcccaaaaacacatcttagccggcagatcattgttcattacgacgaattggcagagaaaaccgtatcggtggcaggccgtatcatgagccgccggattatgggcaaagcgtcctttgttcatatcttggatgaacaaggtacgatccagctgtatgtacggcgcgatgatgtgggcgaggatgtctacaagctgtttaagacgctggacatcggtgatatcatcggcgtaacgggctttgtatttaaaacaaaaacggaagaggtttctgtacatgcccaaagcctggaagtgctggcaaaatctttgattccgctgccggaaaaattccatggcttgaaggataccgatttgcgctatcgccagcggtatgtggatttgattatgaaccaggaagtgcgccaggcgtttgtaacccgtgcgaagattgtaagctccatgcgcaatttcttggatgaaaaaggctttatggaggtagagactcccatcctgcaaaccacggcgggaggcgctgcggcgcggccgtttatcacgcatcataatacgttggatatcgatatgtatcttcgcattgctacggagttgcatctaaaacgtttgattgtcggtggctttgaaaaagtgtatgagatcgggcgtattttccgcaacgaggggatggaccccaaacacaaccccgaatttaccaccattgagctttaccaggcttataccgacgtcaacggaatcatggacctgaccgaggccctcgtggcaaacgcggccaaggtggcgcgcggggaggacaacctgaccgtgcagtttgaaggacagaccattgatctaaaaccgccgtatgcgcgcgtgaaaatggtggacatcgtcaaggaaaagaccggtgtggactttttaagcctgacggacgaagaggcaagagaagaggcaagacgcctgcatatggaggacatcaaagacagctattcgagaggacagtgcctgtatgctgcctttgaggaatttgtggaggatacactgattcagcccactttcgtgctggattatccggtagaggtgtcgccgcttgcaaagcgcagcaagggggataaagcaattaccgagcgctttgagctgtttgtctgcggacgagaattggccaatgcgttcagcgagctcaacgatcccatggatcagtatgatcggtttatggcacaggccaaggcgcgcgcggaaggcgatgaggaagcgcatatgatggatgacgactttgttacggcgttgtcctatggtatgccgcctactggtggtatgggcatggggatcgaccgactatgcatgctgctgacagagcaaaacagcatccgtgatgtcttgttgttccccacaatgaaacccttaggcggtgcaaaaaaagaaacttgtgtaaataaacccgagactgaagcaccgaaagaagagctggaaaagatagatttttccaaagtggagatcgagcctttgtttaaggatttcgtggattttgagacgttctccaagtctgatttcagagcggtcaaggtgcttgcctgtgaggctgtgccgaaatcaaagaagcttcttaaattcacgctggatgatggcacaggtgaaaacaggacgattttaagcgggattcacgcctattatgagccagaagagcttgttggtaagacctgcattgctatcgtaaaccttccgccaagaccgatgatggggatcgattcctgtggtatgctgatttctgcagtacatcacgaggagggcgaagaaaaactgcatctgctgatggtagatgcccatattccggcaggcgcaaagctctattaaaatgtgattttctacattttcgaagcgcttttcaccttttacaaatatacctattactatcccaatggatgctgaagctggggtaacgatataacgtatgatttacaaaatgaatgggcagtcctataacgggattgcccattttcaaaatcttaggccaaataaaaatcattggagaagacgatgaacaggctagctaggttactgttgcaaagcaatatagaggaaggcgaaaatgcaaccgaattgccgtttttaagtatttggaaacgaagaaagacagaattacaatgccagatggaaaaacgccctatatttatatagtggcgaatggctctatgaggcttcatacccacaatgggattatggactatctgcctgggcaatatttcgtttctgcaattgatacgccgatttttggacaggtattcagcgatggcatatcaggggagttccttgcagttatcattcgctttacttataatgatgcaatttcggtacttatggatattgacggggaccttgtggccagaattatgaaatctggcctttccactgctacaatggatagctttgataaaaaagtaatgaaagatgcagagcgccttttccccatgcttggctctaaagaacagatggctttttctgcaaaaatggttcgcaaggagcttatttttgatgtattatgcggctcatgcgggaagcaatttttgcaaagtatcacaggaattcagcaggcaggagaaatatatgaaatcaatacttggatcaaagaaaactttcgggaatcgttttctgtagaagaattggcggaaagaggaaacatgagcatatccaactttcaccaaaaattcaaaagtgctgtgggtatggggccgctacaatgccaaaaaagactaagattaactgaagcaaggcgtaagatgttggatgaaaatgtatctgtgacagaagccgcgatagaagtcggccatgaaagcgtttcccaatttaacagggattataagaaaatgttccgtacaccccccacgaaagacatcatgaggctaagagagcagtcaaaaaaatagaatccgcttgaaatcgaggagaaacgtgcaagtaagaagttattcttttcctatacaatctaacaaaaatatcaggaaaggaagataaatatggttttaacggatgaattggtggatgccctctgcaaagcggcaaaggacaaaagtgaaaaagttggggttgatatcagttttgcaatttgcgatgcaagcggtttgccaaaagcattcaggagatacggagaggctctcgttttgtctacaacgcttgtccctggaaaagcttataccgcagcaattacacagtgcaaaaccaaagatgtagcggcagcttcgtcggagggggcgccgcttatggccattcaaacaaacgaccctcgcattacactggttgccggcgggtatccgcttttcataaaagggaaaattgttggtggcctcggcgtagggggagggacagaagagcaggactgcgccattgcagaatatgttgtatctgtctttgaagagtttacaacaaaatgaaaaatctaagtcctttttgtacttgtgatcattcggaatgtcccattcatcctaccaagcacgaaaaaggatgtgcgccctgcattgccaaaaacctaaaacgtggagaaattccaaactgtatgtttcataaaattcagaatgctgacacacgagcaggcgatacatatttggactttgcaaagctttttattcagaaccactaaaatgggtgccctatgaaaagggttcctttccaaaaggccttttcttctgtatactcgcaaattcagtgaaagccgcggccttaagacagagaacataaaaaaggaaggcaaaagccttccttttttatgcttttcttagttgcgggagcgtccttggaaaatcacggcaaggataccagcgccggtgtgtgatcctaccacagggccgagctccacaatttccagctttgtgacgccaagctcttgctcaatcatggcttttagacggattgcgtcttccaagcaatcgccatgcacaatataaacggtttggtcatttaggttttctgctcgctctgaaagcttttgtaccaaataacgcatgccctttttgcggccgttgatcttagccatgggaatgagcgcaccgttttcatctacatgcagcacaggcttaatattcaacattttaccaaaagtagcagccgcgccggaaatacgtccgccacggcgcagatggtctaggctatccaccataaaccatagctctatggtttgaatatagggaggcagggcttgggcgatctcctctgccgaagcaccgcgctctttcattttcacagcatagtctaccaccatgccttggccgatggcagccgaacggctgtccacgacataaaagtgctgaccagggaaacgctgctccaattccgctatgcaggataccgcgaactgataggtagaggtaagggcggaagaaaaacatacatacagcacatccgccccctgctccatcaaaggcaccacggtctgcatgatggtcgcataattgatattggtcgtcgtcggcaaagcgccctgacgtaccgcttgataaaatgcagttagatccgtctctccgggtacgtcggtatgcggcgtatcctctaggatataggtaaacggcatgcattctacttggtgatctttataatattgggctggcaaatcagcggtggaatccgtaatcagatgaaaagggttcatatataacctccgagaaaaatatactatacaatatatcaaaaattgcataaattgcaagggagttagacaaaacaaagggggaagcccttgacaaaacgagacgtttccccgtacattaaaaagaaatagcaccgctatttccttatgttcggcatgatgccgggcggaggagaaaaccatatcaattcgccaaggaggcattgcaatgtatctggtttccaaacgagcggcccaagtggctggttcgctgacgctggccatcgacggcaaagcaaagaccatgaaacagcagggcatagacgtcgtaagctttggggcgggagaacctgattttgacacccctctgccaatccgccaggcggctgtacgcgctatggagcagggacagactcgatatacgccggcgcggggtacgctagcgctgcgccaagccatttgtgaaaagctggagcgcaggaaccatctttcctatacgccggaagagattgtggtaaccaacggcgcaaagcaggcgttacacgatgcgttttgtactgttttggaggaggatgacgaggtcattctcatgaccccgtgctgggtaagctatactgagctgatccgcatggcaggcggtgtaccggtactggtggaacgtaggcaggaagatggcttcgcgctggatatagaagcgctggaattggcagtaacggaaaaaacaagggcaattttggtcaattcgccggacaatccatgcggtggcgtgtttgcaagagaggaactggaagcgctggcggatcttgctattcggcatgatcttatcgttattagcgatgaaatctatgaggagtttatctatgagggggaaaagccgccctccatcgcggcagtgcgtcctgagatgaaagagcgcactgtgcttatcaacggcgtatccaaaagctacgcgatgacgggatggcgcattggttatttagcttgccccaagaaattggcgacggcgatttccaattggcagagccacgctacagggaatcccaacagcatagcccaggcagcggcgctggaagcgatttccggtccacaggattgtgttatgcaaatggtagcggaattcaaaaaacgccgcgatgagatggtacggcgtattcgggagatccctcagctatcttgtaaccagccgaacggagctttttatgtgatggcggatatttccaaaacttttgggaaaaagagtcaagggaaagaaattacggacagtatgagttttgctgaggcgctgctggagcaaaaggcagtagcggtcgtgccgggtgcaggcttttttgcagatgatatgatacgtttgagctatgcgctgtccatggaagatctggtcaaggggctggatcgcttgaaagaatttgtagaaggattagagaactaaacgaccctgcggggatacataagaaaaaacgctggtaagtgaaaactgagagcgaaaggaggctgcgccatgttggaattaggaaaaatgaacgtattggaagaaaacgaatacgaatatgagctgcaagacgtcgcggaaccaaatctgtatagggaattgtacgagtatgataccatccccaaaatctcttttaaccatcggttggtaccgcagaaaatgccggataagatatggattacagatacgacgtttcgagatggccaacaggcgtgctctccgtttaccgtaaagcaaattgtagctgtgttcaaaatgctgagtcggctttccggcccaaagggcatcgttcggcagagcgaatttttcctctatacggaaaaggacagggcggcggtgcgggcttgtcaagagttggggctggagtttccggagatcacaacctggatccgggccaatgaaaacgactttgacttggtcaagcagatgggcgtaaaggaaacgggtattttggtttcctgctcagattatcatatttttaagaaaatggggctgacgcgtcgccaggcggcggataaatatctcggcattgtcaaagaatgcttatcctatggcattgtgccaaggtgccatttggaagatgccacgcgcgctgatgtatacggctatgtgatcccctttgccacagagctgatgaagctatccaaggaaagcgggattcccatcaaggtgcgtatttgtgatacgatgggctttggcgttccgtatacgggcgcttcgctgcccagaagcgtgccgggacttatctatggcttgaaccattatgcacaggtgccgagcgagcagatcgagtggcatgggcataatgatttttataaggtggttgccaatgcagggatggcctggctttacggcgccagcggcgtaaactgcgccatgcttggcatcggcgaacgcacgggcaactgcccgctggaggccatggccatcgagtatgcttcgcttagagggacaacggatgggatggatttgacggccatcacagacattgccagatattttagcgaagagatgaatattccggtgcctccgcgtacgccgtttgtgggaaaatggttcaacaccacccgggcgggcattcatgcggacggcctgatgaaagatgaagagatctacaatatattcaatacggaaaaaatattgaatcgcccggctatggtagcggtggattctaccagcggcgtagcgggtgtggctcactggctcaacggaatgtttggcttaaagggcgaagatgcgctggataagaagcatcctgcggtggtggagatgcgtaagcgcattgatgagatgtatgcagaagggcggaattccgtgatgacagaggaggagcttttgcttcttttggaggaatgcgcaccggaattgtatcgagaattgacgaatttataaaaacctgcaaagcgaggggggaattcccctcgctttttacattcagagggtagaaaaacaggggtggttgtattataatac

SEQ ID NO: 785 - DNA, 12774 bp, Unknown
  16S sequences of unknown bacteria
ctacttgctcatgaacgcagtcgcttcgcgatctgtcagtgggagctttcaactcccactgacagaagcatcctcccctcacccaccgcttagtgctccgcgcacttgaatcgggggaatgcttatctgcgttcaaagaacagaaaagggtacacgggaaataaaacggagcacggagaaggcaggtgtgagtgaatgggagatgcggctgctacagatgctccagaaaggataaactatgatcgatacattactgacgattgacgggcagatcctgatatggattcaggagcatctgcgtcaggcatggctgacgccggtgatgacaggcattacaaagcttggagggctcggtctgatctggatcgtgatctgccttttgctgctctgttttaagaagacccgctgggcaggggcagccgggctgctgggccttattttttcgttgttgctgaataatctttgcctgaaacgccttgttgcacggacacgtccttatgaggtcgtcgagggattgaagctgcttacggcgaaggcgacagacttttccttcccgtccggacatgccggatcttcttttgcggcagcgacggcgatctgctgtatgcaaaaaggcagcagatggcgctggctgaccctggcgctcgccatcctgatgggatttacgaggctgtacattggaattcattatccgacggatgtgctggcgggcgcactgacaggcgcactgtgcggcgcggcggcttatatagtgatgaagcgctgccggatggcctggacggagcgtaaaggagattgaccgtataaaaggcagaaaaagaaatggctcatggagcttctggcgatgtagtgcacagaaattccatgagccattttaaccgaatcaagcaagtccccgaaatcagtagatcacaacggtcgttccgttcggacagttatcataaatgtactggatgtcttcgtcatacatccggatgcagccgccggagacaggcttgccgatattcggtgcggcgatcgatccatccgggttgtgcagccgggaatggaaggcgttctttccgtagaaatatacgacaggagcctgataggtgccgttttcataagtccagcgctcctcgcggccacgaatcttgcaaatatgggtggcagtaggactggcagcctttccggtcgcaatctttgctgtgcgaagcagcttccatttgcccgcagaaccggtatacaggcagtattcctgtgtataagtgcttacccagatcagatatttggtcgagctggaatagccgctttgattgacatagttctctttcagctttttactgtaagacttcttcgtgtaaatggaagaggtaaagtttagctttgagagactgatataaaccatgtctttgtttggaagctgcaccttacaggtgcctccgtaagtgacgacggtgacctttgtgcctttttttacccgttgccgtttggatttggaatttgccgggctggctgtcacattggataatacagtagccttataccagatcgtccggactgaggcaacggcagaagagatcgtcggtgctttttttgtgatcacccgggaccaggagccataacgggtcacaccgtttaccgtgcgataggcgcgaagcttgaatttataggtctttccggcagtgagtccggagacagagctattgactgacttggaagtggcgaccttttcatatttttttgtctcactgttgtactggaacagtgcgtatccggtcgccttttttacctttgaccaggaaaagtaaaatttcccattcgcatttttgtaaattttgaagttcgaaggagctgcgagagctgcaatcattggccgtgctttgacagttctggagactttctggctgtaatattttgtgcctccggcagaacggacgctgcggatataaaaatagtaggttttgccgggtttcagcttgcttttcgtgtaggaagtctttttagttgtagcgattctggtgaattcaccggatgttccggtgcgcatatacacctcgtaggtagttgcaccggaagcctttttccaggtcagtgacacagcgctctcagaagaagtgcgggcagtgacagatggtacggcagccggagttgtactctttgcggcaagggcagtcagcgaaaagcagaacgtcagcagcaaggagaggcagagggctgcatgaaagcgtttgaaaagcttcattataataatactcctttcctgtatacagattgtcttactggattttattacaaaaagtatacatttattacgaaaagatgtcaataaagtgactgttttcttaagaaaaaaagcgcctttcggctgtacaaaggattggatttctgataaaatagggcaaagaaaacgaagagaaaggaatcgaaacagaatgaaaaaagtaacggtagttcggcagaaccgttgtgataaagaaatgaagctgcttttattcggctgttttttcttttattatgcgatgcagctttttgtgggggtgactgaccgtccgcagcttgtcaatgcgattaatatggctttgtatctggtgtttgtgccgggctttgcatttcggacggggtatcggtttcgaacgattcaacggctgcgaaatctttgggatggcgctgtgcagttatgcggccttttttgtgcttgcggtgttggatggtgttgcaaggggcggttcctttgggcatgcattttttaatacgctgaccttattggcgattcccggaagcgctgctgtcttttttatgcttgcgcttttactgctgctggcaggtgttttttatagaccgttacaggtgctggcggggaaaaaacgggtaatggtgatcgcagttttggcttttgcactttgctcttttctgagggtaagaggagagggatatgcgattacggcagctctgttcggcgtggaaggcatggcggcagttccggcaatcccgtatgtggcatatttcctgcttggcatgtggtttgaggaacaaaagccgggcttttcatggaagcttttcggagctgcagtgatattgaccgtggcagcattgctgctgtatcgcacacctgcacaggagctatgtcggctctgtatttctgctcttccggtatatctggtttatgtgatcagcgaggtgttttctgatctgaccctgcgcttttattcagcaagatttgtgacagatactgtggagctggtgtttgctgcttatgcagctgtacttgcggtcgtgtacagattcggactgctgaatgagattgatgtgaaaaagacattactcctagcggtcggagtactggctttgctttatggtctgatccttggtgtgtgggtaagctgtatgagaaggcgggagaggtgtttgctcataaagtaaaacatccgaatctggcatattttctgatttatacagtcgtatttaccggactattttgtctggcatttattgatttctttcggtttggccggacgcttctttggaaggcggatacggtctcacagtattatccgcgagcggtcttttttgcggattatattgcaaaggcggtcggcaatcttctgcagggaagactggtatttccgatgtacgacttccgaatgggaatgggcggtgaggtaacatacagtctggaaccattatatttcctgtttgcgctgtttggacgggaaaatgtggaaaagacctatatattactgatattcctgcgcttttacctttcagggcttagtgcctcagcgttctgcctgtattttaagaaaaatcatgtgacagccttcctggcaagtctggtgtatgtgttctgtggattttctttttacgggggtgcacgtcacccgatgttcatggtgcagatgatctttttcccgctgctgattattgcaatcgaggagatcatccggaagcggcgctggtatttgtgtacgatactggttgcactgtcactgttttcgaattactattttctgtacatgagtacgatcggtatgggaatctattttctggtgcgttttttttgccagccggaaaagaaagaccggagcctgaaaaacttcatcggaagagggcttgtaatctccgggtcgtatctgctcggggtagcgatgtcgtgcatcgttctcgtgacgacatttgggctgtatgtcggatcgggccgcagcggatcagcggttattaagacaccgtccctcttttattaccatgcaaaatggcttttaagctgctttctctgctttccgacaacggccaattctccgggcgactggctgaagcttggctatctgccgattgcgtttctggcagtcgtatttctgtttacgagaaagggcaggaaggagctgaagattttttctgtactgtctgtgattctgatggcgctgcctctgtccggatttgtgtttaacggtttcagttcaatcagcaaccgctggtgctatatgctgtcattacttgtggcgtatattgtggcagactgtctggaggatatgcgcaatatgagcaggcgtgagcttctcatctgtgcgggtgtgacattgctgtacgggtatctggtgttctttggcgattactcgaatacgcgttacatgaaggctgcgtttctctgcatagctgcgacctatgcggggcttttgctctgccaggagcgctcgcggcagttccggtacgtggcgaaacagagtattctgctgctgatgacgatggggatggtcgttgtgaacggacatcttctttacagcggagccggtgtggtacgggaatacacagagcccggcgaggcacagcagaagtcggaggatacaccgcttcgtgcgatttcacaggtggaggatgacagcttttaccgtgttacgacgccgaaattgaattactctacgatttcttcctctattatgctggattataacagcatttccatgtttaatagtacattaaatggaagtattatggaatatctggaaaaaatgggaagcacaggctacagcgtaacgcagcttttcggcttgagtaaccggacatttctgaatgcactggctgctgtgaaatattatgcttattacgacagtccgaaacgcccgctgccttacgggtatgagacagcgatagagactgatctggatggaaagcagacgacagtcagtgaaaatcagtatgcgcttccgatcggttacacgtatactgatgcaatttcacgggaagaactggaagaatatgatacactgaaacgtcaggaagtgctcatgcagcgtgtgatgttggaggatctggacgatcagggaaccgcagacatcgccatgacacaggaaccgctagattttacagttgcaaaagaagatggactgtactacaatggaacgcggcttacgacgaaaaatgaagaagaaaccgagacggaggatattcagtcagatgaggaggagccgtccggcggagaagatgaggaacaggagcagacgtatacactcacgctcaatcttcagacacagccggattcggagacgtatcttgtgctgaaaaatgcagttctgaagggaaatatgacagagacaccaatcaatatttcctttcaaaatgcggaaaataaactgagctataaattccgctcggacgatgaccgttatggcaccagacagcaggattacgtatttaatctcggctatcacgaagatgcatttacgacctgtgagatcagctttgaccgggccggaacgatttcctttgacagcatggagctttacagccagtcgatggaaaactatccggattatatagagcagcttactgaggatgtactggaagatgttactgtgggagaagatgaggtgaccgggaatatttcactggatgaggataaatatctggtgctgagtatcccgtatcagaaaggatggaccgcctatgtagacggcgaagagacggagcttttgcgtgccaattatatgtatatggcattaccgctttctgcgggaggacacagcatccgtctgacctttgcaatcccgggagtaaagtatgcaatgattattatgccgtctgcagccggggtatttgttctgctgctgcttgtgagatggctgaggcgcaaacgcagagtgaaagacaaaaaggtctgaacagacagagaatgaaatatcacatagtcaggagaaaagaaacgtgttatactcaattatcataccatgctaccgctcgtcaaagacgatccgtaaagtcgtcgagctgacgatgaaggagctggaagcgatcggaaaaacggaatatgaatttgtactggtggacgactgttcaccggatggcggagagacgatggcagctctgatgggactggtgcgggattatacctgtgtgcgcgtcgtcgagcttgcgaagaatgcagggcagcataatgcagtgattgccggactgaatgcggcaaagggcgatgcatttattgcgatggatgacgatatgcagacacatccgtcccagctgaaatttttactggaaaagtttgaggaagggacgcatgatattgtgtatggctattacccgcacaagaagcacagcaaattccggaatttcggcagctatatcaattatctgtctgtgcggattcttctgaaaaagccgaaggatctgaagacatcgagcttttgggtgattaaaaaatttgttcgggattatgcgattgaatataagagtgcctatacacatttgcagggactctttcttcggacgacgcggaatatctgttcggttccgatcgaacattttgaccgggaggtcggtacttccaattatacattaaagaagctgctgaagctctggtcaaacatcatcggattttcgattgtgccactgcagatggcgactgtgaccggattcattttttccattatcggaatcatcggggcggttgtgaccgtgattcataagatcatgcggccgctgacacagcttggctggccatcgataatggtggcgatctgttttttctccggaatcattctgctgtttatgggcgtgatcggagagtatattgggcggattttccttggaatgagcaacaatccgcagtttgtcgtgcgtgcggtgcacgagcgagcagatgaaaaagaaaaccagccggaggcgcctgcagcggctgtgaaaaataaggaggatgtatgaaaaagctgatgatcatgggagcggggatctatcaggttccgctgataaaaagagcaaaggaaatgggcatctatacgattgtggtcagcattccgggcaattatccgggctttgcactcgcagatcaggtctgttacgagaataccgtggattatgaacgaatcctggaggtcgcaaagcgggagcagatcgacgggatcgttacggcaggtaccgatgtggcggttatcacgatcggaaaggtctgcgatgagctgggacttccggggcttagctttgcggcggcgaaggtttcttcaaacaaaattctcatgaaagaaaaatatgagcagtacggtgtgcgcacggcgcggttccgcagactgcgctttgacgatgacatgtacgccatcgccgcagagctgcagctgccgcttatgttcaaggcggttgattcctctggcagccgtggaatcattcgggtagattctacagaggattttgaagaggcacgcaggattgtgcgtgagacctccaggacagacgagtatattatagaagaatttgtggagggcgaggaatttggcgcccaggcatttgtactgaatggagaggtaaaattcatccttccgcatggcgattatgtattccacggagataccggagtgccggtgggacactttgctccgtatctactgtcagatgagatcatcgcggatgccagagagcagcttgcgctggcagtaaaggcaatggggctgaacaactgtgcgatcaatgcagactttattttgaaggatgggaagacgtatgtgctggagcttggcggacgctcaggggcgacctgcctggcagagctggtttcgatttactatggctatgattattatgagaagctgattctggctgcgcttggcgagccggttgactttccgaaggagcatgctgtaccgaatgcgagtatgctgctgcgcagtgaaacagatggagtgattacggcgattgagaatcagaacgctccggatccggatatttacgaaatacagtttgactatcaggtgggagaccgggcaaagaaattccacgtaggtccgcatcggataggacatgtcattacaaaaggcgagacattggacgtggcagtgaaaaagctgcatgaggcactggataagattcatatcacggtagaggaaatcaagtaataaaaaagaaaaagcttcagagtgaaagaggagaaaaatatgttaagaaaacggatatacgcatggaaaaatcgtgggatggcactgcttctggcaggaatcacagcatttggaatgacagcggttccggtttttgcagaggagcagacggaaacagcggcagaagcggcgatgcagagcgtccttccaaacggcaaggaggtctacaatgtacttctgatcggttcagaccgcagaaatgacagctggaatggcaattcggacgtcatgatcgtgatgtctgtcaatgcaggcagcaaaaagctatccctgacgtcctttatgcgcgatctctatgcggatattccgggatatggcgttcacaagctgaattatgcatatgccgcaggcggggcaaagacgctgatggagacgttagaggataattatgaactgccgatcgacaattatgcggtggttgattttgagacgatggcaaaggtcgtagatctggtcggaggcgtagagatcgaggtcagtgatgcggaatgcaaggtgctcaatgactatctgacgagcatgaacgcagccgacgactatcttccgggtggcggaagctacgtactgaacggaaatcaggcagtggcatacatgcggatccgctatgtcggcaacaacgattacgagcgtacccagcgccagagagatgtccttggtgtgatctttgcttccatgcagaagctggacgcggagcagctgacaaagctggtcgatgagattcttccgaatgtggagaatgatatcacaccggtcgatatgatccgtctgatggcattgctgccggatattggtggttatgagctttcagagagccgtataccgtatgacggactgttcacatctcagaatgagatgctggtaccggatttcgcacagacgaaagagcggcttcatgaggagctgtacggagaataaagtgattctgactcgtaggaagatggaagcctggaaaatatggcaaatgcggcaggaaagatgatatgacagaaagccctcaggggctttttgtcagcttgtggcagaaatttttttggggggaaagaggaggagaaaattgaaaaagagaagctatgaaattgatatgtgcaatggcagcattatggataagctgatttcctttgcactgccgctgatgctctccggcatcttgcagctgatgttcaatgcagtggatatcatcgttgtcggacggttcagcggaagcggggcgctcgcagcggttggttcgacgacggcgctgatcaacgtatttacgaatctcttcatgggcatttcgcttggcgcaaatgtactggcggcgcgatgctatgcggctggcaagaaaaaagaaatgtcagatacggtacatacgtcgattttgcttgcgctgataagtggcatcgggatggccgtcatcgggctgatattcgcaaaaggcgcactggagctgatgggtacgccggatgatgtcattgggcagtcgacgctgtacatgcgtatttatttccttggcatgccgttctttatgctgtacaactatggcgctgcgatcctgcgggcggttggtgatacgaagcgtccgcttgtgttcctgatcatctcaggggtgataaatgcactgttgaacatggcgctggttattttctttcacctgggtgttgcgggtgtggcgattgcgacggtgatttctcagatgatttcctgcgtgcttgtgctgctctgcctgattcgttcagacggaccgtatcgtcttcagatccagaagctgagaatgaaccgttattgcctgatgcagatctttcaggtcgggattcctgcgggtatccagagcacggttatcaatatttccaatgcgatgcttcagtcatcggtcaattcattcggatcaatcgcgatggcaggctatacagcggcaaacaatgtgcttggctttctgtatgtgtccgtcaattcagtgacgcaggcatgcatgagctttacgagtcagaattacggggcaggcaagccaaaaaggatggatcgggtgcttctggactgtatgattctgactgtggcggtcggcgtgacactcggtggcggggcgtatctgtttggcaatgagcttttgaagatttataccggggaggcggatgtcattgcctgcggactggagattttgtcgatcacgacggtgtggtattttctgtgtgggctgatggatctctttccgggagcactgcgtggcatgggacattcgggtgtgccgatgatcctttcgattattggtacggtcggcacacggatcgtatggatctactggattttcccatatcatcgttctctgatggtgcttttcatttcctatccggcgtcgtggatcattacgatcattttgcaggtgatatgctacgggtcggtacgccggaaggtgcatggaagtattgcgtgaacgcagaataagcatatttctgcttcaggtgtgtggggcactaagcggtgggggatgcggctgcgtccggttaaaaattttcggatcgggaataaaaggcatggtgtcgggttatattaactgtgtaattcatagaactgagagaaccttgcagatacgaatattggatgactgatattacagaatctgcgagaaaatttcagacacaggaaaggaacagacattatgattttaaatgagaaggaacgatccgtaatcgaagatctgcagacgcaggaaaagagctgcgtagaaaagtatgcgcggtatgccgggcaggcaaaggatccggagctgcagaatctgtttggaaggctgcaaaaggaagagcaggagcattatgattctctgggacaggtgctgtccgggactgtgccatcgtgtaactgcaacgacaatgcagggcgggaatatcagccaaaggcgacgtatactcagatgacccaatccgaagagaaaaggaatgacgcatttcttgcaacggactgtatcgggacagaaaagctcgtgtcaggaacgtataatgcggatgtatttgcgttctctgacagcggtgtgcgcaggctgctcgcagatattcaggtcgaggagcagaaccatgcagagatgctgtacaaatacaagaccgtgaacggaatgtcatagcaggtgaaaagccggaactagtttatcgtcattccgacgccgacttcgtgaatcggcagcgctgccttatacatttcacattttgccttcagggagacgcagtggcagggatagagggctgtgaggtcgcatccggaaaaatatcggattgtttcggccagacgatgtccggtttcgaagaggtgaaagccgccaatgactccggcgagttgatgtattccggttagctgcatcgcgtattcggtgatgttgcagatgccgctgtgagagcagccggagatgacaaacagcccattttctgttttgcatacgagggcagaatcgtcaaacaggaaatcggttgctcattgtccgagccggaacgccttcccgattgcatatcgcggctcaaacggaagaagcgttgggatttcgccgagaaactgacagtgtgaagagagttccatcggggttctggcaggctgataaaggaagcgggagcggatttcgttttccgtaagcggagatccgattacgagatcgccgtcccttttcggttcaaagcatcccggatgggcgatcagtgtcacatgtgataggtcaaaggagtccagaagcgcatgtaatccgcctgtatggtcattgtgtccgtgcgagagcacaagatgcgtgattgcgccgagatcaatgccaagactcagggcatttctcagaaacgcatctgagtagccggtatcaaatagaatccggcagtcgtcgatctcgatataatagcttacagccggttctccgagataatactggtcgatgaaggtgttgttgtcagcgaggacggttaatttcatgaaagacgactcctttctttaaaagaaaactccggcaaacggtgtgcttcttcatggcaccgtgatgccggatttctttttttgtattataacatatttttttgttggtggttggaaattcggattttttgcgatgaccgtattacagaagtaccggctaagagaaatgccatccattgtttttccgttggtttgatgtaaatgattgtgaatatttgcctgatgctgttgtcatacagtaaaaaaaattatatcaaatcggagtaaaacattacaattaactgagtgcatagtaaatatgatttatagatttgcaaatgtgaagcaatccgtgtatcataggagtcaaaataccttttgaccttggctgatgcctacgaattgctccgctgcgaagcagctcccgcaattctgcaaacattcgaaatccgctgatttactacgtaaatcgctactttctcatgtttgg

SEQ ID NO: 786 - DNA, 31321 bp, Unknown
  16S sequences of unknown bacteria
attcctgtccgccgtcagctgcaaaagccgtgattgcgctcatggagacgatgcagagaccggctaaaattgcgcataaaacttttttcatagtaattcctcctaaaaaatattctgattttatgcttttgaaaatcatatcacaaaagtaagcatttgtcaagtaaaaatgaacaaaaatagctataactattaattagttgtaaattaactgcacaaataattccgaaaacactcgatttccaagctattcgtgatttggttatcctttcagctatgcaaaggtgcagtcatatattaccgttgtgctcattccgcattatctgaaatgttttcgacgattttctttattgtcttgttcgctaccttttcatacttcttcgtgaaagaagcgatatttctgtcgttgtttgatgccatagtgtatattccgcttgcaacacttgctatgttgtagacgatcgaaacgtcgtaaagcaggctgtcaaagatgaggtcgagctgctttcctgtctccacatcgcgggagatcttgttggtgagggaaacatcatagtaagccttgagaacagtatcggtggagtgagagttaagggcttcaagaatgattgcacagcggtctaaggattcaccgttcagagttatcggaatcaggggaccaaagaaacgaccgtggtggaagctgtaatactgttcctgagtttcgtcatacatgggaggcacaacaacgccgaagttctgttccattgcgcgaagctctcttgcccagcatacgcattctacccagaacaaagcctgattgttggggaacatgatttcctgaacacggtgattttcaacgcccatcgtgctggttcttatatccgcgtcatagaagaagttatctccgtcggaatggcagatatcgacaaccttttcatatgccgacatgaaacgctcggaatttgtggaaagataaggaatgtcgttttcgtcctttttgacataggattcacccgttccgtaaatgaacatagggtatacgttgaatctgatgccgaggagggaatagcggtcctggtcgttgaatttaccgtcgccgttgagatccgtggaaacggaagcacccatttcggcgaacttgtcgagagtccatttatttgtgttgacgagctcatacggatcttcgagattatatgactcgagaagtgcgcggttgaagaacagaccgacagtctcgtcaagtgaagtggtcaaaaagtctcctacgccgccgtaataatgacctgcaatcgaaagatacttgcgtgcgttctgatcccagtacggcttgtcgaggtcaatatagtctacggtgttaaggtcgtatacgttattgttctggataaagcctatcgcctcgctgccgtccgtcaaaatcagatccatgtcgtcggcagttcctgcggtaataacggctttcgcttcggcggatgtatgctcgatttcggttatcttaacgtcaaagcgttcctctactgctaagttgcggtagaagatagcggaggttatgggttcgcccgtgtcttcttcaaaggtgacatgaaccgtagtgtaccacgtgtttgtctccgggttggtgttgtaaatcttgtaatcgtgaccttcaaatttaatctcaggcaggtcgtcggttattgccggtgtggtttcttccgtttctgtttccgttgactccgccaagacaggtacggtttctgttgattcggttgtgtcctcagttttatccgaattgttgtttgaacaggaagcgaacgaagacgtgagcatcagcagagcgaggattaagcaaagtgtctttttcatagggttctcctaagttgaattttcggcattattactgtttgcccggtaaaattattataaactgtaaataaagttttgtcaagaagaaaatcatcgcctcgacgaaaaaatcccgaacctcttataataaagaagtttcgggatttgtgttatgttttacgccttttgcaggttttccttgtggtactggagcatatacagctcgtagtaacgtccgcgttttgcgagaagctcgtcgtggtttccttcttcgagtatctctccgtgcgacattacgatgatcttgtctgcgtgctgtatggtcgagagcctgtgcgcaactataagcattgttccgatgttcatcatttttgagagtgaatcctgaatgagaagctccgtttcggtgtcgatgtttgcggtagcctcgtcaagtatcatgacctcgggacgctgtactattgttctcgcgaacgacagaagctgacgctgaccggcggagaagttgtttcctctctctcgaacttcctcgtcaagacctctcgacagctttgagatgaacttgtcggcgttgacttcacggcaggcttccataatttcgctgtcgcttacgtcttcgcggcgaagcagaatattgctcctgatagtgccggagaacaggaacacgtcctggagcatctgaccgaagtggcggcgcagggagcttattttgaacttctttatgtcaatgccgtcgatgagtatctcgcccttttgtatgtcgtagttgcggcagatgagcgagagtatcgttgttttacccgagcctgttgagccgacaaaagcgacagtctgcttagcttcgaccttgaaagatacgtctttcagcacccattcgcccggattgtatgcgaaccatacatgacggaattcaatgtccccgttaatgtgttcgacctcaaccgcgtcgggctcgtctaccacatccggctttatcgcgaatattgtgaatatcttttcggcagatgcaagcgcggactgtaaccagttgaactgttccgcaaggctttgaatggggttgaaaaacttcgagatatacatgtagaacgtaacaagtgtaccgctcgtgatggtctgaccgaggaatgtagaatccttgatgtagcctcgtccgcagaggtacaagaggcacattaccgaggaaatatacagcatatacacaagaggacggaagataccgaagacgaatatctgcttctgtttagccttgccgagcttgttgtttttctcttcaaactgctgctttttgaattcctcgcggttgaacacctgaattatcttcataccggaaagatgctccgagagatatgtgttgatatcagtcgacgcgtccttgacttcacggtaggctttgcgcgagaacttacggaagattacagtgaacagcacaatgaacggcacgaagcagagaaccataagagtcagctcatagttcaggcagagcattgcaacgagaacgccgattatcacgaacatattcttgacaaggttgacgagaatgtttgtgaacatcatggagatggcgtccgtgtcgtttgttactcttgtgacaagcttgccgaccgggatggagttctgctgtgcgtgtgaaagcgattcaatatgcgcgaacaggtcaagacgtatagcggaaactatcttctgaccggttttttgcagaactatcgcctgaacatacgtgcatatgagcgagactacgaggattccggcatataccgcaacatacgagaacagcacagacatctcaaagtcgttctttatgatttcttctatctgaccgatgagcaggggggagattatatcatatgctatcgaaaacagcattacgagaaggacgataacaaagctgccgacatagggctttgcgtatttaaggagattttttaatatgtcgtagtccttcatgtttcgctcgaaaccgatggcttcctttttgtcctttatggaaaggtacgcgattatgaatacaagcgagattactccgataactgcgccgacaataagaaggggataaaattctctcattactgcttgtcctccttttcttcgtcaagacgctgaagctctaccattgtgtggtaagccttgtttgtgttgtaaagctcgtcatgtgttccgacagccgcgatttttccgtcgtttataaagacaaccttatccatttgctcgacagccgtaactctgtgcgcgatgagcagtgtggtctttcccttgcgagtgcgcctgaggttgtcgagaatctttttctccgtgttcgtgtcgacggcagatacggagtcgtcaaggataagtatgggagcgtcctttattattgctctcgcgatggaaatacgttgcttctgaccgccggaaaccgtaactccgcgctctccgagaacagtttcgtagccttcggagaactctgttatgttgtcatgtacgtcggagattatcgccgcttcctctaccgcactgtgatttgctctgttgtcggcgaaggtgatgttgttctcaatcgtgtcggagaagaggaagttatcctgcggtacataagctatagcggcgcgcacatccttgattttcagtccgtttacgtcgtttccgtcaatgaacaacgttccgtcgggaacattgtaggttctcagcagcaggtcaacgagcgtggttttgcccgagcctgtcgcgccgatgatgcctatgttttctcccgcctttatgttcagacatacgtcgtcaagcgcgtcaaaatcagctccgggatagcggaatgtgagatggcggtactcgatatccccgcgaatgttgtcgatatcctttgcaccgtccttgtccgttacctcggaaacttcgtcgagcagtgcgctgattcttccgagggacgcctttcctcttgacgccatttcgataagctgtgatatcgccatgatgggccatacgactgccgtgaagtatccgatgaactcgataagctcgcctgcgttgaaaatcttatcatgcacgagagagccgccgtagccgagaattacgcatataaccgactcaacaaacagcgtaacgaaaatattgaggaaggtcgacgcctttgtgtattcaacgtttgcatcctcgttttcggtgttgagcttgcggaaggcggacagttctgcggcttcacggacaaacgcctttatgacggaaatgcccgaaaagctctcctgtgaaaagtcggacagagccgagaaggcttcctgtcttgtttcccacttgcggcgcatattcttaccgacaacagttccgacagcgaagagaagtatcatcggaatgagggacaaaaaggtcagcatatggttcatgttccacattttccacactgaaagcactccgagaagaagcgcgtcgaagaacatgagaatgcccgagccgaagcagtcctgcacagtctggaggtcgtttatgaacttcgccatgagatctccgactttgttcacttgatagaacgaaaccgagagatccttgcagcggtcgaacatacggcttctcagatcggtttcgaccttgagcgccgttccgaagaagcagattctccagagaaaacgaccgaaaaccatgattattatgacgaaaatcataggtctgcaaacttcgtcaagcaggaatgccatgtcgaaagcgcgaaccgttccgtcagcgagagttaccgcaccgtcgtttaacccgttgactacggttttgtaaagctcaggtacgataagctggaaatagtcgaccatgacaagcgcaagaagtccgagcagcaagaccggcgagtatttcaggtagtatttgttcagatgtttaccgaaaagcaagatagccctcctctaatttttttaaaaatccgtacaagtttaaataatatcatataaccgaatgaaaatcaagtggttacgacaaatatgttatttttcttacaatataaaatactctcttctaccttaaaaaatactctcttccgctttcattgacatttgaccgggcgtgtgatataataacatgtataattttgcacaggtggggaatagtatgtaccagcttaacaacgccgccgaatatctcataatgactgccgcgagactgccggataaactggcttttgccgacgacggacagggctttaccttcgctgagcttcttcatgcttcaatgagcgcgggggagagaatatacaaagaggcgggcggaataagaaagcgtatcgcggtaatcgttgacagaagcgcgctctcccttgtcggatgcttcggagctctttttgcaggctcttgttatgttccgatagactcaaaaatgcccgatgacagaatgaacgatatccttgagcaagtcgagccgtcggcagtgctgtataccgcaaagaacgctaaagctgccgcaagacttgagggaaaatacaaaactctcatgaccgaggatattatgtcttgtccctacgacccgtttttgtgggacaaaatttccgcagaggtgctcgacattgaccccgcgtacatgatttttacctcaggctctacgggaaaaccgaagggaatactcatctcgcaccgcagccttattgactttaccgaatggatggcggaggtgttggaggtagacgaaaacgacgtgctcgcgaaccaagctccgttctatttcgacttgtccgttaaggatatttatcagacgctgcgaaacggatgcacaacgtatatcattgcgaaaaagctgttcatgttcccgacgctgctcgtagactggctgaacaaccataaggtcacatcgctcatctgggcaacctctgctttcagaatggttgcggattcgggaatattcgagaaaaaacagccgcagtgcctcagacaggtcatactcggcggagaagcgctccaggcaaagcacctcaacatatggaaaaaggcagcgccggaatgccgattcatcaatctctacggaccgacagaggttacggtcgactgtacatactataagatagagcgtgattttgctgacggcgagccgataccgataggaaaagcctgccgaaacatggaggtaatacttctcggagacgacctgaaacctgtgcctgacggagaagcgggtgagatatgcgttcgcggtgtcggtcttgcgctcggatatttcgccgacagcgagaaaacatcgcgcgcgttcatccaaaatccgctgaatccatactatcccgacaggctttaccgcacgggagacatcgcaaagagactgcctgacggaaaccttgtgttcctctcgcgcaaagacagccagataaagcacatgggataccgcatagaacttggcgagattgagaccgcgctgtcgggaatacctgacgttggcgacgcgatatgcttctttgacgaggacgacgacgccattgtgtgctgctgcaagacaaaactcgatgcggtggagctttcgtcaaggcttaaagaaaaagtgccgagatatatgcttccgaacgtgtggagaatatccgacagcctgccgatgaacgcaaacggaaagattgaccgccccaaactgaaggaaagctacttcaatgagaaaaataaatgaaatctccgagctgaactcgcttattacggcgcatttcggcagggaatacgtctcaaactggtttgtctcacgggacgacgcggaaaaatacgtagcggaaggcagaatatcggcgtgtgagcttgacggaagcctgttcattctccgcgaaagagagtcgtgcggcgtaaatttctgctcactttactactgcatgaaaaagggatatgtgccggacctgtcgtttatcacgaaaactacggttgcagagactccgttccgcgaaagggatgtttcactcatggaagtcgacgagaggctgtgcaaagccggatttgagagggaattcacccgccgacgcatggcatttgttcagaaagacgagcctgtgccgacactcggagagagcatgaagtacgccgatgaaaacgacatcccgctcatagaaaaactgctgtcggagagcttttctccgctcacaggctgcctgccggacaaggacgagacagcttcagccgtgcgggaaaaacgatttatcctccacaaaaacgacggactgctccattttgagaaaagccgcgcttcctttgagcttcgtcacctttgcgttgcacagagttcaagagggcagggcatagccggagagcttgtccgcgcgtacaacggaacagtaccgaaaaaaagcatcgtgtgggtgcgcgaaggatatgctcccgccgagaaaacatacgaaaacaacggatacactgccgacggaatgcattcctcggttttgatatataagaaataagaaaggttaaataaaatgaaaaacgaaaacagagaaaagctcataggaatactcaccgacatctgccccgacgtggactttgaaaacgaagacgcgctcattgacgacggacttatcgaatctcttgacatagttgcaatcgttacggagataatggctgaatttgacgttgagattaacgttgacgaccttctccccgaaaacttcaactcggttgacgctattcttgagcttatagactccaaaaaagactgatgaatttcatatccgtatcatttatcgtatttctcgccgttactgtcggggcttactaccttcttccgaaaaagtatgcgtggtgcgctttgcttgcggcgagctgcgttttttatctgtggggcggcggatacaaaaccgtgctgtatcttgttttcactgccgcactgacatttttcgccggaattctgctcgagcggctgaacgacaaaaagtccgaaataccgaagagcgaaaaagccttgcaggacgggataaccaagcgcaaaaaagcagtcgttgcagtcgtatgcgcggtgctttttgctatgctctacgtgctgaaatatcttgactttaccgtgaacatttttgtgtccctcatctcagccttcggtaagacagtggagccgagtgtgccgaatcttcttgttccgctcggagtttcgttctacatttttcagtcggtcggatatgttgtcgactgctacagaggaaaatacaaggctcagcataactttctaaagtacgcgctgtttgtttcgttttttccgcagattgttcagggacctatttcccgctacgatcagctcggaacacagctcacatctcccgctcagctgaatacagacaacctccgagacggaatacagcgcatgatgtggggatatttcaagaaaatggttatcgcagaccgtgccgccgttgccgtgaccgcgttcttccgccattacgacgactacggtggagctgtgaccgcattctccgtgctcatgtactgcataaacctctactgcgacttctcgggcggcattgacatcacgataggcgcggcaaagctgttcggaatcacgatggaagagaactttgggcgtcctatattcgcgcagtctttgtcggaatactggagaagatggcatatcacgctcggcggctggatgagggactatgttttctatccgctgtcgctgtcaaagcccttcggtaagctcggcaaatggtctagaagcaaaatcggtggaaagttcggtaaaatactcccgacgacgcttgctacatttactatatatctgataatcggcatatggcacggcgcgaatttcaggtacatagcctacggcttctacaacggtctgataatcacctcgtccgtgcttcttgccggagtttattcgggcgctaagaaaaagctgcatatcaactccgattcgcgcggatggaagattttttctatgcttcggactgcgctcgttgtgtttgtcggaagatatatcacgcgctcgccgagacttatcgttgcgtttcagcttattataaaaactctgaatcccctcagcatgcatatccacgagctgtgggacggaaccgtcatcggcatgggactttctctctcggactacatagttatcggagtttccacactgttcctgcttgcggtggagttctacgaggaaaagcgcggtgagactgttctctctgtggtaaacaaaaaacacggtgcggtgcagtttgccgttcttctcgcgtcgcttcttgtgatactgttcttcggaatcatgcgcggctcgtatatttcgtcggaatttatctataaacaatattgatacggaaagatttgctatgacaaaacaggactatatcgacttatttaacatgatgcaccccggcttttttgaagaagagcgcattaaaaatatccccgatactgcggtttgcgaggaaatgatactcccccttgccgagtttgacaagagcagctacgacaaaaagcttgacggcagcgttatgttcggctacttcacgggagactgcggtgagctgaaaaaggacgtgctccgcgtagcagacgattggggaaaatactttaccgctgacgagagaatatactgcgcatttatcgacggcaaggtggcaagcttctgtctggtcgacggcatgggagagtacgagataaacggacggaagataaaagtagccggaccgggatgcgtcggaactttgccggaatacagaaaccgcggaatcgggcttaccatggtgaaaaacgtgaccgagatacttcgtacagagggatacgactacagctacattcactacaccggcgtttcgggatggtacaaaaagctcggatacaaaaccgtactgaaatggaacggcaagggcataatataacatatgtcttgctgaaatgagggcagaatagatgaaatcaaaaaaatggctgaccatgttcttctcgaccgtcgccgtgatactcgcgcttatcggtgtgttcaactatacgacagacccgttcggcgtgtttggcgacaagataatgaactggtacagctacgatattacgaacaacccgcgcacggcgaaaatatcctatctcgacgagcactatgccgactacgactcctatataatcgggtgctcctccacctcatcgttcccgacggaggatttcggaaaatatctcgacgcgaagttttataatatgataatgtacggcgcggatatgcttgatgttgagcagatggtgtcatacatgataaagaactacacggtgaaaaatcttgtggtgaacgtctacatcgacaacggagccgtgtacaacgaagaatcaaacaaatacacccactccatgatgccgcgcgttgacggttcggacccgctgggattttactcgcgatttttgttcgctactccgtcgtatggcgttgcaaagctgaaggcatatcagacccgcacatggctgtcgcagtactacaacattttcgacgagaaaacgggagcatacgacaagcgaagaagagacattgagcctatatcggatatggataactactacaaagcttatccggaattcatagactacccgcacggaaactatcttcttcccgctgtagacgactgcataaagagcatggaaaacatcgtctcaatgtgcgaggacaacggagtgaaccttatcgtagtcgccgctcccgtttactatgagtacatgaacaatttctaccccgattccgtatgtgcgttctacacacgtcttgcggaggttgtggatttctgggacttctcgtattcatccgtcagcttcgagccgagatacttctacgaccgcactcacttccgcaacaacgtgggacatatggcagcggcaaggatattcggagacgagagcgtgtatatccccgacgatttcggacatcttgtgacggcggaaaacgcggaggtttattttggcacatattttgacgcaaagcagctcgataccgcggactacacgaaggatgttcccgtgctgatgtaccacaacatagccgaagagccgaacgacatgacggtgactcccgagacgtttcgtatgcacatggagactctcgccgagaacggatacactgccgtaacgcttgacgatatggtgaactatgtttactccggcggagagcttcccgaaaagcccgtgctcatcacctttgacgacggctactacagcaattacgaatacgcgtaccctgtgcttagcgagcatggaatgaaagcagtgatattcacagtcggcacgagctttggcaaaacgacgtatctcgacacagacgcgcccataactccgcatttcggcgaaaaagaagcaaaggaaatgacaaattccggcgtgatatccttgcagagccacacctacgatatgcaccgcagtgaaaactacgaaaagaacgcgcggtacgatatgggacagcttgcgggagagacggaagaggagtacattgacacagtgagagaggatcttattatgtcaagagaattcctcgagaacctgagagaagacaatgttctcgcgctgtcgtatcccaaaggaaagataacggacaacgccgcgagaatagctgtcgaggaaggatataccgtcacattctcgacaaactggggagtgcaggagcttgtgcgcggtctcggacagtcgctgtacgccgtgaagagaaaccacatctcaaacgatgtaacgtcagaaagacttcttgagatagtgcagggcataaactgaataaaagctgtcatgggtgaagaattacctcatctgcggcagcttttttgctatattaatattgtaggaattatcctcttatgaatttctcgaccatcttgccgtactttgacaagccgtcctcgtcaattacaccgccgtagccgcagtgagtatagccttccattataacgagcttgaccttgtcctccggatagcccacatggagcatagtgcggcgcagcatcatgttctgctcaagcctgcaaaccatgtcgttgtcggacaccgttatctcatatcgcggcagaagctctgggtgagcaggctcttcgataaagtaaacgggagcggcttcgtcaacgcgtataagccttgtgtcaagaccgcgctcacgcagaacattatagtgtaccgtaggctgacctgcgtcaaggtagaaacccgcgatttgatttttgtcggcacagtcgattccgtgagcggcgaggtacctcttgtcgaacgccagcatcatggaaatatatccgcccgcgctctgtccgcctacataaagctcgctgtacgagagattcttcacgcaccacgcaacacattcggcagagtcggtgagaaaatcggggaagtgcgcgctcgggtacatcctgtagtcggcggagaccacactgatgccgcggtttgcgagatattcaaaagcgatgggagtgccgttgctgcggtctccgcattcaagtccgcctccgtggaaataaacgaacagcggggagctttcggcgttttcggttttatagtagtcgagtttttgctcgctcagttttccgtagggaatattgaattcggtagtcatgatatacttcctttgtttttattctgatatattatactacggaaaacgccgcactgcaagaagtttgagattttttgtaaagcggttgacaaaacagcgggataacattataatatataagagatatatgtagattttctataattattaaaggtgcataaggatatattatacagatgaaaaggttgatgtcactcctgctcacagggattattataatgacggttgtgttctccgcgcttccggcaggtgctataggacagacaatgtcggtaaaatacggcactccggtaattgacggcagcattgataaaatatggtatcaggcaacgcgtacaagactgatgaacgttaccgcaggcaaggattttagcggaaaactgccgggcagctcagtcgcgtatgtgtccgtgctttacgacgacgaggctgtatattttctctttgaggtgtttgacaacgactttacctttgacgcggacggaaagtacaaaaacgactgcataaacctcttcatagacgaaaaagacgtttacggcaagacgtggcaggacggacagcgcatgattcagcttgttccgaacggcgacgatcccatcagaaccgtacacggcaaagctccgaagtattccaaaatcggatacaagcaggagagcaacggatataccatagagtataaatacgttccgtctgattttgtcatcgaggacggtgcgcagcttctcgtggattttgctttctgcgatattgatgagaacggcgagctttcgtattacttcacatggtcggacgagataggagaaggggagagtgacagctcaaactgggcatatcttgcgctcggcggagcaggctctaagcaaagctcgggagctaaggaagccgctgagtctattggcgtaactccgataaagaattatgaatttgttaacggcacaaacggaaacccgaacgaaagcgcggacaagctctgggacggaaatgtagagacaaagttctgcacgggagattttcctctgtattccgtaattaaatgcacacagccgtattttgttacgggcgtgctcatggctacggctaacgatacaaaggaatacgagggacgcaatccgaaatcctggaaaatcgacggctcaaacgacggcaaaaaatggactacgataatctccggcgacgacagcttctttgaaaacgtaaacttcacatatttcgccacaaccgtagaaagcgatgagtcatattcgtatttcagattctattccgcaggtgctgagtcgggatgcttccagctttctgaggtgacgatatgcggaacaacggacaagagcgcaaacaccgcgaaagaaaccgaagccgctgaagaagtacccggcggaacaatagtcgagcaaaagtcctccgaatacgaaaaagagataaaagcggaagaaatagtggcgtcgggtgcaaacaatagcggaaattccgacggaagctgggctatacttgcggcaacagtcgtgttcctcggagcggcagtcgcagtaataatctacgtccagtcctcgcccaaaaagaaaaaataagcaaaaaatatccccgagtgaagtgctgtgtcctcctgaatgtcagaatttcggaggttcacggctgaataagcttccttcggggatttttcgtatgaatttattcggattcaccgtcgctttttgtctgcggctgattgtccttgagctgttttctgtagtctgcgggcggcataccgagctgttccttgaagtggcggttcaggcttcgtagtgagttgaatccgcattcgttcgatatttcaagcacggtcatctcgctgttctggagcaggtagcacgccttcgagattctgtactggttcacgtagtcgttgtacgatatcccgacagccttgcggaagtagcgcgacagatacgcgtagtcatatccggtgtatttcgcgaggttggcgagggtgcagtttttgttgtaattgttctcgatgaacttgaatatatcgtaaagcagcatatttgacgtagcctcaaccttgcgatattccgcgacggcgtcaaattcaccgcagagagagtacaaaagcccctttacgtcaatgagagggctttcgcggttaaaggttctgagcttttcgacatagaaggaattcgggcggaaaaggttgctcacgggtactttgccggaggttttttctgagtatgcgctgatgagcttaggggagaacaatgtcaaaacatggaccgagtgtcccacggttttcatcgaatgtatttggtttgaaaatatcataacagcgtcgcctgccttcatgtcgtagctgagcttgtctatctcaacgtgcatttctccctcaagtatgcaaagaagctcaaagcaatgatgcatatgcgcggaaaactcaaaatcagagcctggctcaacggtaaagtaatctgctgacaatgaatgtttaaattcgtaaaacatatttctcaccgaataataattattgtttgcttctgaattgattatactttaatcagtcactgttttcaagtctgaaattgcaaaaagtcaaattttgtctataaataatagctatgtggcgcgaaatttgaggattgatatcctacaatatatacagaaaaatattttacacttaattttaaataaggagcacgccatgaaagagtttttccccacgataccttacattaaatatgaaggaagagactccaaaaatcccatgtccttccgctactacaatcccgatgaggtaatcctcggaaagcccatgaaggatcagctgaagttcgctatgtcctactggcatacaatgtgcgccgacggtactgatatgttcggctgcggcacaaacgtaaagacctacggcgaaacagatcccatggagcttgcaaaggctaaggcacacgctgcgttcgagttcatgaacaaactctccatcgactactactgtttccacgacagagacatcgctcccgaaggcgcatctcttgaagaaagcaacgagagacttgacgttataacagacctcctcgccgaccttatgaaggaaaacaacaagaatctcctctggggtacagccaactgcttcaacaacccgagatatatgcacggtgcgggaacagctccgaacgccgacgtatttgcttttgctgccgctcagattaagaaggctacggaaatcacagtaaagctcggcggcaacggatatgtttactggggcggcagagaaggctatgaaacacttctcaacaccgacatgggcaaggagcttgacaacctcgcgttccttctcaagctgacttcatcctacgcgcgttccatcggattcacaggcgacttctacatcgaacccaagccgaaggaacccacaaagcaccagtatgactttgacgcggctacagtatgcggattcctcgcgaaatacggccttaacaaggacttcaagctcaatatcgaagctaaccacgcaactctcgcaggtcacaccttccagcacgagcttacagtagcaagagtgaatggtgcgttcggttcaattgacgcaaaccagggcgaccttttcctcggatgggacacagaccagttcccgacaaacgtatacgaaaccacattctgcatgcttgaagttatccgtgcgggcggattcacaaacggcggtcttaactttgacgcaaaggctcgccgcggttcctacacatgggacgacatcgcgtactcctacatcgcaggtatggattcattcgctctcggcctcagacttgcggatcgccttatcaaggatggcagaatcgacgaattcgtaaagaaccgctatgcaagctacaacgaaggcatcggcaagaagataagcgacagaaccgctacaattgaagagcttgaagcatacgcaaagaagatgggcgacgttacaacaaacatcagcggcagacaggaattccttgaaaatatcgtaaacgacgtaatgttcggcgcgtgaggaaagctcattttatcacaggaaaggcacggtagacccaatgaataaagaaatcgcaagaaaaagagcggaagaaatagtttctcagatgacggtggaggaaaaagcgtcgcagcttctctataactcccccgcaatcgagagactcggcatacatgaatacaactggtggaacgaagcttctcacggcgtagcaagatcgggtatggcaacggtattcccgcacgctatcggacttgccgcaacattcgacccgaagctcatcggaacagtaggagaagcggtatcgaccgaggcaagagctaagtacaacagctcacaggagcacgaggactacgatatctacaagggacttacatactggacgccgaacatcaatatcttccgtgaccccagatggggaagaggacaggagaccttcggcgaagacccgtacctgacggcggcaatgggcgtgaactacatcaggggtattcagggagacggcgagtttctcaaagccgcagcttgcgcaaagcatttcgcagttcattccggtcccgaacctctcagacatacattcaacgccgtagtaaacgaccatgacctctgggaaacctacctccccgcatttgaatacgcagtgaacgcaggagttgccggagtaatgggcgcgtacaaccgtacaaacggagagccttgctgtgcttccaaaaagctcatgcaggatatcctcttcgagcagtggaagttcgacggatatttcacctccgactgcggcgctattcaggacatctactcatatcatcattacaccgaaacgattgaagaggcttgcgctatagctcttaaagcgggctgtcacctcaactgcggcggcgcgtactcccaccttatggaggcatacgaaagcgacctcatcacggaagaggatatcaccgatgctgcggtaaagctctacacaataagagtgcttctcggcgaatttgaagaaaagcgtccttattccgatattccgtttgacaagctcgactgcgaggaattcagacagctgaacctgagggcagcaagagaatgcgctgttcttctgaaaaacgatggcttcctccccatgaatcccgcggaaaagaagaaaatcgcggttatcggtcccaacgctatgtcccacatcgctctcgagggcaactacaacggtatggcgtccgaatacatcactcccgctgacggtatgagaagagtattcggctctgaaaacgttcgtgtggctaagggctgcaacgtatggctcgaccacagaaacgactgcacaggcttcaccaacatgataagcgagggtgtatcgtacgccgaaaacgctgacgtgacggtgctctgcctcggtcttgactgcactatcgagggcgaagaaaccggcatgaagaacgaatatttcgacaacggagacaaggttgctctgaagctgccgaaaactcagatggagcttgccgaaaaggtctgcgctgtctgcaaggacgtcgtagtggttctcatgggcggcggtgcgcttgatctcggagacgagcttcgttcaaaggttcacgccgtgattgatatgtggtatccgggagcagtcggcggtcttgctgtcgctgagcttatcgcgggcaggttctcaccgagcggaagacttcccatcacattctacggcgagcacaacaccatccccgacttcaccgactacaacatgaccggcagaacataccgctacatcacagaaaagccgctttaccccttcggctacggtttgtcatacacaaagtttgagtattcctgcgccgacgttactgctgtcgaggacggatatgaagtcagcgtaaaggttaaaaacacaggcaaaatgcgcggagtcgaaaaggttcaggtatacgccgaattcaaggattcaagaacgcccactccgaacttccagctttgcggacttgacgctgtagagcttgacgcaggtgaagagcgagagataaagctccatgtagacgcgtactggacaaaggctgtcctctccgacggtaagagagacacggctgacggcggactcaagctctacgtaggcggacatcagccggatgaaagaagccgcgagctcggacttgacgactgcctcgaagtaactataagataacggagagacacatgaaatatacgataggaattgacgtcggcacatccggaacaaaaaccgtgctgttcgacagtctcggaaaaaaacaggcgtcgcacacagtcgagtatcctctctatcagccgaaaaacggttgggcagagcaggatcccgccgactggaagaacgccgtgtttgaaactgtccgcaccgtaatggagaagagcggagtagacaagaatgacgtcgtcggaatcggcatatcgggacagatgcacggtcttgttatgcttgataagaacaacaacatcctccgtccttcgataatctggtgcgaccagagaaccggagaagaatgccgcgatatcgaaaacataatcggaagagcacgccttatcgagataaccgcaaatcccgcgcttacaggcttcaccgcgtcaaaaatcatgtgggtgaagaagcacgagccggagatttacgcaaaatgcgcgcacatcctgcttccgaaggactatatcagacttactcttacgggagaatacgcaacggaagtgtcggacgcaagcggtatgcagcttcttgacgttcccgcgagaaagtggtccgatgaggttctcgaaaagctgggaattgacaaaaagctcctcggaaaggtgtacgaatcccccgaaatcacgggatatctcacaaaagaagccgctgaaaaatgcgctcttgccgagggaacacccgtagtcggaggagcgggagacaatgcggcggcggctgttggagaaggcgttgtgtctgacggacgcgctttcactacgataggcacaagcggcgtggttttcgctcatacagataatatagagatagaccctgccggacgagtacacacattctgctgtgccgttcccggagcttggcacgtcatgggtgtaactcaggctgccggactttcgctcagatggataagagacaccgtctgcaccgaagaaatacacgaggctgaaaaagaaggcgtcgacccgtatgtcgtaatggatagggaagccgcagaagctcccataggcgcaaacagacttctctatctcccatacctcatgggtgagagaacgccgcaccttgaccccgactgccgcggagctttcataggactttccgctatgcacacgagaggggacatgacgcgcgccgttcttgagggagtatgctattcgctgaaggactgcctctccgtgcttgatgagatgaacgttcatccggacgacatgaagatatgcggcggcggcggaaagagcaagctgtggcgtaaaatgctcgcggatgtgtacagaatccccgtgacgaccatcgagtctgacgaaggacctgcgctcggcgtggctattctcgcaatggtgggagcgggactttatcctacggtgaaggaagcctgcgatgccatagtcaaggctaaggaaaccgttgagccggatgaagataacaccgtgcgctacgcaaagttctacgatatctacaaaggactttacaagcagcttaaaaacgactataaagctctcgctgagctgtaataaaggagactgaaaatgaaaaaggttttgattttccagggcggctgggacggacatgaacctcagctgacgtcaaagcgttttgcacgtcttatggaagaggaaggttataccgctgaaatctacgacaatcaggaatgccttgacgacgcggataagctctgcacatacgacctcatcgtagcctgctggactatgggtcagatcacatgggaaagagtgcagaagatatctaaggctgtcggcaagggaacaggtcttgctggatgtcacggcggtatgtgcgactccttccgcgacaacaccgaatggcagtttatgaccggcggtcagtgggtaagccatccgggcggagacggacagaactacaaggtcaatatctgccacggctcaagccccattaccgaaggacttgaagacttcgacgtttgcagtgagcactactacctccatgtagaccccgccattgaggttctcgctactacacgtttcccgctcgttcactactaccatatctccaacaagcccgttgatatgcccgtagcatggacgaagttctggggcaacggaagagtgttctacacctctctcggtcatcacgacgacgtatttgataaatctcccaacgccgagatactcatgaagcgcggtatgctctgggcagcagaaggaaagcagtacgccatcgaccacaatctcacaaccgaacgttttgaaaacaacgcaaagatgtattgagacagatacggaggacaacatgagaaagataagaatcggttttgtcggagtaggcgctatttccggcatatatcttgaaaatatcaccaatatgttcaaggatatcgagataatcggcgtctgcgaccttatcagagaacgcgcggagaacgctgtaaagaagtacaatattccgaagctgtataacgatatgtatgagcttttcgctgaccccgatgttgatatcgttctgaatatcacaagaccctacgagcattatgaagtatcgaaggctgcacttcttgccggcaagcacgtttactccgaaaagcccctcgcagcatgccttgaagagggaaaagagcttgttaatatcgctcgggaaaagaacctcatgctcggcggcgctcccgacacattcctcggcgccggaatccagacctgccgtaagataatcgaggacggacttatcggtacaccaataggcggcgcaggctttatgatctgccgcggtcacgagacatggcatcccgatccggaattctactacaagtacggcggcggtcctatgttcgatatgggaccttactacatcacggctctcatcaaccttctcggcaatgtcagcgacgtatccgctatgacaaagaagagctttgagaagagacttatcacaagccagccgcacaacggtgagataatcgacgtcgatgttaatacatacatcgccggcacaatgcgctttgaatcaggagctatcggcacactctttactacatttgacgtatactatcccgaacaggcaagagttgaagtatacggctcagagggaacactgtacgtacctgacccgaacggattcggcggtcctatcagactgttcagaccgggcgagggaatgcgtgaaatgcctctcgaattcgacaactacgccgaaaacagccgcgctctcggacttgccgacatggcgaaggcactccagacaggacgtaagttcagatgcaactgcggacagacataccatgttcttgagataatggaaggcttcacaaagagcggtgacgaaagacgcgaagtcaagatagagtcccgttttgaaaagtccaccatcatgagaaacgacctcgaatgcggagttctcgaagactgaattaatacagccaaataaaatgcgcaccttcaaagtcaaacgattttggaggtgcgttgttttgtttattcggctgtcggtgttttcagctcacgcatggttttgtttatcactcgaattttgggattgattttgagcagctcggcaagaaaatcttcgtcatacatacattttgccattacaagatgaggaaagcatttttgaaattcttcactatgaaagtatcttgatgtcatgtacttatttatttttcttacaacaataatcatgctcattctttctttagtatcttcgtcctgataatagatataaccacgcgctctcctgtaagctgatgcatcaatgatgaatatgccttgagccttggacatattgaccattaatgttatccaatagttttgaaaaaaaacaagcttacttttggttatgtacataccgctgtagtttgaatagcagaatgccagaagacatattcccattattatggcggttcctaaaatagctgattcacctaatattggggttccgttaatataacatagtggtaaaacaacaaacggagtagccgcacaaagccataatgtaattgctctatgagagcttggtattaaaaaacaaaacaaagtaccgttcttttttctgaccattttgggcgttttttcaaagccaacgctatcctcttttgctctcattgtcaacccccgatagaatattcagtcactcacagccacttgtcaagctccgtctctacctcgggaatcttcttcaccttaggcgagcggatgatgttctcgcgcattatcaccatgtcaaggtttcgcagtgcctgtagattttcgagcggattttctctcgtgacgaccatctccgccttcttgcctttctcgattgagccggtttcatcgccaactccggctaaagtcgcgttcagtagcgtcgcggaatacagcgcaaattttttgcttacgccgcagtatttgacaaaatagcacagctcgcgccacatatcgtactgggtgacgtacgggcaggcggtatccgttccgagtccgacgggaatgccgttttcaagacaagccttcgcgatggagataatgccgtcgaacactatcttgccgttttcctgctgttcgtatgtcgcgtgggagatgcttcggtcaaacagcgcgaacgggagggcaggggagagtgttgaaacctggaacgcattccgctctttgaagagatttatgatgtcgtcagtcggttttgcgccgtgctcgatggagtccactccgttttcgagagcaacccttacgccttcgggactttccacatgtgccgcgaccttgaatccaagctcatgcgcacggtcacaggcggctttcacaagctccggaggcattctgagcactcccggttcgccgactttctccgcgtcaagcacacctccggttatcatcagcttgattatgtccggcttttcccgagcgattttgtcaacaaatgcggctgcctcttcgggtgttgcggcttatgtcctccgtgaacggaaaccgccatgttggaagctaagattcgaggacctgtcagtctgccggagtttatctcatcgcgcacgaacgtgtcaaaatccgcaattccgccgacagtacgaatggttgttacgccgctcatgagctgagtttttgcatatcccgcgaccatcttcttgccgagagtgcgcatgagagcgtttgacgtgatgagcttcacgagtttgacggggtcggactgcttttgcttcggctttcccgagcctgcgagatgtacgtggaggttgataagtccggggaggatgtacctgccgccgaggtcgacttgcgtaaatcccgccggaatcgcactgtccgggacaatgtccgtgataacgccgccctccgtgaggatagccttgccgcgctgtggagtcatgtgctccgttccgtcaagtatgatgcagtttgtgtatgctgtgttcatttgtggtgttttccttttgtgttgaataaatctgttttatgacattttaaaatcaggttaagcttttcgcgaagagaatgctacagcgccatttttcatcgcagacaatcataccctgtatttcgcgtaaatcctcttgtatacataagcaatcaccggaagtccgacgacacagcctgcggcaatcagaataagtgaaaccgtactgctccaaattcccgcaaaaacagccgcccagaatataagggaatacacaccccacattatgccgttttcgtggttgtaggcggaaatatccgaaatttcgtcttcttttatcggactgccgatccagaaccacatgggtttcttcctgttccacgcgtaaattcccatgccggagagaatcgcacagcacgggatcatgattgcaagccagattatatctttcatcttatatacctccgcatttattctgcatcaattatatcacgtgacgtcggatttttcaagtctgccttatgcaagagaaaagcacctgccttagtagtacagatgctttttgttattgcgttgtgagatgaccgagctttacttaacttcccattttcctgcgtgttccgagagccgagccttgattttgccgaatgctcttgtctcgcgcacgaagtcgaaatcactgctctccatgagatttagcacctttgccgcgtcgttatcggtttcatccgcagaccaaatgcatggcaacatgccgcggaatacgagtgaagtactttcttctcctttttcactgtatattataaactttatcgcgtgttctgccgctttttccagatgagagagtgtctgctccgagttgccgatacgtgcgtaatatgccgcctgctccctgtgagcctcacaaagatgggtgtggtaaaaactgaaatctccgttttcatagaacaggttcagcagtgctatctgcttatcacgcaatgccgcgcactcttcctccgtatatgctttctcaccggagtcaagcgtcgtttgtatgttggctaattcattcgataaaatttgcagaagagtgtacatttcacactgttttgctcgatatccgtcgtctcctttttgaatggcggcgagcagtgattcctgcgatatagacatgagcggcatagtgtatgcgagtcttatcgccttgtttgtctcccctgcgtcgctgtagctagaacacaaaacttttatcgcactatgccgtgtgtagttgttggtgcttttttcgagtatcttttctcccagcctgattgcctcgtcaagatacgactgttccgttggtgaagcgcggtgctgccaatatgagacgaacatcaaggattccgcaagatcaagactgtcgggatagcggtgcataccttcctctaaaatctgccgcgattcactgtaatatcctctagagtcgtatttcgaagcttcagagcatatttcccatatttcttcctgctgacggcttatgtcaatttccaaaagagaatccgcggtcacgtgaaacaggttgcaaagcggcgctatcagggagatgtcaggcattgccgcgtccgtttcccatctgctgactgcctgcggcgatattgataaaatttccgcgagctcatcctgcgtcatgtcacgttcgcgtctcagtcgtcttatcgtctttccaaagctcatgttttcttcctcctgaattcataaagtcaaccctgccggatcgtgtctttattataccatgtcgagattctcctgtccatgtctcgctatttgagaaaaaaacaattttaagttgagctttcgggaaaacaaaaatacggcttaacttccgagaaaacggagagcaaagccgtattgtttggatatagtttaagtctcgctgtattcgctttcgcgcggtttgaacaggagcgagatgcaccatattcccgcgagtgcgacaagtgtgtagataatacgcgcgatgaccgaactctgacctccgcatatccacgatacaatatcaaatttaaaaagccctatcgagccccagttcaaagcgccgattataacgagtatgagcgatattctgtcaagcatagtgtttatcctcctttcacgctgttgtattactattatctcccgatttaaaataaataagcatggcacatcaagcatattccggcataaattggattttgttcaagtaatatttaaagagaaaaacgcatatcggaggtagaatatgcttgaacttttgctgtcgcttatcggaggaatatcagctgtcatgctgtcgtccgcagggaataactttccgccgccgctcgacaaaaacgaggaatatgagctttttctgaaaatgagcgagaacggagacgaaaaagcgcgagaaaagctgatagagcataatctaaggctcgtcgcgcatatcgtgagaaaatactatgcttcaagccagtgcgaggacgacctcatttccgtcggaacgataggactgataaaatccgtcgattcgtataacgtgaaaaacggtacaagattcgcaacctacgcggcaaaatgcatccaaaacgagattctgatgtttttccgtgcgcagaagaaaacccagcaggaggtgtcgataaacgagacgattgacacggacagggacggcaatccgctcacatacatcgacataataaaatgcgacgacactattgccgacgaccttgacacgaaaattaagctgacaaaagccgcggaatacataatgaacgggcttggcgagagggagaggaagataatgataatgcgctacggacttgacggaggaaaagcgtggactcagcgcgaggtggcggataaactcgggatatcgcgctcgtatgtcagccggatagagaagttcgccctcgaaaagctccgctcaaagctgtgattcgggaaaaattaattgaaaaacgcacaaaaaattttctatagctattgacaaaaaaactcggatggtgtataataactctcgtaacaatgaagcagaacagtctccgttctcaccttactgctatgggcacgataaggtcaatagatttcatgtaagggtaattttgtcgtgcggagaaggttctttgtgcgattttttgtttattatggaggtgcttaactattagcgcgaaagaacttataatcaatgatgatatcagagcgaaagaagtacgtatgcttgacgagaacaacggtcagctcggtataatgagcctgaacgacgccaaaacatacgcatacgaccgcggttacgaccttgtaatgatcgctccgtccgctactccccccgtctgccgtgctatggactacggtaagtaccgttacgaagccgacaaaaaggagaaggaaacaagaaagaaacagcaggtcatcgaagtcaaggaagttcagctttcttataagatagaacagcacgactttgagactaaggtgaaccgcgcaattaaattccttcaggacggaaacaaagttagggtcagcctcaaattcagaggtagagagatcgcgcatcaggagctcggaagagagaagctggacaactttgaagctgcggtttcggagtacggcactgttgaaaaaagacctgttctcgacggtaagcagctgtttatgtttatcgttcccgtaaagaacacggctaagtaataagcgctattagtgcggctcacgaaattgctgaaaccgcagaacatcgacctcggcagagaaatacgacaaataaggaaaactctgatttaaggttattttacgataaaagccccaatattttagccttttatcacaaaaaatccgatttattcagagtatcctaagaaatcaaccaaccgaaaggatagcaaaaatgggaaagatcaagacacataaggcgtcagccaagagatttgcagttaccggcacaggtaaggttaaggtgttccattccgatcaccgtcataacctcggtcagaagactcagaagagaaagagacacctcagaagcagccagatcctcagccccgctatgacagctaatgtcaagagactgataaacaaggattaagacttaaaaacgaccgaatacaaagcagtaaagaaaggatttagataaaatggcaagagttaagggcgcaatgatgacgcgcaagagaagaaataaggtcttaaaggctgcaaagggttactggggttccaagagtaagcacttcaagatggctaaacaggccgtaatgaagagcggtaactatgcatacatcggacgtaagcagaagaagagagatttccgtgctctttggatcacaagaatctctgctcaggctaaggtaaacggcatgaactattctacactcatgcacggtctcaaggttgccggcattgatctcaaccgtaagatgctctccgaaatcgcggtttccgacaaggaagctttcgccgcactttgcgaaacagctaaggctgctctttaatcagttgaacataaaaggggtgctcacgtcctgtggacaccctttattcatatataaatgaaaacagatgaatttattttagcatacggagccgactatatacgctcgcgctccaatccgaaatgcgtcgctctctccaagctgacggataaaaaataccgtgatgagagtgagatgtacctcgccgaaggagtaaagctgacaaccgaagccatccgatatgccgaatgcgactgcgttgtcgtttcctctacggctgccgagaaaaacgagagagccgcagaatgtgcaaaagccgcgcgggagaaaaacattcgcctgattgtctgcgacgacgcggtgtttgagaaaatttcaaccgaaaaagctccccaaggcgttatctgcgcggtgaagtatcagaaaaaactgcatacctccgaaaactttgccgagtggcagaaaaacaagcgcattgttatgctgtcggaggtgcgcgaccccggaaacctcggaacgataatgcgcacggctgaagctctcggaaacgacggtgttgttcttgcgggatgcgcggatatctataactccaaaaccgttcgcgccgctatgggaactttgttcaggcttcccgtatttatcgcaaaggatgctgtagaatgtgctggcgaaatgcgttcactcggcagaagagtgatagcggcggcactggacgaaaacagtctcaagctcggtaaatacgacgtccgtgagagtgactgcgtgataatcggaaacgaaggacacgggcttgacaagacgataatcgacgcggcgggatgtacggttatgatacctatggctggcatgacggaaagtctgaatgcgtcctccgcggcaagctgcatcatgtgggaatactaccgcgcgtttaactaaatttaaaaaagaacggagtgaagcggaaaaatgaatgacgacagaagaatatattggatatggcttgcagagcttttcggcgcgggcagcattaccgcttcaaggcttatacagaaatacgccgatccgaagctgatatacgagcgtaaagcggacgacatcgagtgcgacgaattcttcacggacaagcgcatcgagaacatcaagatgaagctgatgaacaattctctcgagcacgccgcggaaattgccgaaaaatgcgacaagctcggaatatcggtcataactcccgactgcttcgactatcccgataagctgaaaaccatacgcgattttcctcttgtgctgtactgccgcggaagaatccccgaaaacgccgagcatttcctatgtgcagtcgtcggaacacgaagcatgaccgactacggcagaagaatcgcgtatactctcggtgcgggtattgtgctcggcggcggagttatcgtcagcggaatggcactcggagcggacagcatggctcttatcggcgcgcttgaagcgggaggcagtgttgttgcggtcctcggctcgggcgttgacgtgatatatccgcgtgagcataaggagctttactcgagaataataaaggacggcgcggtcatatcggaatatcctccgggttctccgccgtccgggaaaaatttcccgtcagaaaccgtatcatgagcggactttccgacgccaccgtagtggttgaagccgacatgaaaagcggtgccctcattacggcgcgtctttgccttgagcagggaagacgtcttttcgcagttcccggaaaggtgggagacagcggcgcggaaggtccgaacagtcttatcagagaaggcgcgcttcccgtcatgactcccgaggatgttatcgcggaattcgcccacgactacagaaaaacactcagtgtagaccgtgcgcacacccttctacgcggagtggactatgacatacgttcaaaggacgcaatgtcgcgtgcgagaatcggaaccggcgtcggaaaccgaaactactatggggtaggaagctacggcggcaggctcagcgaatacgaaaaagaaaaacagcgcgagtcacatccgattaagtccgagagctctaaagcagaagaaaaatcgcccgagaagaaaaccgcaaagccgaaggagcacacggcgaacagcatagcttcgtttttcggcaggaaaaaaggcgata

SEQ ID NO: 787 - DNA, 25410 bp, Unknown
  16S sequences of unknown bacteria
caaaataaagctgccgcaggcccagaatcgccaaaatgttggaagtatatacaatcagcggatgggttgagatcgaaaaggctgccggtacggaatcaatggcaaaaataatatctgaacactcgatcagcagcagcacaccgaaaagaggcgttgcccgcagcaccgtgtgccggcctttttgcaggcgctcccgcacaaagaacttttctccccggaacgaatctgtcatcggaagcacgtgccgaatcactgtcatcactgggctgcgcttcacatctttttccgcttcttctcccataagcattttcgctccgttaactaccagcagtgctccaaacagatacagcacccacgcaaaccggccgatgatcgccgaacccagaagaataaacagcagccgcagcaccactgcgccgagaatgccccaatgcagcaccctgtgccgggcatgctctgcaattccaaacgccgtaaagatggacataaacacaaacaaattgtccatgctcaggctcagttcgatcagatatccgcccaaaaactgcagtgccagttcctgtcccaaagcgctccaaatcattgcagcagcagccagtgccactgtgatccacaaaagaacccattttacggcatccaacagcgggcgcagctgttttccccgtgttctgacctgtttcaaatcaatccctcctgtcccagcctgcccggcgattctatgtgccatttccgccaactatgtaacaaaaaaatgcggagcagcacagcgctgctccgcattggaatcgcttcagggagttattcttcgatattcttcagatccggggagatgatcagcgtggcctccgtagcggcctgtacttcttccacagtgaactcaggattgatctccaccagctccaggcccttatccgtcacattgattacacccatttcggtgatgatcttcgtcacgcaggtcttggtggtcagaggcagggtgcactccttcaaaatcttgggggttcccttctgggtgtgctccatggcaacgatcacattctttgcgccggcacacagatccatggcgccgcccatgccgggcaccatcttgccagggatgatccagttagccaggttgcccttctcgtccacctgcagggcgcccagaaccgttgcgttcacatggccgccgcggatcagaccaaaggaggtggcagaatcgatgaacgcgccgccgggagcaatagaagaaggctgaccgcctgcatcgaccacgttgggatcggcaacttcgggcttaccaccctgaccggccataccaacctcagcctgcagaatcacatgtacatcttccggcagataagcgggaaccatggtaggcaaaccaatgcccaagttcacaaaatcgccgtctttgaattcctttgcaacacgctttgcaatatagcctttgatgagagccttttccattacttgttacctccatccacaatgtaatcgaccaggacattctggatcagaacttcgtccgggtccatcatgtcgatgacttcatctgcctggcaaatgaccgtatcggcagcagcagccatgacgatattgaagttccgggcatcgccgtggatcttcacattaccgtacttatccgccacagaaccgtagatcagagcgacatccgcacgcagaggacgctccagcaggaattccttgccgtcaattgtaataacttccttcttagtgccgccaacgtcttcagcgccctcgcctacgggagtagccagaccagtgggggtcaaaacgccgcccaggccgtatccacctgcacgaatcttctctgccatggagccctggggaaccaacgtaactttcatggaaccgtcgttcatcttctgaccaacctcaggattcaggccaatgtgcgtagcccacagatgcgccacctgaccattgtggatcagctccgccaggctgtgatcgcgcttgggatcgccgccgtcgttgcagatcaccgttaaatccttgacgcctgcctccgcaatcgcgtgcagaacctcgttcggtccgccagcgctcagaaaaccgctgaccataatggtcatgccgtctttgatctgagcaaccgcctcgtccatagaaacaattttagccatgaatgcaatacctcccattttttattcacatggaagcgtccccccaaaggctcggtttccatgtaatctatttgtattatagcacctttcaggtaattatcaactataatctccctgttttttcaccgttttttgccctctcgcacataccgggacagggcgtttgccctgtcccggtatagatacgatgcagttactgtactgcgccgtcaaagagtgttggcgttcagcacttctccacgacaacggcagtacccatgccgccgccgatgcacagagtagccaaacccttcttggcgtcgtctctcttctgcatctcatgcagcagagtgacaatgatacgggcaccggatgcgccgacgggatgtcccaaggaaatggcaccaccgttgacattgaccttggccatgtcaaagcccagctcacggcccacagcgatggactgtgcagcaaaagcctcgttggcttccaccagatcaatgtcctcgatgctcacgccggcagctgccatggcattgcgggaagcaggaacgggaccgacgcccatgatcttgggatcaacgccgccctggccgtaaccgatcaacttagccatgggcttgaggccgtacttctccaccgcctcagcagaggccagaaccagcgccgcagcgccgtcgttgatgccggaagcattggccgcagtaacgcgctggacatgcttcttggtatctgcctcatgaactccggtcagctcaaacgtatggatcacttcatcctcgacgccctcagggccgacagggaatgcgccgcgcagcttggagatgctctccgccgtcacgccggccttgggatactcgtccactttgaactcgacaatttccttcttcttcttgaccggcactgcaacgatctcgtccacaaatttgccggcagcctgggcagcctcagtcttctgctgggaagcagcagcgaaagcgtcctgctcttcgcgggtgatgccccagatatcattgatattttcagcagtggtgcccatgtggtagttgttgtaagcttcccacaggccgtccttgatcatggtatccaccatctgggtgttgcccatgcgggcaccgtagcggccggaaggaatggcgtagggcgctgcggacatgttctcggtaccgccgcagacaacgatattggcatcgccggccttgatggcgcgggcaccttcaatgacggacttcatgccggagccgcacaccatgccgaccgtgtaggcgggaacggagaaaggcaggccggctttgacgcccacctggcgggcaacgttctgcccctgagcagccgtcaggatgcagccgaacatcagttcgtccacctgctcgggcttgacgccggcgcggttcatagcttccttgaccacgatggcacccagatcggcagcgggaacatccttcagggagccaccaaaggaaccgattgcagttctgcagcaattgacaatataaacttcagacacgtgagatacctcctaaaagatttggtaattttagtttactcgcaatttatctaaatgtcaacagacaacacttccgagatatggggatttcgcacatattgttaaaaaaatcacaatatttacatttaatagcgtccataaaatctcttttttcctatcttctttttcctattttatcatttttatacaaaaacacccggaacggatcctctccgctccgggtgttaaccgcaaactcagccctccgctgtggaaccttctgcagaagatgcgtccgtttccggcacgtccaatgcgctgcgcagttccaacagagccgggtagaacgaggccacatcaatcgcctcataactctccgtctttgtaatttccagaccgctgatgtagtcgttcacataatcatagaccgcaccgtagctggtatcctcataatacgacagcagttcttcttctcccaaatctgtatagctgttgcgctcggcaaaagcagccaggttttcttcggtgggttccagctcgcccccctccgccagcagtttctggcacaaatttgcatagaggtatggaacggtgctgtcctttttcagcagttcctcattcagcccggcatacgcaagcatgtagcgatacacttcctcgctgccatagtattccacataatactcatgcatgctgtccatgactgctgcctgctcttccgacagtgtaatgccctgctcctttgccagcaattccaccgccgcatactgcgtagcataatcgtcggcctgggccatggcataatcgcccaccgtcaaatccgccgtcatggccatactccagtcgctgatgccataatactgataaaacccatcacacaaggaagccagccaatacaggtattcccccgccgtcacatccgcgtcacccacctgcattaccacggtgtccgctttcagcccactggccttggccgtgatcagcgcgccgccattcatcgcctgaatggcgctgccgccgaaccatcccaccaaaatcagcacaagacacacgatcagagcgaccgctctgcttttcaacccttccataaatcaaaacatcctttcccgctgtttgccacgcacaggagcgcacacataaatctttggttattttatcatctttccggctctgccacaagtcctttttgcagcgcacacccttttctcaggatgcgccagccaacacatccaccagagcggcgcattcttccagcacatctgccttcggcggcaacaccagtgtcagcgccggtgccgcaccggcgtccagacgcagccgggaatggtattttttcataccgcacacggccgaaagctgcttgagatccacctcgcccagcgcaaagcgcacccgggcttctttctgtgtgatctccgtaatccccaccttggccgccgccgcgcgcagcagcgccacgtccagcagcgccagcacacttttcggcgcgtcgccgtacctgtccagcaattcatccatcaaatcgtcggcatcttcgcggctgcgaatggccgcgatgcggcggtaaagatccatacgctgctctgctgaggccacgtaacgctccgggatgttggcagatacgttgagatccgccgtgcattcccgttccttccgcttttcctgcccctgctcctccagcacggcatcttccagtaatttgagatacatgtcgtagcccacactcatcaaaaaaccggactgctccgggccgaggatattgcctgcccctcggatctccagatcgcgcatggcaattttgaaaccggagccaaactccacatattcccgaatcgccgacaggcgcttatccgccgtttccgacaaaacctttcccctgcggtaagtaagataggcaaaagccctgcgggcgccgcggccgatacgcccgcgaatctggtgcagctgcgccagacccagatggtcagcgtcttcaataatcagtgtattgacattgggaatgtcaataccagtttcaataatggtcgtacataccagcacctgggtctgtccatcactgaccccctgcatcaccgccgagagctgttgctcgctgagttttccgtgcgcagtcgccacctgcacttcttcccccagcatctcccggatccgcgccgcggtgcggtcaatggtgtccacccggttgtgcagataataaacctggccgccgcgctgcacttcccggcggattgcatcagccaggatgctccaatcgtgttcaagcacataagtctgcaccggcaggcggtttttgggcggcgtttcaatcacgctcatatcccgcacaccagaaagcgccatgttcagcgtccgcgggatgggtgtggccgagagcgtcagcacatccacctgtcgggccatctccttgagtttctccttatgcgtcaccccgaaacgctgctcctcatcaattaccaaaagcccaagatccttaaactgcacgcttttctgcagcagccggtgagtgccgatcaaaagatcgatactgccggccttgagggactgcaggatctttttgctctgcgcagcggtctgaaagcggctgagtactgcgatgttcacaggaaacgcgcggaaacggttcatcgccgtggcgtagtgctgctgagccagtaccgtggtgggtaccagaatagcagcctgttttccatccaggatacatttcatcaccgcccgcagggccacttccgtcttaccgtagcccacatcaccgcacagcagacggtccatgggcacgcttcgttccatgtcccccttgatctcgcggatacagcgcagctgatcttctgtctcagcataagggaatgcctcctcaaattccgcctgccacggagaatccggcgaaaaagcgaacccctgctttttctgccgctcagcatacagccggatcagccccttggccagatctttggccgctgccttggctttgcttttgctgcgtgcccagtccgtaccgccgagcttattcagccgggtcttttcgtggtcctctccgccgccgatgtacttgctcaccaggtcgagctgcgtagcggggacatacaggcagtcgctgccggcataggcaatcttgatgtaatcccgatccgcgccgtccacagtcatctttgaaatgcccacaaagcgtcccactccatgatgcgcatgtaccactaggtcgccgggggaaagatctgtataggactgcagcttctgccgattcgatttggccttttgggccggcggcttcctcccgctctgggccagaagctgcccctccgtcagcactgccagggacaactgcggatactcgatacccgccgacagagcgcccaggctgatctgggcctgccttgccccgggcaggctgctgcattgaaaatccagtgcagcgggcacttttttctcttccagcagccgcttgagattttttgcccgcgcttcgctgccgcacaggaccagcacacggtacccggcctccagatactgctccatatcggaaaccgccgtttcaaggctgccgccgtaggatgaaagctgtttggcattcagctgcagcagcgtacggggcgaaaacggatagcgggacgtgggcagggacgcaagcatataaaccggcctgtccgccagcgtgctccaaagttcttccgccgtcgccgccagcccagcccactcgccgcagagcacaccggctttcagcagggcttccacatcttccttcacttgccagagaacatttttcagatgctccatcacccttgcgctgtcacagatacacaccatggcatccgaagcaagatactccaagggtatggctctttcttcgtaaatggccgccatatagcggtccagaccgccacgcagcgcgttctgccgcaaaagctccgcgtcggccttcagccggccgatcagctcgtcgctgccggagcgctttttattggacacctttcctgccatagcctccagtttttccgccaacgccgtgctcccgccgggtgtcatggccggcagcacttctccagccggcagcaagcagatttgctccatattgtgcacgcgccgctggctcgccaaatcaaaggctcccatggcatccacttcatcaccgaaaaattccacgcgcaccggcgcttccatgcctgggccaaacacatccaaaatgccgccgcgcagcgcaaactgccccataccctccacttgctggcagcgggtatagcccagatggaccagccgctcgcccaacgcattcaaatccaccgtgtcggacagatgcagcctcagcacatggttcatcagcacctctttgggcagcgtacgctgcaccagcgcttccggcgcagcaaccacaatgcggggctgctcctgtgccatgcagtaaagcgcctccactcgccgctgttcccattcgcgggaagctgtcgctgccgcgtggaactggaactcccgactcggcagcagcaacggtacaatgccggtgaaattctgcagatccgccgccatgcggcgcgcctctccctcatcactgcacaccaccagaagaggccgcttttcctgcgccagcaatgccgcgcagacatgggcacggtgcaccggtcccaggcccgtcatggccgccggacaacctccattttccgcgcagtgcagcagctctgctgcctccggaatctcctgcaacgcttcgatcagcttctccatgaattcctcctccccctgcacaacaggcagcggcagtccgcgctgcccggtagggaagcgcgcactgctcatatggtttctctttctttattcgatagcgtgctgcttcagttgaagcggctcatagcagcggcgcagccttcagaaatcacgcattcggcagcatccaagccgcgccggctcgtttcttccagcgttttccattccgccgccgtaggacggcccagcacccaggccgccagatcatagtccggattcggcttttcccccacaccgattttgacccggggaaagccgtcgctgcccaagcaggcaatgatattcttgaccccgttgtggccgccggcgctgccgcctggccgcacccgcagtttcccaacaggcagggaaatatcatcaaaaattaccagtacccgctccggcgggattttataaaacgccgccgcctgctgcaccgcctggccgcttcggttcatcatggtttgcggcttgagcaccagcacccggctgccgcccaggcgcacctcacccgtcagggcttggaacttgagccggttcaaacggacaccgcagcgctcttccagcgcatctgcagcatgaaaccccacattgtggcgtgtgctgctgtattgtatgccaggattgcccaagcataccaccagccactccaccgcgccgccttttttcttcaggaacatcggatccctcctcaaaatgcttgaacatgaaaaagcgccccacaagcgcacacctgcatagcacacggcccatgacgcttttgccgtcctcaaacggaacggaaaggaaaggaggggcaaagcccctcctttcctcagcaattgctcagctaaaaagtttggacaccgacaggtcgctgtaaatacgctcgatcgcctcggcaaacatgtgcgccacagagaggtacttgatcttggggcactggttggccggcactgcgggaatcgtattgaggaaagccatctcattgatcgggctttcgttcaaccgctccaacgccgggccggaaagcacggcatgcgatgcacaggcatggacagagttggcgccgcccacatcaataatggccttggccgcattgcagatgctgccggccgtgtccaccatatcgtcgaaaaggatgcagtcgcggcccttcacatcgccgatgatgttcataacctcgcaggaattggccttgggacggcgcttgtctacaatggccagactcatgcccagtttctgggcaaaagcgcgggcgcgggacacggaaccgacgtccggagaaacgaccaccatctcctcggcctgcgcgccgaacagctcgccgtaataatccacgaaaataggattgcccagcaggttgtccacaggaatatcgaaaaagccctgaatctgcgcagcatgcagatccatagtcaacacgcgatctgcgccggccgccacgatcatattggccaccagctttgccgaaatcgggtctctcgccttggccttccggtcctggcgggcatagccgaaatagggaatcacggcggtgatccggccggccgaggcgcgcttgagcgcgtcgatcatcaccagcatttccatcaggttgtcatttacggggttgcaggtggattgaatgacgaacacgtcgcttccgcggacactctcatacagagaagcatagcactcaccatcggcaaatttgccgacctccgagtcgcccagtttcgtgttcagatgctggcagatctcctgcgccagcacgcgattggagttaccagcaaagatcttgatgtccttaccatgtgcaatcattccaaagtacctctctttttcatttttgggattctcattggttggttctggtaatcagatccgtatgtatcttatcaccggcctgggagccgacggtaaaacctgttatttcagccgcgctgctcacttcaggcggccggcctttcggcgcttgtcggcccagccggccaggttgttctgcctagtccgcgctacgcccaaatctccggcaggcacatcccgggtgatggtggatccagccgcagtgtatgcgccgtcgcccacactcacaggggccaccagattggtgttgcagcccacaaagacatggtttccgatggtggtgcggtgtttctctctgccatcgtaattgcaggtgaccgtgccgcagccgaaattacagccttcccctacatcagcgtcgcctacataagtaagatgagccattttggtttcccggcccaaacagcagtttttcaactggacaaaggcaccgatcttgctctgcgcacccacggtgcagtggggacgcaggtgggcataagggccgatctcacagcccgtttccacaacactctcctcacactgcgaggcattgatccgcacgccgtcacccaccgtacagtccgtgagcatactgttcgggccgatctgacagtctgttccaatcacagtcccgccccgcaggatcgtgccgggcagcagcatcgtacccgcgcccacgcgaacacgcggatccacataagtattgttgggatccatgacgcagacgccgccggcaagcagttcccgcaggatctgcgcccgggccaggaactgcatgctgttgagtcccttaaacgtggtaatggacgtaaagcccggcacgctccgggcgccctccacctcttctgcaccagtttccaggctgtgcgccaatacgctgccggaaactctgtacacttcgttctgtccggcgctgtccaccggcacggcagcgccaggcaccaccagagtttcctcttcgccctccaaaaaagccagcagatcggcgcggttgtcggataccgtcacctgttctgccgaagaaaagcacgccaaagcctcttcctgatacgatgccgggcagcacacaaaaaagcgctccacaccctgttcgcgcagcgcagtgctcagccaagtgagcaccgggcaaaacaggacgttctgcagcatcaacggttttcggatcaattctccctctgcgtcatccacaaataaaacagcgcgcttcgtttccatcattgccgttcctctccaagggccgcaggacaccgcagctgcgccgcttcatcccatttcccctcattttgaaaatacagtttcattatagcaaacccctttcaaaaaatccacgattttatatgtttttttcaggtttctttcttttctccattctgctgcgcattttcctggggttttccagcaaaaagcacaatggttttccaaatctgcggcgccgctccttcgcctgaagacgaggccttccggacgcgccggttgtttgtcataaatgcaatgctcttgtcgttttatctggaaatgcacggatatttatatgaattctaacgatttttccgtcttttgcgcaaaaaaagagcaaataagtgttgaaatcatacttgctttgcattacaataaggacgctgagcgcacaaggaaatgttttttcccagcagcaaatacaaacagaaatttatactataataaataaggaaacgcacatgatcaatcttgtactggtggagccggaaatcccggccaacaccgggaatatctcccgcacctgcgccgtcaccggctgtgccctgcatctgatccgtccgctggggttcgatatctccgacagatccctcaagcgggccgggttggactattgggacaaactgaatctgacggtgtacgacaatctggacgatttcttttcccgccacccgaatccagacctgtggctggcttcatccaaaggggcccggccttattacgaggccgctttccgcgacggctgttttctttttttcggcaaggaaaccaaaggactcgacgaagcctttctgtccgcgcatgctgagcgctgcctgcgcctgcctatgctccccggcgcccgctgtctgaacctttccaacgccgccgccattttcgcctatgaagccctgcggcaaacgggatttcccggttttcaaactacgggggccatggcccccgccccctgacgcttcatcctatcgcgtcctgagcaaattctctgcaacagaccctctcgtttgagggaacactattgtaataataggaggacattgctatgaactacaacaagaaaactgtaagcgacatcgacgttgccggcaaaaaggtcctgctgcgctgcgatttcaacgtgccccaagacaaggaaaccggtgcaatcacagacgataagcgcatccgcgccgctttgcccactatccggtatctgctcgaacacaatgccgctgtcatcgcctgttcccacctgggtaagcccaagggcgaatggaaggaaaagctgaccctcgccccggtcgctgaacgtttgagcgcactcctggagcgtgaagtaattttcgccaaagacatcatcggcccagatgcccagtccaaagctgcggcgctgcagccgggtcagattatgctgctggaaaacctgcgctttgacatcggcgaggaaaagaactcccctgaatttgccaaggccctggccgatctggccgaagtgtacgtgtccgacgcattcggcaccgtacaccgcgcccatgcttccactgccggtgtggcggcatatctgcccgccgtttccggaatgctgatccagaaagagctggaaatcatgggcggcgcgctggaacatcccaagcaccccttcgtggcagtgctcggcggcgccaaggtgtccgataagatcaacgtgatcaacaacctgctggaaaaggccgacaccatcatcattggcggcggtatggcctacacgttcatcaaagcccagggcggcagcatcggcacctcgctgctcgaagccgacaaggtggaatatgcccgggaaatgctctccaaagccgctgcacgcggcgtccagctcctgttgcccaccgacaccatcgctgccaaagaattttccagagatgcagagccggtgtgcgtttccacaatggccatccctgacgacatgatgggcatggacatcggccctgacacgcaaaaggcctttgccgaagccgtacagggcgccggaaccatcgtctggaacgggccgatgggcgtatttgagtttcccgctttcgccgaaggtaccaaagccatggcccgtgcgctggccgagtccggcgcaatcaccatcatcggcggcggcgacagtgccgcggctgtagagcagctgggctttgccgacaagattacccacatttccaccggcggcggcgcttccctggagttcctcgaaggcaaagaactgcccggcgtagcctgcctgatggataaataaagccattccgggcaactgggtactgaaccaacatctgctttccccgcaaagagtccattggctctgcgcggggtacataccataaaaactgcgcgcactttcccgcagcgtactgcgggaaaacagcgtaaaattgcaagcatcatgagcaaggagataaaagaacatgaaccgcagataccgaaaaacaatcatagccggaaactggaaaatgaacaaaaccgcttccgagaccaaacaatttgccgatgaattgaaaaccatcctgccccgcgccaaatggtgcgatgtgttggtttgcgttccctctgtcaacattcccgccgcgctgcgcgcattcaaagatatgcgcgtaacggtaggcgccgagaatgtattttatgaaaaaaacggcgcatataccggtgaagtctctgccgacatgctcaaggacctgggcgtgaagtacgtcatcatcggccacagcgaacgccgccagtatttcggcgagaccgacatcaccgtaaataaaaaggtgcacgccgctctggaggccggccttcatcccatcgtctgcgtcggtgagagcctggaacagcgcgagctgggcgtgaccatggatctgatttccctgcaggtcaaatccgctctggctggcgtcagtgccgaaaaactgcgcaaatgcgtcatcgcttatgagcctgtgtgggccatcggcaccggacgcactgccacccccgagcaggccggcgaggtatgcacgttcatccgtgccaccatccgccatatgtacggcgcccgcatcgcccgttccatcactatccagtacggcggctccatgaatccaggcaacgctgcggagcttctggcgcagccggatatcgacggcggtctcatcggtggcgcagccctgaagcccgatcagttcgtcgccatcatcaacgccgcaaatcaggaataatgctatggttgggagtctctgctcccgggagatacgaattgatatgaaaaccccgacaactcttattattatggacggcttcggcctgaacgacaagacggaaggcaatgcagtcaaggcagcaaaaactccagttctcgataggctgctttctgaaaacgcccatactgccctgtccgcctccggttcagacgtggggctgcccgaaggtcaaatgggcaacagcgaggtgggccacaccaacatcggcagcggccgcgtggtatttcaggatctgccccgcatcagcaaagccatcgaagacggcgatttttttgaaaacaaagcttacaacgccgccatggacgcctgcctggaacagggcactgcgctgcacctgctgggactgctcagcgacggcggcgtccattcccatatcacacacctgttcgccctgctggagctggcaaagcgcaaaggccttaccaaagtttatgtacatgcatttctcgacgggcgcgacgtgccccccgcctccggcaaagcgtatgtgcagcagctcgccgaccggtgcgccgcattgggcgtcggcaaaatcgccacggttcagggccggttttacgccatggaccgcgacaagcgctgggatcgtgtagaggcggcttatgacgccatggtgtacggtaccggtgccttctgcccagaccccgtaaaagcggtggccgattcctatgccgaaggcgtgacagacgaatttgtcgtgcctgtggtctgcgataaagacggcaccatatccgacaacgacagcgttattttctttaactaccgccctgaccgcgcccgtgagatcacccgcgctctggtggacagggattttgacggttttgtgcgccagtggttcccattgacctatgtctgcaccaccgaatacgacgcttccatgcccaatgttacggtggccttcccccatcagcctctgcgcaacggcctgggcgaatatctgagcaagctgggcctgacacagctgcgcattgcggaaacggaaaaatacgcccatgtgacattctttttcaacggcggcaccgaaacggtgttttccggcgaggaccgggtgctggtcccctcccccaaagtggcgacctacgatctgcagccggaaatgagcgctgcagaagtcaccgagcaggccaccgaacgcatccgcagcggtgaatatgatgtgatcatcctcaacttcgccaactgcgatatggtgggccacacaggcgtgttcagcgccgcagtcaaagccgtggaaacagtggatacctgcgtgggcgaagtcgtccgcgccacagcggaaatgggcggcatctccatgatcacagccgatcacggcaacgccgaaaaaatgctcgacgaaaatggccagccccatacagcccacaccaccaatctggtgcctttcatcgtggtgggcgccgccaccaagctgcgcagcggcggacggctggccgacattgcccccaccatgctggacctgatgggcttggaatgccctgccgaaatggacggaaaaacgctgattatttcctgagcaagccggttcttttcgcttttccctgctttttgaaatttcaaaggaggaatttgaataatgaaaaacaatcctgtgatccagaacattttgggccgtgaaatcctggactcccgcggcaatcccaccgtcgaggtggaagtcctgctcagcgacggcagctttggccgcgccgcggtgccttccggagcatccaccggaatctacgaagcctgcgaactgcgcgacggcgacaagggccgctatctgggcaaaggtgtgcttaaggcagtggaagcggttaacggcgagatcgcccagaatatctgcggcatggacgcttatgaccaggtaggcctggacaacaccatgattgcgctggacggtaccgccaacaagacccgtttcggcgccaatgccattctgggcgtgtctctggctgtagcccgcgctgccgccaactccctggatctgcccctgtaccgctacatcggcggcgtgaacggcaaaactctgcccgtgcccatgatgaacgtgctcaacggcggcgcacacgcctccaacaacgtggacatccaggaattcatgattatgcccgtgggcgcctcctctttccgcgaagccttacgcatgtgtgccgaggtcttccacacgctgaagaaagtggttccctccactggcgtgggcgacgaaggcggctacgcgcccaacctggcctccgacgaggatgcgctgaaagcgctggtcgaagccatcgaaaagagcggctacaagcccggcgaggactttatgatcgctatggacgccgctgtttccgagtggtataacaaagaaaaagaagtgtatgaactgcccaaggccggaaagaccatgacccgccaggaaatggtggacatgtgggtaaactttgccggaaagtacccgatcatctctctggaagacggcatgggcgaagaggactgggaaggctggaaaatgctgaccgacgcactgggcggcaaactgcagctggtgggcgacgatctgttcgtcactaataccgcccgcctgtccaccggtattgaaaaaggtgtggccaactccatcctgattaaagtcaatcagatcggcaccctgactgaaacgctggatgccatccagatggccaaccgcgccggctataccgccgtagtatcccaccgcagcggcgagacggaagacactaccatcgccgacctgagcgtggctttgaacgccggccagattaagaccggcgcccccagccgcaccgaccgcgtatgcaaatacaatcagttgctgcgcattgaagaggacttgggcgagagcgctcagtatccgggccgcaaggcatttttcaacctgaaataaactgtattccccatttcggccggagcacattttgtgccccggccgttttgcgttgtttcggattcttgttacaatggcagccgcatcggcagcaaaaacgaactgatcatgaaatacagcgctttcaacacttccggcaagcgggaaccggaacggacagagggcgatttgctcttgcttgccctggtcagcaacaccggcagcgtaagcgtccaaatccaatcgccggacggcgcatctgtgttcgacgccgaacgtctggccgagggccactatgaaatccaaatggaccgggacagaacatagttctgcatgcgaaccgggcgccgcaccaaagagagcatccatgtctaccggggacggcggaaccagaatgtgcaaaaaattgaaaaatttttcctgtgacggtataaaaggccttgtgcgtggcaatgatacacgcaaaggcctttctctttttcgaaaaaagaagcgccccaccggcatgccgccgccgcaagcgcggccgccgcacagcaaaacgtgcggtgcagcaggaggaagttttatgaaaacatctggaaagttaagcgaatttctgaacggagcaggattctacatagtcctgttcctggctgttgccatcattggagcatcgggctattttatttacaccaccctcttcggcgaccgtgaatcgctggacgcctcttcttccggcggcaatgcaatcgtgtcggagcagccggagcatcagacgccggatgtagagcttcacgaagacgtgacgctgcctcaaagcgaaccggaccgggaaacggtttccgtgtccagcacggttcccgtagaagccccaaccgacgaggccgcttcggtggatacgcgcattgtcgcccccctctccggcgacacacttacccctttcagcatggacgcgctgctctataacgcgaccatgaacgattggcggacccacaacggcgtggatatttccgcccaggaaggggatgcagtatccgccgctgcttccggcaaagtcctctctgtggtagaggactactggctgggcaccaccgtcactatttcctgcgccgacggctatgagctgacctatggcagcctgcagaccgtcgatgtctccgccggacagcaggtcaacgccggcgataccatcggctcagccggtatgaccgctctgctggaagaggcacttggtccccatttgcatttttccgtcgtcaaggacggcgtagccgtcgatcctgccgtttatctgaagcagggcacgtaagcaaagcttttttctttcctctctcatcccccatacaaacaggacggcgtctgcagcatatgctgcagacgccgtcctgtttgtatagcggtatgctcaccgttccatccagcacaccagctccttcgacaccgtcatgcccaaactgcgctgcagggccagggacgccgtgttatattctgcaatctgcccaaagggaatatgcccccgttccaacgcacgctgaatcgccacctgttccaaatacgtgccaagcccccggcggcggtatgcgggtaataccgtcagcagtccaatggagccttcttcatgggtgcctgcaaatccaaccagcgcatcgcccaaggaaacataaaataccgcaccgctccggatgcgatcatatagataatgctccaccgatgccacatccccagctgcaggtcccggcatatgataatacggcgccaaacgcggtgcgtcctccaactgcgccgtatgcacctgaattccgatctccggtacggtgatcgacgctttttcataccatgcattataataggtttcgatgcaggcaggttgaaaacgctgcgctatgggttcaatctgaatggtgtcctgcacctccagcatggttgcgtctgtcggcacctggccgaaaaactccagggcagtctgtgtatccgccgcggcgatctgccatatgcggccagccgtacacagaagacatccccgttccgtcgccgctttgacctcagcaagccctccctgcaacgctgaaagcagattgatattccgatttttctgctgccgcagataatccacagccatagcttccaacttttttctcatatctgttttctcccttttttatcggtaaatacacaaccagttccttttctccgccgtgcgcggactttttatagtatagcataaaattctgccccaggccaggggaaagcgcggtttctactcttgcaacgctcactttactgtgctacaataaaaaaatagtggggctatatcagccccttttctctttcatcattcacacgcgaaaggagtcgaagcgctttgttcagcgaacgaatttacaatttttcagccggcccttctatgctgccgctgcccgttttgcagcagattcagcaggagcttcttaactgtagtggttccggcatgtcagtgatggagatgagtcaccgatcttccgcgttcgactcaatctttcaggataccaaatcccgtctgcgggcactcctgcaggtacccgacgactatgaaattctctttttgcagggcggcgccagcactcagtttgccatggtgcccatgaacctgatgggccgaacgggccgggcagattacgctctaaccggcaatttttccacaaaggcctatgaagaggctcaaaagttcggcctgtgcgccgtcgcctgctccagcgccgatcaaaaccacacctatatcccccagcaggaagcactgcaactggacgccgacgcatcctatttccattactgcgccaacaacaccatttatggcactgaatggaactatgtaccagacaccggcgctgtccccctcgtgtgcgacatgagttccaatattctctccaaacccgtggacgtgagccgctacggcctgatttatgctggcgcacagaaaaatatggcccccgccggtgtgacggtggtgattctccgccgcagcctcgcgggcagcgctccggaaaatacacccaccatgctcaactatgccacccatgtcaaaggcgattccatgtacaacacaccgccatgctggtgcatctatgtgctggggctggtggcaaaatggctgcaggaagatgtcggaggcctgtcggaaatggcccggcgcaatgaggaaaaagccgccctgctctatgcctatctggacgaaagccatctcttccacgcagcagtgcaaaaggcataccgcagccgcatgaacgttactttccgtacgggcgaccgggatctggacgcacagtttgccaaggaagcggcagcggcaggtctttccaatctgaaaggccaccgtctggtgggaggaatgcgcgcctcgctgtacaatgccatgcccatcgagggtgtcaaagccctgatcgatttcatggcacgctttgaaaaagaacatatctgaaaggattgaactgcattatgtttaaggtaaaaacgctcaatcacatctctccttcctgcatggagatcatgaccccggaccgctatgaaatttcggacaccatggccgatccggacgcgattttcgtccgggccaccgatatgcacaactatgagttcaatccggctctgcgctgcattgcccgcgcgggaatcggcgtgaactccatccccctcaaacgctgcagcgaagccggcatcgtggtgttcaacacccctggcggcaacgccaacgccgtcaaggaactgttcctgttcggcctgggcatggcctcccgtgatctgatgggcggcatgcgctgggtatataattacaacaatcccgacgtgcctgtggaagtagccatggagaaaatcaaaaagcagttcgccgggccggaatactaccgcaagagcatcggcgtcatcggcaccggtaatgttggctgcctggtggccaacattgccctggatatgggcatgaccgtatacggctatgatccctatctttcggtcaacgccgcttggcgcgtctcccgtcacgtgatccgtgtggatgacttggacacactgctgcgcaactgcgactatatcacgctgcacaccccgctgaccgacgagacaagatgcatgatcaacgccgcacgcatcgccaaaatgaaagacggcgtgcgcatcatcaattacgcccgcggcgaagtggtggacgaagacgccatcatcgatgccctgcacagcgggaaggtagaacgttttgtgacggatttccccaccgcccgtcttatccaagagcccaaagccattctgaccccccacctgggcggcaccacggtagaggccgaagccaactgtgcccgcatggctgccgaggaaatggatgattacctgcgcacgggcaacatcaaaaactccgtcaatatgcccgacctgcacatggaccgtaccggccccacccgaatctgcatcattcaccgcaatctgccgggcatgctgaccactctgctgccgatttttgccaaagatcaaatcaacattgaaaacatgaccaataaatcccgcggcgaatacgcttattccgtatttgatctgaatgccgatgtggaagagtccgtagtttcggaactcaaagctattgaaggtgtcctccgcgtacgcgtattgcactaattaaaaaagaactgcgcctccgccagacccggcggaggcgctttgcgttgcttttgtcctgcatctccctgaacacaggtcgatgcacggggttccgttgtaacccaaaaatggttctgccagcagcagaaccatttttcttatctaaagtagtccgcagcccagatatccctcgggccgctccatcttggcacagcaacccatcaggcgcaacatgccgagcggcgtactgtacacgcactgttctgtctccaatgcccgcgccagcagagccatcgcctcctgttcccgccctgccgcccccagcagttcacggattaccgcggtgccaccctttttaaaagcaatggcacaggctgtctctccgccgggcagcgttatttgaaacaacccgccgccgctgcgctcagccagttcccgctgcagcgccgtcagcgccgggccgaggaccacatgactgcgcccttgcaggaatttctcacgccgccgctcatatgcctccgaagaacttcggcggcacacgccgcagctctccggcagatccgcggccccgaaagttttttctgcggcgctccccaccgaccagaacccctgcttcgcgaaaaaaagctccagcgtattgtccggcagcagcgtccaaacgccgccagcccctttttccaccaggaaatcgcaggccgtttccaccagccagccggcatagttctggtgccgacgcaccggatccgtcgccagccccaccaggcagggcgccggggcatagcgatcctgcgcgccgctgtaccagaacgcaggcagcaggaataccatgctctgcactatgccatcttccagcaacaccaaactggattccacatgtcccggcacaaagcattgccggaaaaaccatgcctcatgttcttctccgaaactctcgcgccacagcaccctcagccgcggcagatcttctgccttggcggcgcgcagactgatttttgccatgccgccttattccttcgggatcaacagtgcagcgacacagtaaacaatggcgccggttccgatgctgccgatgctcagcaacacggcaagaatccgcacgatactgggatcgatgttgaaatattccgcaatgccgccgcacacaccggcaatgatgcaggattggcgggaacgatacagtctcttcataacctttatcctttcttaaccggaagcagattgccctccatgtccacactgaccgcggtgatggcattcctggtgaacttcgcgatttcgtccagccgcaccatggcgccgtaatccgacacaaaggtatatgccacaccatggcgcttggcccggccagtacggccgatacggtggatataatattcattttcctccggcacatcgtagttgaacaccgcatccacatcatccacgtcgatgccgcgggccgccacgtcggttgccacaaatacacgcagctttccgtcccggaaacgctgcatcaccttctcccgcttcacctgagggatatcgccgtgaatgcactcggcctctaccccgcctatctgcaaaaacttggttgcccgctccaccatacctttggtgttgcagaacaccacgacccgctcatagccttctttgttcaaaatgcggagcatggtgtccactttggcatcccgcgccacatcgatgcggtactggataatgtccggcttgttctgctcgtcggcccggacggtgatctcctcggcgtcgcgctggtagacccaggcaatgtccatcacttcgcgggaaatagtagccgaaaacagtcccaggtttctgcggcgggggatcttgtccagaatacgggtcacatcgtggataaaacccatgtccagcatacgatccgcctcatccagcacgacggtctgcactgcgtccaccttaatggtgcggcgcttcatatggtcgctgaaacgtccaggcgtggccacaataatctgcggattgcgcttgagcgcgttgatttgtttaccgatgggctgaccgccgtagcagcagacgatttttatccctgccaaataaacggccagatcccgcagttcgtcagtgatctgcagcgccagttcccgggtcggcgccaggatcacagcctggaccgcctcgctttccgggttaatatgttccagaatcgggataccgaaagcaaacgtttttccggtgcccgtgggagcctttgcagtcacatccctccattccagcatgggcgggatagccccggcctggatgggtgtggatacttcatatccctttttctcgatcgcacgcagaatcggctcggacagtcccagcgaatcaaagcgcacgccttgcgtcagttccatagtttctattcctctataccataaattttgaacctgctgtatgttggatattatagcatagttccctgtaccgtgcaacttttccccccgcagcggtgctgctccgccgcccggtgctccccgcgccgcgccgcaggcaaaaaagttttgcttttcctctatatttttccggtgccttgtgctatagtgtatttgtattattatgcgctaaaggagcaaatgcgaattatgattaccattaccgacctggggttacagtacggcggcagcgttctgttttcccacgcggacctgcagttcacccgcggcaactgctacggcgtgatcggcgccaacggcgcgggcaaatccacctttttgaaaatcctgtccggcgaagtggagtccacctccggcacagtggagattctgccgggcacccgcatgtccgttctaaaacaggatcagaacaaatacgacgcctattccgtgatggataccgtcatcatgggcaaccagcgcctctatgacatcggcaaggaaaaagaagcgctgtatgccaaggaggaaatgaccgacgaagacggtgtacgcgcctgtgaactggaggaagagtacgcagagctgggcggctgggaagccgagagcgatgccagtcgtatcctgcagggcctgggcgtaggcgtggagctgcaccagacccagatggccgatatggacccccgtctgaaagtgaaagtcctgctggcccaggctctgttcggcagtcccgacctgctgctgctggacgagccgaccaacaatttggacatcgccgccaccaactggctggaagatttcctgctggacttccccggcacagtcattgtggtatcccatgaccgccacttcctcaacaccatctgcacccacattgtggatatcgattatggcaagatcaaaatgtatgtgggcaactacgatttctggtacgagtcctctcagttggtgcagcagcttatgcgcaaccagaacaagcgcaacgaagaaaaaattaaggaactgc

SEQ ID NO: 788 - DNA, 22988 bp, Unknown
  16S sequences of unknown bacteria
cggtgccagcacctgaagggccagcttactctcaggtgtatttaccagtacatcactgaaaaatccggctccgaaatataccagaagagatgcaataccgccggacaccagcgcaaacaccagcgtacatctgaaaatcttatatgcactctttgcctgtcctgctgccagtcttgctgataccagcttggagactgccagtggaagactgaaggatgagatcagcagcatcatagaatagacttcatatgcggctgaatagtaactgtttcctatgggacccaggattcttgtaacagggatccgatagaccattccgataatacgcaccagaatagatgcagcggccagaatacctccctgcacgatataattggattttttattgctgttacccatatttttcctcttatcttcgtattaatcccttgtaattccaaggtgctccagagcagccgactgtctggattccatatcctttgcttcctccggtgtcatatggtcatagccaagaagatgaagcatgctgtgtgccaccaaaaatgcaaactcccgacgcacactgtgattgtatttttctgcctgttcctttactttgtcaagtgagatcacaatatctccaaggaacagttctcccgtatccgggtcaaagcaatccatctcatgttcttctgcccaggaaaaatcagccggagactcatattccacctgtggaaatgataagacatccgtaggcctgtccacttcccggtattccatattcatccggtggatctccgggtcagaggtcagaagaagattcacctgtgcctcataagggcagccttcctcctccagtacctgattgatcacttcggttgctgtcttttcatagtcaaaaccaaggtcaagaccgtactcgtcttccagatctagtgtcatggttctcctttctccgcactgttttcttctcatattcttcataagcggttacaatcttctgtaccagaggatgacggacaacgtctctgctggtcagacgacagaagctgattccttctacttttccaagcaccttctgtgccacatcaagtcctgatttcacatccggtgccagatccttctgggtctcatcaccagtgatgactactttggatccgaatcccacacgggtcagaaacatcttcatctgcgcctgggtagtattctgtgcctcatccagaataataaatgcattgtcgagagtacgtcctctcatatatgccagcggtgctacttcgatcagacccttttccatatttttctgaaaactgtctgctcccatgatctgatacagggcatcgtacagtggacgcagatacgggtctaccttgctctgcagatctcccggaaggaatccaagcttctctcctgcttcaattgccggacgggtaagaatgatcctctctacctcattcgccttaaatgcggtgatcgccatagccatggcaagataagtcttaccggttcctgctggtccgataccaaaggtgatcatgtctttgcggatcgcatccacataagctttctgtcccagggtcttgggcttgatggctttgccgctgatggtgtggcagatcaggtcactgtcgatctccagcagtgccccttccttcttctccatagccagagacaatgcataattcacattctgctctgtgatctcactgcctcttctggacagctccagaagctccaacagcacctgctttgcactctctacctgtgcttcgttaccgatcagcttcactccgccgtctctggagacaacggttacgccgatggttctctctatttttttcaaatacgcatcaaactgtccgtacacgttctgtacatgctcagacggaatgtcaaaaagttcattttccagtgtcacttatgtctgttccctttcttcttccaaatgctgatcgttctcctcttggatttcgatcacaggcttctgtgtacggactgcctcttcttccaccagaaggcttccttttgctgtacacacttgcccattaacttctattttaacaccattttcaataatttgaagtccttttatctttattttttcaaaaaagagctgcagctcctgttctgctctctgttttgcctcttgttctgtgtagatggcctccctgggaatatactcttttatagtacggatcccaaccgtgaccggcagatagaagttttccgtgatcctcagcggaacctcgctggtcagcagatcctgatattcataatctacttttgtaacaccaacggtgatccgtcgatttcccaggatcagatacaatgcccgcttccgcctgcctgtatactcctttttcacataatccatcgggaatgatgcctcataagactgacggtactggatcttaacatccgcatccgcatgcaccagatgggtctgcgccaccattccctcatcgttcatgacctccacctgacttttcaccagcagatctcctgcctgcacctggtctccttcatgaaccaccggtgttccggcacggacaatcatggatatgatctgtccactctttgtagccaccagatccgcaggttccttctcgtccaccagtgaaaagctggcatcctcattttccttcatgtgtacgatcagcctggttcctttcacctctgccgatgtccatgtaacctctgtaaaatgttctctcagcttcttctccagctcttccccatgaatctgccgtttgagcatgccatgggtgatgccttcctcctgcagatagcttaagactacctgtgtgctcagggattcatttccttctatatggatattccagatgaacaaagacattacatacagaaggacaatacagaaaaaagcaccggctgcaaacaattttcgcctccggtacttccacagtaaaaacggaagtccatgcctctccagaatgacaactttggtctgtgtctttctgaccagcggccgcaccttccgaaatgcagcaatactcatacacatttcatattctgttccggtacttctaagtccccacaacacgattttatgatgacagcacagattcagaaaccgttccggtgaataaccagacaagtgaacgactacataccctttgagaaattttaatacagatgtcagcaataacggatctctcctatctgccccgatattttcatctcatcttctgtataatagtcaatatgtaactgttctccgcacaacgtcatctggcaggtcttggtctgcagccggatccgttgctctgtatattcgatgattcctctataattctctatgtaagcttcactatgtcctgtaaccgtcagcactgcggctcccatgaccagatccttaggaagcttcaatttttcagccatccgttcgcgaaatttcatgaggcactcccgtccggcggtttttagatattatatgcaggcatttcagcaatcatgtcatcggtataacaggagactgaaccaagtcaccacatttgcaccattcataaaagaaatgccgtatttttctgccagatctgtcacaaggattccgtagctttcaatacatggaaacatcttctccgggtgacggcagggtgcatccggataggcacattttttacagatggcacaggactccgtagacaacacctgcatcgcttctgtctgttctgcaaacagatcccgtacctgacgggtgatcttctcatgctccatacgagtagccagtgtctcctccatatttgcaatatcattgacctcggcaatggtcgtaaaaataaaaccacccgtatactggctacaccgtttcttgcattcttccaccgttcctaccgctggcggacaggaccaggatttgccatactggggacattctgtcttacagatgtaacgaacctgatccagaaatgtaatatctgctatattgataaatgcatattcacatacagggaactgtgtcagtccctcttctattttctcctgattcatggtaattcctctttcacacttataagcgaagacctttgatatcctttactctggataaaatgatatttgtgctgcactccagcacgccgggaagatgatccatcgttccatgaagaagctgttccagttcttcctgagagggactgactgcatgtacgtgaagcctgcttttccctgtcacacgataaatctgtgtaacggtgtcattcttttccaatatggagatcacttcttccagtgtatccggcacggtctcaatttcaaaataacaggaaatcgcaccactgattttctgtggattaatgatcgttgtgtattcctcaatgattcctttcttttccagtgcctgtacccgcatcttcaccgcaactctcgagattccaacctgctgtccgatctccgaatacggcatccttgcattctgaattaaacaccttataatcttctgatcaagatcatccagtccatctaaaaacatccttcagacctcctgcttttatctattcattatagccctgtcatttctcttccgtcaaccagatgaaaggattgacgtctctttcatttcattctatactataattacatttgttaatttatatattacgtttcgataataagaggataataattatggaacacgaactgactaaaggacctgtgatgaagaccatgctgcttttcgcaataccgatgatcctgggagatctgcttcagcaatgctacaatatcgctgacacactgatcgtaggacgatttttaggcgcagatgcactggcagccgtcggatccgccttcgcacttatgacatttctcacatcaatcctgctgggacttgccatgggaagcggcaccgtcttctccatccgctacggaagaaaagatatgaccggcttaaaagaatgtatccttgcttcttttgtgctgctggcagtaatcaatctgatcctgaaccttctggtcttcatcggaatcgatggcatcatctggtttttgcgtactccggaagaattaaaaggactgatgcatgagtatctgatcgtgatcttttcaggactcaccgctatctttctctataattttttcgcatctctgcttcggtctctgggaaattccatagtaccactggtatttctcgccatctccgccggacttaacattgtcctggacctgtggtttgtaatcggtcttaaatggggtgtctccggagccgcacaagcaacggttatcgcccagtatgtatccggcattggcattgctctgtttaccttcatcaaatacccggatctgctgaaaaagacacccgatgtacatctgaaaaaagaacgtttccgcgagatcaccagcttctctgctcttacctgtctgcaacagtccattatgaattttggtattctggccgtacagggtctggtcaacagctttggcactaccatcatggcagcatttgccgcagcggtgaagatcgatgcatttgcctatcttcccgtacaggatttcggaaatgcattttccatctttattgcccagaactatggggcaagacagccggagcgcatcaaaaaaggaatccgaacagcggtcattacttccctgtccttcggactccttctgtccattctggtatgcttatttgcagtccctctaatgagtctgtttattgatgcatctgaaacaactgtcatcgcagaaggtgttcgctatcttcatattgaaggtgccttctatttcgccattggtggcctgttcctgctctacggactctaccgcgcactggcaaaaccaggcatgtcggtggtgttgactatcatatccctgggaacccgtgtagctctggcctatactctgtctgccattccatccataggggtggtcggcatctggtggtctgttcccattggctggttcctggcagatgctcttggtgtgatctactacatattaaaagtcaataacaaagacttcactgccaccacataaagtgctgcagcaataataatttcaagatagctcatcacagttttgccaacctttcgatctctgaagctgaacatgattgataatgttgccattgtggcatacattccactttctgccagatttcctggcagaatgcgaaaccatgaaagtacagaaaatacaataaataatacaattaacacgaccattggggtttctttattttctttgaacatgttactattattctcctttggtaatatctttcctttacaggatcatttatgatagggctcattgttacggatacggaaactccggtagatctgctccagcagaatcacccgcatcaactgatgaggaaatgtcatttttgaaaaactgagcttataatcagctctctgaagaactgccggtgccagtcccagagacccaccgatcacaaatacgatctgactgataccgcctacattccagcgctccatctgggctgccagttcttctgaatccagcatcttcccatcaatggcaagagctaccacataagcactttctggaattttctgaagaatccgcactccttccttttccttgatctgtgcgttcagcgtctcgctggccccatctggtgtcttctcatctgccacttccacgatctccagcttacaatacctgctcagacgcttggcatactcctttatcgcatctgtaaaatacttctctttgatctttcctactccgatcacggtaattttcataaaacttattcctccaaccggatgattatagcacacttatctgcttttttgtgatataatttttaagatatctgtcgtaaatgtctatcacacaacgcgcgcttcatgatatctttatacttacatcgaaaaggaggactcctcatatgtccacttacaattctgcaaaaaaccgccaatctgagaccagatcatctgcatgggcctttttgctggtgggatgcattggatttgtgatcattctgctggcactattaggtgtaattcgattaccctttggcacctttcctctattgatcatggaagtgatgtttgtcattttccttgtcattgcaggactttccttcaagcatgccatgaatatgctggatgagatttcaagagaaaatgatctggagacacgcatcagagactgggcaaaagaaaatctgactgttgacagtctcactgttgatgtggacacatccaccacggaagagatgaaatactttatgatcacagagctgatccgtgaacgcatcatgcatgcattcccggaagtacaagaatcttatgctgacgaactgacggagaatttctataatgaactgttttcctgatccagacaaacattattatatgttctacaagccctttggctgcgtgaccgctcacagggatgacctgttccctgttgtaatggactacttttccgaactccataacgacagactctcccctgtggggcgtcttgaccgcgagacagaagggcttctgatcgtgactgatgatggcaaatggaaccagtatatgaccaacccgaaattccatgtgccaaagacctatgaatttgctgctcttggaacgcttgatgcaaggaagcttcagagactggcagaaggtgttctgctgaccggctcaaatattcccaccaaaggcgcagatgtcaccgtgactgatacctgtgtcctctccgatattcttcctctccttcacccggatatgcagaagaaactggctcataacctgccttctcatcctgttgtcatggggactgtcactatctctgaaggccgcaaacgtcagatccgccgcatgcttaaagtcgtcggctgctgtgtgattcgattgaaacgggtgtctatgggggatactgtgctggatgatacattaaaccccggtgattatcgggaatttgtgccggagccgacgattgaaaaataaatcttcatgtcaaacaaacttctatttgggcagccaaaccttttttgtccgttggctgcctaatctcattattccttgaaccttttcctagcatactacaatatataagtgtaagggcaaaaccttatggccggcgaaaaaggaaacagacaaaggagaatttgtgatggaccaacatgaattcgagcagtttgtcctggaaaacggaaaaaatatcctgcgattctgcagattaacctgtcaggataccgaatcaggagacgagttataccaggacactatgctcaagctgctggacaaacgacagcaattggacaaccagcaaaatgtacaaagctacgcactgtccatatccatcttactatggaaaaacaaaaagaaaaaatatgcaaaccggaaccggcttataccaatggaaagcatggatgccatggagcatgacaagatttctgaattaaaagaagaatccgctccatctccggaaacatgtattttgcaggcagacgaaaagaaaatgattcaaaagattgtctctgatctgcctgaaaaattcagaattccgatccacttatactattctgctgatctgtctatacaagaaattgcagaaatcttaaaaataccggaaggaaccgtgaaaagccgcttgaacaaggcaagacagttattaaaaaaagaactggaggaaataggatatgacagatgaaaaactggacctgctcttaagacaggctctcaatctggagattgctgaccatgatattcaaattgatgctgcaaaaataaaatcagatagaaacacaacctcttggaaatattggaaacatttccctgctgctgccgcttctgttgctgttctcacactatcttccatgatggtctgtgctgcgtggcactatctttcagcaaaagatgtagccggtaaagcagctgatccacatcttgcacaggaatttgaacagaataactggattgatggatgtgaaacacagatttatggagattataatattacgcttttaggaatcgtctctggaaacgaaatctcttcccatctgtccaaagatgattcaggaaatatcgatggcgataaaacttatgtggcagtggcaatctcccattcagattgtagtcctatgccagattctctgaatgcaggggctgattctgtgcagttttatgtatcaccttatataaagggactggatcctgccaaatataatatatccgttttgggcgtcaacaacaccgttttcctttcagatggaatccagtatcaattacttggaatggatacgattgcagcttttgccggtcagggcatctaccttggagtttccgaaggcagcaattacaatgctaatgcttacctgtatgattctgccagcggaactctgaccagaaatgaatcctttaacggtgtaaatgcactctttacactcccggttgatccgactatgggagattctgaaaaggcaaccaatcttatagacgcgatggatcactatgagtccggcggagaatccaccataatcttatcagaagcagaccgctggctgaacagcattacccctgaaaccattggcgaaaatgccgtaccgctggaaagcagtcgaaaaaccgtcagcacagacgaatttttccaatatacagggaacgatgtatccaatgattccgataccggctctctcattctgaaggaatactttccagatggaaccggcatgagtgaatggatgaccagatccggcacctctatggaggatgcttttgtggagacctacaccctgaacaaagacggaaccatcaccatcttgagatatctacccaatctgaataaataagttataagctatcatttatagatcatctatgagtgatagcttctgctttgtcaatcaatcccataaaaatttaaactaaacaacttctgctattggagcgggcaaataaaaagactgtgtgagcagaacggacaccatcaaggtgtacagtctgaacacacagccctttattatttgctccgatacactacatacagtagttatctatgagtggcgtcacatgaatcctgcgtatgccaacttatttctggctcagatattcatgaataccttttgcaccagctttaccagcacccattgcaaggataacggtagccgcaccagttacagcgtctccaccagcgtatacgccctctttggaggttgcaccggtctcttcggtagctacgatacattttctcttgttgatctcaagacccttggttgtggaggagatcagcgggttcggggaagtacccagggacatgataacggtatcgcagtcgatcacgaactcagatcccggaacttctaccggacgacgtcttccggatgcatccggctcacccagttccattttaatacattttacacctttcacccagtcattctcatcaacgagaatctctaccggattggtcagaaggtcaaagatgataccttcttctttagcgtgatgaacttcctctttacgagccgggagctcttcctcacttcttctgtatacgatatgagtctcaccgccaagacgaagtgctgtacgtgcagcatccatagcaacgttaccaccaccaacgactacgactttcttgccgtgtacgatcggggtatcaaagctctcatcaaatgctttcatcaggttgtttctggtcaggaactcgtttgcagacagaacaccacaagcggtctcacccggaatacccatgaatttcggaagtcctgcaccggaaccgatgaatactgcatcgaatccttcgttctcgatcagctcatcaatggtaacagtcttaccgatgataacatcagtctcgatcttaacgccgagagattttacgttctcaacttccggtgcaactacgcgatctttcggaagacggaactccggaataccatatacaagtactccacctgctttatgtaatgcctcgaagatggttacatcataaccaagttttgcaagatctcctgcacaggtcagaccggaaggaccggaaccgataacagcaacttttttgccattcttctcagccggagcctgcggtttgataccgttctctcttgcccagtcagctacgaaacgctccagtttaccgatagcaaccggctcacctttgattccgcggatacattttccttcgcactggctctcctgcggacaaacacgtccacatactgccggaagtgcggaagactggctgatgatcttgaatgcttcctcgaagtttccttcttttacttctgcgatgaatgccgggatatcaatagataccggacaaccctctacacatttcggttttttacagttcaggcaacgagcagcttcctccattgcctcttctttattgtaaccgtagcatacttcgtcaaagttagtagcacgaacctgcgggttctgctctctgactactactcttgttaatccgttagccattatttgtcacctccgcaatttccgcagccgccgtgatgggtcttgccctctttatactcaagaagccgtcttccttcctcggctttatacatagctgatctcttcatagcctgatcaaagtcgatcagatgaccatcaaactccggtccatctacgcaggcaaacttcacttcgtcacctaccattacacgacaggcaccacacataccagtaccgtctaccataatcgggttcatgctgacaacagtcgggataccaagtttcttggtggtaagacaggcaaatttcatcatgatcatcggtccgattgcaacacacagatcatactgatgtccttcacttaccagtttctcaagcatagcagtacctacacccttgaaaccgtagcttccgtcatccgtacagagatacaggttaccaaccttgctcatctcgtcttccatgatcaggatgtctttgcttcttgctccaatgatgatatcgcactcgataccatggtcatgaagccatttagcctgcggatataccggtgcagtacctacaccaccagcaataaatacaactctctttttcttaacttcttcaaaatcatctgttaccagctcagacggacgtcccagcggtcctacaaagtctgcgatggaatcgccagctttgagcttcagcagtttattagtagatacaccaatcggctggaatacgatggtaaccgttcctgcttctctgtcataatcacagatggtaagcggaatacgctctccattctcgtccactctgagaatgatgaactgtccaggttcgcaggattttgctactctcggagcgagaataacctgcttgtagacatttgcagagagctgctctgcctctaaaatcttaaacatacatagcctcctatctctatccgcagccgcccggtttcacgactgcaaatcattacttcctatgataatgcaaaattctgtatatttcaacaaaaatttcctgttcgcccaatatttatcataatttttttgttcaataagtgaaatctgctcatgttccctattactgtacaggtactgctgcagggtctgtctgaaccggcagttctccggtcggaacagtctctgtgccgggctctgctgctcctgttccatcttcaggtgcctctgtctccgccacgttatagatttcttccataataccactcgcacggccttctttgttgacggctactgcctgaagaaccgtcagtcccggattgatatagattggttcccgatacacttttgaataaacatccggttcctctccattcgtcgtataatagaccgtactttctctgtccgctgtgatcgtcacatagaatccactatcataatcgccgccatttacactgaattggggctcgcttggataatcaaggacaattttgtaagtaccgcccgcttcctcgctccgcagtccgtcattactgataaatacagcacgaatcactgtagttccctcatcaatatggaccggctgattgtagattttgcttgcctcaccgggcgtagaaccatccatcgtataataaatgagtccctgcgaacgctgatcatgagagatcaccagatcaatggaatccccataggttcccggcggcagacttaaagatggtacttccagcaactgttctgtctcactttccagttcctctgccacttctgtcactgcatcctgatggaatgtagactgataagaggtccagtaagtaatgattcctgcaatggaaagaaccagtgcaaatggaccatattttttcagcagatagaaaaaacgctgtttccgatccgatctctgttctcctgaagaagcatctgaactgtccttattctgtatgttgttgtcctcttcaccaatggtgatatcctctgccggattatagtccggtacgatctgaagagcttcgccgcatttctcgcagtaaaactttccttccgggatatctgctccacatttcgggcatttcatatgaatccgtctatcctttctgctttctagtactgttcctctatatactgttcaaactgttccgaagacatgagcacctttcggggctttgtcccttcttcctcaccaaccactccggcatctgccagctgatccatgattcttgccgcacggttaaatccgatcttgaaccagcgctgcagcattccaatggacgctttatctttttctataataaaccttccagcctctgcaaacaatacatctttatccgatccgctgctgccatcagaagatgtggctgcattttcaatggcagactgcatctccttcatcttctcagcaatctcctgttccttctgggaatcttccggctttctgctgctcaagaattcaacgactgctcctacttccgcatctgatacaaatgctccctgcacacgcagcggcttcggaataccgtaaggcgagaacagcatatccccttttcccagaagcttctccgctccgttcatatccagaatggtacgggaatccacaccggaggatacggcaaatgcaattcgtgacggcatatttgccttgataagacctgtgatgacattgaccgatggacgctgggtcgcaatgatcaggtgaataccggctgctcttgcaagctgtgccagacgacagatggcatcctccacttcacctggtgcaaccatcatcagatccgccagctcatccacgataatgacgatctgcggcatcttctcccgcttgttatcatcaggaatatccttgatgctgtcaatcttttcattgtagccttcaatatttcttacgtttaattctgcaaactgattgtaccggcccatcatctctgcaaccgcccagttcaatgcgcctgccgctttcttcggatccgttacaaccggaatcagcagatgcgggattccattatatgcgcttaactccactaccttcgggtcgatcatgatcagtttcacttcatccggccgtgctttgtataaaatactcatgatcaaagtattgatacacacagatttaccagaaccagttgcaccggcgatcagaagatgcggcatcttggcaatatccgacaccatgatgttgccgccaatatctttaccgaccgcaaatgcaatcttggatttatgctcccggaactctttggattctaccagttcacggaacatgaccgttgaattttctttgttcggcacttcaatacctacagcggcctttccggggatcggtgcttctatacgtacatctgccacagccagattcagtttgatatcatctgccagagccaggatcttgctgacctttacaccgtgagcaggctgtacttcatatctggtcactgccggtcctctgctggcattgactacggtggcattgaccccaaagtcttccataacctgctgcagatgctcagccgtttcctgcagtatcacattatcatccttcttaccagaggatactttcggcttcttcaaaagagacagtggcggaaattcatattctgcctctgctgtctgagcgacctgtgtctgagagatttctgcctgagagatttctgtctggaaggtttctgtctgagagatttctgcctgagaagcttccatcacatgaaccggctctgtctcatccagatctctggtattcatggcatttttcagaagatcttcctcgctgaagttaatctctgcatccggtgaagaccaggattgcatgggttccgctgccggatactcctgatacggctctggctccactgcataactgtgaaccggagtacccacctgtacaggaacctcttgttctacaggcatctgtgcctgagccggatctgcaaagcttacgttgtccggttctgtcacctcaatcagaccattttcctgtttcggaatggtcacatccatggtaactcctgtcactttccgttcctgtctctgctcctttaactctctggcacgggcacgctgctgctctcttcgctcatccgcaagctccctgcggcgtgccatatcctctctggcagattcatagactctctgacttccatgagacatgccatctacaaaggaacggcctgtaatgatcaccacacagatgatcaggatacccagcagtaccagataagttcctaccgttcccacagcttttttcagaagaattgccacaatgcctcccagcagacctcctccgatccgattggtcttgcaataggtatatacatctttgatctcttcaggggcattgggcatcagcatatgcatcaatgcacagaaagccaccgcacagagcaccacccctgcaatcttcagtgttgcctccaggttctcccggtttgccagcgaaaacagtaccatcagaagcaccagtacaggcaacagataggcaaacaatccaaacattccaaataatacaccacttaaaaacttgccaacggcaccacccacgccaaagttgctgacaaacagaaaaacgcacaccagcaacagcgccacaagtccgatttcccgttcaatgccgctgttctgatttttgttctgtgttttcttccctgaactgttctttcctgaccgggaactgttccttgccgaagctgtcttcgtggaacttctctttgttccggtatttcctgttgtctttttctttgccgtctgccgactgttgctcatactctatccgtccttttcttcgtgttactgttcctcatatctcgttccagtaacctttctgctcttatcaatttcctgacattgcccggaatttctttaacagattttcaaaatattccggaagcggagcttccacctccagatattctcccgttaccgggtgaatcagtcccagcaccatagcatggagcgtctgcccttccagatgatgagaatcctttgccggtccatacacggtatctcccagcaatggatgatggatggatgccatatggacacggatctgatgagttctacctgtctccagctgacattccacgtaggtatatccttgaaaacgttccagtacccgataatgagtcactgcccgttttccattctttacaccggatgccatcttcttacgttctgttggatgacggccgatcggtgcatccacagtaccttcgtcttctttgatcacaccgtgtacgatggcccgatattttcttgtgatggaatgttcctttaactgcgctgccacagcattatgcgctgcatcatttttacataccacaagtacaccggtggtatccttgtcgatccggtgaacgattcctggtctggatactccattgatccctgacagctgtccctggcagtgccagagcactgcattgaccaatgtacctgtataatgtcctgcagatggatgtacaaccattccctttggcttattgaccatgagaatactgtcatcctcatataaaatatccagcggaatattttccggctcgatgtccggacttttcagttccggaagatctgcagtcacttcatctccgtcttccagccggtaactggatttctttggctctccatttaccagtacattaccatccttaatgatcttctgaagataagaacgggactggtctggaagcatgacacttaaaaatttatccagtctctcatccatgtatgtttcatcggcctgcaggctgatctgactcatgaacgtttctccttcccctgcagaagacatgccaggtcttcatctttataatagaagaaaatcaacagtgcaagaatcaccattcccacactcacataaatatctgccacattaaagattgggaaattgatcagtttaaaatagaaaaaatctactacataacctaatcttacacgatcgatcatatttccccaggcacctgccaacactgcaatggcgatcagacgaagcggtacaaacttcgcatcctttgacattttacagaacagatagaccacagccagaagaactaccagtgcgatcaccaggaaaaatacctgctgtccctgcatgattccaaaagctgcacctctgttttccagataatgaagctcaaatactccgtcaatgatcacaaatggatcctgatccttcaaaaataataccgccagatatttggtccactgatccagcgctaccaacagtacagtcaggactgcgatcacccatggacggcataattgcttattcatgtatttcctccccgcagacgtaccggcttgcccgcagaagttcctcatcttccacgtcccttgttacgaatgcttctccaatttttttcaaaaggacaaattttaccttgcccgcatccatcttcttatccagttttgttgtctttacaatatcctcaggcttcagtcccttcacacgcactggaagctggtaatccaacaataactgctccgcagcttctttctctttttcagagatcagcccccgcttccaggacatccatgcagcagccgcacagccaatagccacacactcgccatgacaaagtgtaaaatctttcagcttctcaacggaatgtccgatggtatgtccaaaattcagccaggcacggattccctgttctgtaggatcttcctctaccacatgccgtttgaccttacagctgccggctaccatccacagaagtgccgcatagtttttttcacggatctctctctgatatgtgcttaatttttccagataatcagagtcctggatcagaccatgcttgatgatttcacccattccgcaggcaaactgtcgatccggcaatgtcttcaatacattcaggttcatatagaccagccgcggcatatgaaatgctcctaccatgtttttgtatgcgtcaaaatcaacaccggtctttcccccgatactggaatccacctgagagagcaatgttgtcgggatctgaataaatccgatgcctctcagataggtagccgcagcaaatccggtcagatcaccgaccactccaccgcccaatgccaccagcatatcttttcggtcaaatttttccaggatcagatgctcatagagatccctgaccgtatttaatgtcttgtttacctctccggccgggaagacaaacatggatacatacgtacatgtttctttcagaatctcctttaattccgcaccataaagctctgctgtggtactgtctgccacaatgcacagctttctttccttaatattcagcggctctactgcctcaggcaattttgcaaaatccggctccagataaatatggtagcaaaactgaccatctttttttacatccatacagacacggcctgcctgtgccgcttcctccaaagtagccggaatctctgtcttcactctgttcatatgatctcctgttattctttaagccaaagaaagagcatcggacccacgtttcatctgatgctccctttcattcgtttcctgttgtttttttctaaatcgtcgggatatcaaatgccccgcttaaaatctcctggaaatctccggagatgtctacactcttcggtgtcacaataaatatgtagttagataccttctgaaggtttccgccgattgcataacaggaaccagaagtaaaatcaatgattctctgcgcgatctccacatccaggccttcaaagttcagcactaccgtacatccatttaacaaggtgtctgtaatctctctggactcatcaaactgagttggtttgaatacacagacttccataccagctgctcctttttttgtacgcataggcatgatccgtgccggctgctgttttaccggtttcactttctctgatccgcttgctccatcatctcccagatcataatcatactttttatccttcttcttaaacaggcttccacgcggttccggttcatcatcgaagtcatcatcgtaatcatcataatcgtcttcgtaatcatttcccaaatgcatggtatccatcagcttatcaaaaatgcccatgttcttagctctccttttatatcacttcataattgcgctctccgaaaataccggttccaacacgcaccagagtcgctccctcttccactgccacctggtaatctccggtcatacccatagaaagcacatccatgcatacattatcaatgtttttctttttgatgtcaactgccaatttttttaatgtacggaaaaccgggcgattttcttccggatctgttgtatacggtgcgatcgtcatcagcccctgaatatggattcctgggagttttgcgatctcttccactaatacaggtgtctcttccacagaaacaccaaacttactttcttcctcagccacattcacttcgatcagaatatttacttccacattctttttcagtgcttctttgctgatttcttctgccagcttcaaagaatccacagaatgaatcagttccgctttatccacaatatattttactttgtttctctgtaaatggccaatcagatgccagtgcagatctttcggaagctgctcatatttatcgcaaagctcctgcactttattttcaccaaatacacgggctcccgcttccatcgcttcttcgatcatctcgattggtttggtcttgctgactgcgatcagcgtcacatctttaggatctcttccactgcgtgcacatgcctcttccacttttttcagaacatatctgtaattttctgctaccatagctgtcactcctcgtctaatagataatctgatcttcatctaccgctgacccattgagaacaatatggtcatagacggtaagtccataactggttccctgctccaccagtgcgtattcctcgttctggtagagaatgttgatctggcggaactgcgtgtaacctttattgatattataaacacctttcaacacacctgtatttccaacctgaacacgttcctgtgaatcgggctgcaccagataagtcccaatgggcaatttcgtgtttccggtggtataatcagattccataggatcaatataataataatcgtcatcttcatagtagatggtcattttcagaaattctacagatgcgcccccatctttgtcatagatttctttcatgaatccctgatctccatcctgttccaccagatatgccttggggatcagataaaattctttttctacgatggccgtattgggaatcttaagcccctgctgatcatcgatcataaactctacttctatgtaacgaaggtctgcaaaacggaccatggacgtattaaaatccagtctggcacaaggtatgcttcctacatagacaatggagaaccttgcccagattttggtgtcgtccctagtgaaacgcacctgcatataatcggtgccatcattgataaatccagtggcttcttcttcggaaagcggcactaccatagaccatttttcagatgtggacagcttgtagaccggctccccggcctgtaccatttcttttttaagactctgctttgtataagtagatggatccagcatatcttctgtcatactttccaccgtcacatcttcatagccgtcctggtaaaattcaaggattccgtttccactggcataaacccgggaaaacatggaatcatctcccgcttccgccagactgtccagcatgctctggttcaccagctccatgaccatgctttccatattagattgaaattcatagacatccccaaactgagtatcattataactgtccatgaaacttttcatatcccctcggatctgtgagaaattatcatccgtcagatccacagtatctgcattttcccggatcagatcattgatctcacccttctcatcaatcgtatacaccagactggaaccagagacacggtctcctgcactggcatagaagctcacataaccggaagtatctgctgtacagaccgtctcctgccgaacagcaaatcctttataggtatggttgactgccagtgttcccgcctgcacctcatatcccgcaatatgcactgatgtcagagccatgtaacagatcacacacatatagacggccactgcgccaaagaatactttatcaatattgatcggtcgtctgctgtttacacgaactacttttcttttccgtcgtctgcgaggcatatgccagacactccttcctgttttatatgtcaatattcaggatttcaccgttacagacatatacctgtctctgaatattcacataaaaagacggatgaccaacaattgtgggcatccgtctggtgttttttctatcttaaataatctgtcccttggcaaattcaggaatctgatccttagccatagacacgctgagcaccatgtttacatggaactgttcactgatctgattcagctgagaaagtgtggaagaaatatcctgaccttccagttttgcaatcttcaaaaatccatccagataaatctcctgaaggtcataatcctgagagcagataccacatacaaaaccgataaactgatctgtattctggatcggatattctgttacgttgatcaaacgaacacgattgtcaagctcatgcatattctgcgtggacttatccagatatactacatttccatcggtagatgcgagaatgttatgtacatgctccagcatctttttcgtctttccttcaccctttactccaacaatcaattgtaccataatggtgccctccttaggttccgtcttgttagtaagattataccattcagaggttaaaaatacaagtctaattgttcagattagacagaaatgtctgcatctcctgataaaggattccacgttccttacaaccaaggataattgccacatattgttctccctgtgcatcctcaaaaagctgcaccagacaggacatggctgccgttgttgtgccggtctttcctcccactgcagtaactccatccggaaccgttacatcgccctttgtaaactgattcgttgtggaccagactgcttctacagtggttccatctgccgcctgataagatgcctgatattctttttcctgcagcatctgaagaaattcctcatgctgcatggcagcattgaacatcagatacaagtcatatactgtcgtataatgatcttcactatgaagaccattggcatttacaaaatgtgtattcgttgcgccgatcttctgtgcttcctgattcatcatctccacaaatgcatcctgactgcctgcgatctgctcggcgatcacattggctgcatcattggcagacaccgtcaaaagtgcatataaaagctgccgaagagtaagaacatctccctctttcaacttggctgtggatacaccgctttctgaaaacgtgattgcttctttgctcactgtggtctgtgcatccaggtctcccttgtcaagcgccaccagtgcggtcatgatcttggtcgtactggccggatacattcgttcatggatattttttgcatataagacttttttctcattgagattaaagaagcatgcagcaagtgcatcttctgtatcagcctctatatcctgcacatccgtatctgtcacacacagatcactggcaaaatatggaatcttcgatgattcctccgatgtctggatcccaattcccggaagatctgcctcaaaagcatcctccagccggttctctccgcaacca

SEQ ID NO: 789 - DNA, 6589 bp, Unknown
  16S sequences of unknown bacteria
aaagcaagacaaccgtctcctcgggtactatctctggttcgccgtccgctccttttctgtagccgaggaaattccggtaattgaacttaaccttgccgtcagcgaagttcttccgcatactccaggttatattcttgctcatactctccgactcggactgtgcgaaaccggcgtacatcacaagatacagctcgctgtcgcatttcatcgtgtcgatattctgttcctcaaaaatgacgctgattccctgagccttgagatttctcacatattcaaggtactcgaccgtgttccgcgcgaatctcgacaccgacttcgtgattatgatgtctatctttcccgacgagcagtcctttatcatctttttgaactgaggtcgcttgtccgcgcgggttcctgagatgccctcgtcagcgtatatacccaccagctcccactcgggatttcttgctatcatctcggtatacacctttttctgagtgttgtatgacgtgagctgctcctcgctgtcggttgacacacggcagtaggctgcgacacgcttctgatggtgtttttccttgtcaactatcagggattttcgcggctcaatgaccgtgaccgttttcttcgggattttccgcacgcttatctcgttcatattatcactcactcgctttcctctgtttctgtttctgtttctgttctggtatgaagcgttactcttccggactcatcgagataaatatatgatactaaatcctgaaaagatccgatgttgaagctctcacttgtttttaagcgtgacgccttttcgcgtataatccgcgcgtctgtcgcgcgctttgcctgtgtacccctgtaaagctcacctgccatgtcctttatccgcgagataatgtattcctcgctcggacactcatgactgagttcattcattatatcgtcctgatacccggaaattatcggcgataatcgctctttttcattatgttccggaatcagcagaccggagttctcaatcaccatgttcattaaaatcgtgaccttgtcaaggagatcagcgtcggttatccgcgcttcaagcccgcagtcgttgttctagcacttccagctcacggatttatcttttcccgggctgactttccgtgtcatgagactcccgcatgacgcgcatctgactctgtttctgagcgttccgaccgctccgtcagcacgttcgttcactccgcgctgtctcgcgatcttggtgttcacagcctcggtataggtgtccctgtcgattatctgatcatactcgtcaagacctgtgtatctcgcgttgtcgattatcctcgcgattctcgccttgtcccacacacttgtcctctcggtgtacgggatatttcttgaggtcaggtcctcggcgatctccttcagggtcgcgccctctatgtaattcctgaaaatgtcctgaattacctgtgcctcgttacgctcgatgatcgtcctgccatcacggatagtgtatccgtatgggataaatcggttctttttcattctgataaccgtacctttcgtacaatcttacagttttgagacagttttgaaagacggcttgtccgtctttcaaaattcacgaccccatgtcgtgaaagtctcaaaactgtctggtctgaaaatttattttcagactttttcctcatattatctcagtgaattcaagtcccccgataagggttattgtaagctcgtccctgttgtttattgtcatcccgacgacgatttcgttgaacagtttcccgtcgaattcctcaagcggcgcgtcaattgcctctataagcgattccagctttctgacctctgacgccattccggttatctttgactcaaagctgtcctgcctttcggatttcagctccgagagctttttctttatctccatcgtctgggatttatagacatcagcgtcaagataacctttcgagcgcagtccgtcgagcatcacgagtttcgcgttcagcccggcgatgctttcgcttatctgtctcgcggacttgctgttccttttgtttaacgcgctgaccatatcaagcttctgtaacgtctggcggattatctgttcctctccgaatctgagtttattcaccatcgaaatgaagccggaatatatccgctcctcgctgtagtaaaatgagcggcaggagtccttgtcctcgttatgccttgaacacagccattttatctgaccattcatgaccttccgcctgaaataagccccgcactcagcgcagcgtatcttctttgtcagcgggtatactttcacaactgctccggattttccgaactgttccgatcttctgccatagagttcctgaaccctgtcgaaaatttccctgtctatgatgccggtgtgcgtcattgaggcgtaaaacatatccgcctcgccgcggttctttgattgcctgaacggcaccgtagccgacctgaatgtcttctggtatctgctgtccccggcgtaacgctcgtttgtgagtatatagcctatccttgctgaacgccacttctctctgccgtcctttgtgggaacgcgcttttcagtcagtgccttagctatctcgcttgtcgactgacccgagaggtacatatcatagatcatccggaccacctcggcttcaggctcgtacaccccaagccgcttgtcggtcagcctgaacccatacggcgcgttgctgtcgatgaactcgccgagttccatacgctttgttattgagtgacggagattctgtgagatcgactgtgattcctcctcggctattgctgagaatgtgcttaacagcatctcgtcgcccattgacgtggtgtttatgccctctttttcgaagatgacgctgactccggcgcgcctgagctttcttgtgtattcaagtgcctccttcacgtttctcgcgaagcgcgacagggattttacgaggattatgtcgatctcaccacgctcacacacactgatcatccgctgaaactctggtcggttctcagctctcatgccggatatgccctcgtcagcgaaaatatccacgagtgtccagtcgggattgtcgtttatcatcttctgatagacccttatctgcgtggcgtatgatgtcttctggtcgacgtagttcgtcgacacacggcagtacgccgctacacgctttccgagcgattcctttgtgatcggtgatatgagttttgcccgcggcatggtggctcctttcggctttctgaatctgtcgctgatgttctcgcgacactattatacattgattttttccgatactccagagagaatcggaagatttaaggaaatgttatcatttgggtgtatggcttttcatattgtgttcggcacaaaaatgtgcggatgctaaatttattcgctcattttttgtgagttcatcttgactattcgctgcaaatagtgtataatatagatatacatgaaaggacggcgataacattgtacctcagaagaaagatcgacagctttcttgataactggaaatcagacccggagcgcaaacctcttatagtccgtggcgcgcgccagaccggcaagactgagtccatcctgaacttcgcgaaaaagaattatgagagcgtcatagacataaacttcgtcagcgacccgaaatacaagatgatcgtcgcggacggctacagcgcggcggatattgtcaggaatatctcgcgcatagacccatctaagcgatttatacccggcaaaacgctcattttctttgatgagataactgagttcccggatatcgcgacatcgctgaaattcttcaggattgacggcaaatacgacgtgatttgcagcggctcaatgctcggcgtgaattaccgcagaatcgaacacaacagcgtcggttacaagaccgactacacaatgcgctcgatggatttcgaggagtttctctgggcgaaaggctattcaggcgacacaatcgacgaaatgctcggtcacatgaaggacatgaagccgttcaacgagcttgaaatgaatgtctatcactcgctctttctcgactactgcattctcggcggtatgccggctgttgtcagcgaatatataacgagaggaacattcgaaggctcgcttgacacgcagagacagctcatcgaggattacaaggaggacatccgcaagtacgccgaaggagtagatcagacgcgcattctgaatatgttcaaccgtatagccccgcagctcgccaaggacaacaagaagttccagatctcaaaggttgagtcaggcgcgcgtttccgcgattaccgcggctgcattgaatggctgaacgatgccggcatggtgaatatctgctattgtctcgagttccccgagcttccgctgaacgggaactatgatccggacaaattcaagctgtacttcgcggatacgggacttctcgtctcgctgctcgacgaggaggcgggagacgatcttcgcgccaaccggaatctcggagtttacaaaggcgcgctttatgagaacgtggtcggcgaggcacttgtaaaatccggctataacctgttctattacaagcgcgaggattcaacgcttgaagaggatttcttcatccgcggcagagacacgcttattccgcttgaggtaaaggcgcgcaccggaaaatcgaaatccatgcggacgcttattgagtcggataagtacccggatataagctatggcttcaagctgagcttcaataatatcggttacagcgataagatatatacgtttccatatttctgcgcgtttctgatgaagcggttcatggcagaatttgagacgagggatgatgagtgaggggatttatccggacaacaagcttcaggtagtacttcctcgttcgcgaatacttcctcagaattttcacactcactgttgatttctcaaaaaatctgtgctataatataatcacccggaataaatcggaatgaggtggcggaatgatcgactttaccaatatcgaaaaatataaggaaaacaaccgtatcgaggcgaagaaggctgtcggagggcttccgagaagcatatgggagacatattccgcgttcgcgaacaccctcggcggcgtcatactgctcggtgtcgaggaacacccggacaaatccctgcatccggttgagcttcccgatcctgagcggcttgtacgcgaattttggaatgttgtcaataacataagcaaagtcagcgtcaatatcctctcagacaaggatgtgactatcgagaaagtcggcggcaagcggattgtcgctatcaatgtcccgagagcgcagcgttctgacaaaccggtctatattgacggcaatccgctgtccggaacctatcgccgcaatggtgagggcgattacaggtgtaccagggaagaagtccaggcgatgctgcgtgacgcggcgataaagtcgcaggatatgatcgtgcttgatgatatggggcttgacgtgttcgattacgacagcgtcaggcgttaccgtatccgtatgaaaacctgccgtccgggtcacgtctgggaagaactcgaagacaatgagtttttatacaagctcggcgcggtcgggagaagcgggaatgagctgcgtccgaccgccgcgggacttctcatgttcggatatgagtatgagatcgtcaaggaatttccagcgtatttccttgattatcaggagcggcttgacccatccacacgatggaccgaccgcatagtctcgacttccggcgactggagcggaaacgtctatgacttctacttccgcgtctataataagatagcgcaagatataaagattccattcagaatggaaggcggagaccgcattgatgacacgccggttcataaggctctgcgagaggctctcgcgaactgccttataaacgcggattattacggtcggcagggacttgtaatcatcagaaaaccggacgaaataacgttttcgaaccctggaggattccgtatcgacgttgagaccgcgaaaagcggcggcgtctcagatccccgcaacagcacgctcatcaagatgttcaacctgatagatgtcggagaacgctcgggcagtggcataccgaatatattcagcgtctggaataagcagggttggtccgctccgatgataaccgagagctttgagcctgaccggatcactttatcgctacacatcggcgaaagtagcgataaaaaagtagcgataaaaagtagcgacaaaaaagtagcgacaaaaagcggcggtaagacatcaaaaacaaaatcgtcaatacagaagcaggctataaccgagtacattaccgatcatacatcggcaaagacatcagaaatcgccgctcttctcggtgtcaaggatgcccgcgcacgcaggctgattttggagatgattgatgaagggattgtcgttccggaaggtgaaaacaggaacagaacttacaggctgaaagcctgatctgcttaatcctggggactcacattgtggagttcccaggattttttgtggggttttgatcacccagccagcacaatatccgcgccggtgagtttcatataatacttcttcgctcgcagatattcccgctccgtgatactgccattgtcgcgaa

SEQ ID NO: 790 - DNA, 7807 bp, Unknown
  16S sequences of unknown bacteria
ccggcagcttcgagccgatgcgccagatggggtagagctgaatgagggtgccgatgccagcgatgagcatggcgttctggatgagccgtgccgtctcgatctcggtgaaggcaatgccgttgtagacggcgacctgcgcgacgagaatgatcggcgcgacattggccacgaacatggccaggacgtgctgcaggccaaagggaatggcctttgcaaccggcactttgccgtcaagccggtagatattatcaatgcttgcggccgcgcctgcggtttgttttttcatactgctgtctcctctttcacaagtttccgaagctgcctgccgcgccggtttttagcccggcctccggcaatacagcttgtttccaaagttagtttacaacacttgaaatcagaaatcaattgggagaaaacagcctgaattttcccgttcctataaaaccggggggatatttcgcattatgaaacggccaaatttggagctggaaagtttttgtgaaatgtttacagaatcttaacgaaaaatttggcgtatccgccaaaaaccggcggaattcatcagtgcgtcgtgcgattgatatactcggcccgcagcttagaatagatgatgtgctgcccagaatataggctgtaatagccgctgagcaggtagctgacggcgcaggccgcggcaaacagcagcagcccgccgccgccaaacagctcaatggccagcgccagcgccgctagcgggcagttgacaacggcgcagaacagcgccacgagccccacggccgccgcaaagcctgcgtccagccccagcaccggccccagggcgcagccgaacgttgccccgatgaagaacgtcgggacgatctcgccgcccttgaagcccgcgccgatggtcagcgcggtgaaaaggatcttgaggaggaaggcgtaccaatgcgcctgcccgccttcgatcgcccggataatagattccattcctgcgccgttgtaatccgggacgccgcacagcagcgtcgccaaaatgaccaggcagccgccggcggcgatacgcagatagggattctgaaaaagccgccggtagagccgcgccgcgccgtggagactggcgataaacaggatcgagacaacagcgcacgccgccgccagcagcgccgcattgcccagggaggccaggctgaccgccggcagcgctcccagccggaaggccgtcggcgcgatgccgaagccctgggcgatctggcttgccactgccgccgcaacgacgctgggcaaaaacgccgcgtagtagacgacgcccacggagatgacctccatgctgaagaccgccgctgtcaccggggtgccgaacagggcggcaaacagggcgctcatcccggcaatggtgatgatatgcaggtccttctcgtcgagccggaccaagcggcccagggctgtgccgatgctgccgccgatctgcagcgccgcgccctcccgcccggctgagccgccgcacagatgggtcaggacggtgccgatgaagatcagcggcgtcattttcagggggatctcgttctgcgtacggatagagttgagcacgagattcgtcccctcgtcatgggcaatgccgcacagccggtacagggctacgatgacaagccccgccagcggcagcaaatagagcagccacccgtggtccgcccgcaggcccgtcgcgtaccggatgctgtagtggaacgccgtgcccagcaggccgcagacgccgccggtgagcagcgcgcagaagagccatttggccagggttctcagatagatgccgctgtgctgcgcctgcgcggccagcgcgtgccgcagcgtcagaagcggcgctttgcggggggaggatcgtttcatgctcgtctctctttccttctttccattttatgcggcctatcagcgcaccgcatctttattttaccacagccgcagcgttttgcaaccaccgctttccggtagtatttggcgcggctttgtggtatactgggagcagcaagataaataataaatggggagggcgtcacgccatgcagaaaaccattgctgtgattaccggcgcatccagcgggatgggcgcggaatttgttcggacgatcgagtcctttggcgtccggctggatgaaatttgggccatcgcccgtcgccaggagcggctcgaggcgctccaagcgccttgcccggtgcgccccctggcgctggacctgacggacccggccagcttttccgaatatcaggcgctgctggagcaggagcagccccgggtcgcgctgctcatcaatgccagcggcttcggcaaattcgctgccacctggcagacgcccctggcggtgaaccaggcgatggttgcgctgaactgccaggcggtgttggctatgtgccagttgaccctgcggtatttgggtgagggcagctgcatcgtcaacattgcctctgttgctgcgttccagccgattccgtatatcaatgtctacgccgcgtcaaaagcgttcgtcttgcaattgagccgtgccctaaaccgggaggtgcgcccccagggcatccgggtcatggccctgtgcccgttttggacaaagaccgagtttttcgaccgggcgattgacgccgggcgggagcaaatcgtgaaaaaatacaccgctatgtacgacccagctcagatcgtccgccgcgcctggcgggacctggcccgggggaaggacgtcagcaaatacggcttcgtcgcccgcttccaggccgccctgtgcaagctgctgccccacagctttgtcatgacctattggatgcaccagcaaaaattgccgtgaccggcagcaaaaactccgccgcagcgcaagctgcagcggagttttttaagaaaacacgctgtttcgatacgccagcagtgcggcccaggcgaggagggcggcagtgttgatcgcggtaaagtaccagtggcgggtcttgtggcgaaacagccgcatccccagcagtgcgcccagcgcgccgccgcagatgccgcagcccaacaggacgcgctccgggatccgccatgcaccccgccgggccttggccttatccgcgccgtagagcagggccgtgatgacattggctgcggccaggtaagcgtagagcgccttcatccgcgccgccctcaggtcagcgaccgcaggtcgtacggtgttgtctgatagacgaagtagttgagccagttgctgaacagcaggttggcgctggagcgccagcgtaccagcggctgccgggtgaggtcgtcatccgggaagtagtttttggggatctcaatgggcttcccggcggcaatgtcccgcaggtattcgtttttcagcgtgtcggcgtcgtactctgagtggccggtgatgaaaatttggcggcccatattcgtaaagacggcatagacgcctgcctcctcagacgaagccaggatgcgcaggtcgtcgaccttctcgatatcctcccgccgcaccgtcgtatgccgggagtgggggaccataaattcatcgtcaaagccccggaacaggatcgagcgtttatactccacccggtgggggaagacaccgaagagcttcttgggaagctgctgcttgtcaatgccgtaatgataatacagccccgcctgcgcgccccagcagatgtgcagcgtgctgtggacattcgtcttgctccacgccatgatctggcacagctccggccaataatccacgtcctcaaagggcatctgctccaccggcgcgccggtgatgaccatgccgtcaaagcgctcgtcgcggatatcgtcaaacgttttgtagaacgagagcagatggtgctggggcgtgttggccgcctcgtgggatttcatccgcaccagctccagctcgatctgcagaggcgtattgcccagcaggcgggagagctgcgtctccgtttcgatcttcttgggcatcagattcagtaggacgattcgcagcgggcggatatcctgggtcgaggcccgggtgtgggtcatgacaaagatattttcctcctgcagggttttgaccgcaggcaggtcgtttggaatcttaatgggcatggtgcttctcctttaagccgccgtcaggcagcccgggccgcctggcagcattctgcgttcagatcgcgtccagggcttggcgcaggtcggcgatcaggtcatctttgttttccagcccgcaggacagccggaccaggtccgggccgactccggccgcctccagctccgcatccgtcatctggcggtgggtcgtgctggccgggtgcaggcagcaggtccgggcgtcggccacatgggtctcgatggctgccagacgcaggtggcgcataaacgcctccgccgcgctgcggccgcccttgacgccgaagctgacgacgccgcaggtgcccttcggcatatatttgcacgccagctggtagtatttgttacccggcagctgggggaagttgacccaggagatcttctcatgctgctgcagaaattccgcgacggccagggcattttcactgtgccggtcgatgcgcacatgcaggctctccaggcccaggttcagcaagaatgcgctgtggggcgagagcatggggccaaggtcccgcataagctgggaggtgcatttggtgatgaacgcgccgcccaggccgaagcgctcagtgtaggtcacgccgtgatagctctcgtccggcgtgcagaggccggggtatttctcagcgtatttcgtccagtcgaatttccccgcgtcgacgatgcagccacccagggccgcgccgtggccatccatatacttcgttgtcgaatgggtgacgatatccgcgccccaggcgatgggctggcagtggacgggggtggcaaatgtgttatccacaatcaggggaacgccgtgggcgtgggcagcgtctgaaaatttttcaatatccaggaccgtcagcgccgggttggcgatggtctcaccgaagaggagcttcgtattgggccgaaaggcggcgtccagctcttggcgggtgcagtccggggagacgaaggtgacgtcgatgcccatgcgcttcatcgtcacggaaaacaggttatacgtcccgccgtagatcgacgccgaggagacgatatggtcgccgcacccggcgatattgaacgcggcgaagaaattggccgccatgcccgaggccagcagcatcgctgcgctgccgccctccatctggcagatctttgccgcgacggtgtcgcaggtggggttctggagccgggagtagaaataacccgtgtcctccaggtcaaacaggcggcccatggcctcgccggtatcatatttgaatgtggtgctttgaataatgggaatctggcgcggttcgccgttcttcgggcggtagccgccctggacacaggtcgtctcgatccggtaatcgttcattgatagctctccttttctgcgcatatggaactagaaaaaacgcttaccccaagggagcccttgaggcaagcgcggttttgcacttgcgagtcattacgccggacggttccccgcggcggcaagggcggcagcgccccgcacctttattatatcggcgtgagaaaatgttgtcaaggattttccagggtcatatcgtaccacaccgcgccaccgtgtacagacgccgagatgccctgtgctgcaaagccgaagcgggcgtaatagccgatcttctctgccttgcaggtcagcgcgatgctggcaagccccagcgtgtgggacgaggcgatcatctggcgcagcagcgccgccgcgacgccccggcgccgaaattccggcagcacggcaaggccaaagatcatctggtacggcccgtccggcacatgggcgccagcctcaaacatcgtatcatcgatctgcggccggtctgaccggcagctgttgaccaagccgatgatacgcccggcgctgcaggcgacgaaaaaccgatccggaaactgggcgatgcgccacgcaaagctctcccgccttgccgcctccgcgggcgggaagcaggctgcctccacggcggtgacgccgtccagatcctctggcgtgacggggcggatggtatactcaaacatcgagtcgcaccagatcgtccagcgtttcccgccggatgacgacagtatctcccgccgagctgagcatgactgtcgctgggcggcccaggcggttgtaattcgacgccatggcatagtgatacgcgccggtgatcgctacggctaggatatcgccgcggcaggtcgaccggggcagcagcacatccggctggatgatatcgtcactctcacagcagcggccgacgacgtctgccttaaaatcggcttcttccgtcgcacggctggcgttgtagatcgtatacggcgcgccgtacagggcgtaccgggggttgtctgtcatgccgccgtcgacggagacatagctcttgtaacccgtgatgcgcttgaccgttccgacctggtaaagggtcattcccgcgtcggccacgatgctgcggcccggttccatcaagaatttcggcgtgggatagccaagctttttcgtcagcgccttatagtgcgccgcgacctcccgcagccgggcgccgatgtcgatgggcccgtcggaatcgagatagcgcacgccgtagccgccgcccagatccagctcacgggctgtgtagcccagcgtttcgcgaatttccgccatatacggcagcatgatatccagcgtccgctggtagacatcctcttcaaagacctgggagccgacatggcagtggaagcccgccaggtccagattcggcagcgacagcgcatgctcgatcatacccgtggcctggcccgtctcgatggcggtgccaaatttggaatccaccttgccggtgttgatggcgtcgtaggtgtgggggtcgatgcccggggtcagccgcagcaggatcttctggcggatgcccgcctgcccggcgatgacgtcaatggcgtccagctcctctcggttgtcgacgacaaagcagccgacgccctgggcaatggcgtaggcgatgtcctcgtcggtcttgttattgctgtgaaaataggccgtcgaaaggtcggacccggcctgcagtgcggtataaatttcaccgctggagacaacgtcgatccccagcccctcctcggcgacgatccggtaaatgcccttgaaggcattggccttgctggcatacagcaccagaccattttcgccgaaggcctcccggaacgcctgggtgtagattcggcagtttttgcggatcctcgtctcatccatcaggtacagcggcgtcccgtatttatgggccaggctggtggtatcgtaaccggcaaagacgatatgcccctgttcgttaaccgtaatattatcagaaagcattgctgcagctccttcccgcagcccccgcggggctgtatatttttccacgatattacattaagaagaatcatagcatgtccagaatagaaatgcaagtattttctctcgatttcagcccgggcgcacgccgggaatattcacagaatattcatttttctttcatgattcggccataacctgcccgtataattgcagcataagatcaagagcgcaaagtcctattgatcttaccgacgcaagtcggttccttcctttctttttctctctcttctttttgttaggcaaagcccggcggaccaatggtgcgccgggttttgtctgttcgtcccggtctgctgtatcgcggcctgccggggcgggttttcacggcatagcaaaagccgccgcgaactgcaagttcgcggcggcgtggtgacccgctggagattcgaactccagacccattgcttaaaaggcaattg

SEQ ID NO: 791 - DNA, 21312 bp, Unknown
  16S sequences of unknown bacteria
actgcgtgttcatttcaagccctcttattgcaacttgtaactcatctaaaatttcttcgtactccatttatagtcacctcctaaaggattatacaatataaaactttgcagaaactatgagagcctcccttggagcattatacatcataaaatagcgcaatataccaacgattgttggttttttataattccacattccgcattaaatttaactgtttacttttgttctgtaaaatgctataatataatccgtgacttaaatgtttcacgtgaaacatttacagggaggaataagaatggggaagataatcgccgttgttaatcagaagggcggcgtcggaaagaccacaactgccgtaaatctcgccgcgggagtaggcattgcgggcaaaaaggtgcttttggtagacgccgacccgcagggcaactcaacaagcggctttggaataaacaaaaaagaggtaaaaaccacttcatatgagcttttaataggcacgggcaagcttgaaaacgccatagtaaagacggaatataaaaatgtagacgttgttccgtcctcaatggatttagcggcggcggaggttgatttaattgaaattgagcaccgcgaggcgcagcttaaaatgacccttgccacgtcaagggataaatacgactacatatttattgattgtccgccgtccttaggactgataacgataaacgcgcttaacgcctgcgacacggtgcttgtgccgatacagtgcgaatatttcgcgcttgaggggctttcacagcttatggcgacggtgcgtcaagtgaaaaggctttacaacccgacccttgaaattgaggggatagtgcttacaatgtatgacgggcggcttaacctgacgggtcaggtggtaaccgaaattaaaaaatactttgccgataagctttataaatcggtaattccgcgcgcggtaaggctttcggaagcaccgagctacggtatgccgatacagtattacgataagcgctcaaagggcgcggcggcgtatgacgatttaaccaaggaatttttgaagaagaacaggagaagataaaatggctgcaaaaaaaggcggactcggcagggggcttgactcccttttcaacgaaaacgcgaccgacagcgacggcgcggtaaaattaaacataaacgagattgaacccaaccgcgaccaaccccgaaaggactttgacgagcagagcatttcggagcttgcggacagcattgcgaggcacggacttatacaacctattgtggttaagccaaatgcaaacggcagatacagtataattgcaggtgaacgccgctggcgcgcaagccgcattgcggggcttaatgaagtgcctgttataataaaggacgcggacgagcagaccctaatggaattagcgcttatagagaacctgcagcgtgaggatttaaacgcggttgaagaggcgctcggctaccgctcgcttattgaaggctacgggctgacccaagaagaggttgcaaagcgaatgggtaaatcgcgcagcgcggtgactaacgccttgcgcctgcttgcccttaacagcaccgaactggaggccttgcgccgcggcagcattactgcgggtcatgcgcgcgccttgctttcgtgtgatgacgaaaacacgcgctctaaaatgctgcttgccgcagcggacggcgcatctgtccgtgaccttgaaagaatggcggcagccgcaaaaaaggcgaaaactgcggctaaaaagcccgcagagcctaaaccgaccttttatagcgaggttgagctttcccttaaaaacgaaatgcacagaaaggtacatataaatccttccggcaacggcaagggcacgcttacaattgaatttttaagcgacgacgagcttgccgagtttgcgaaaaaactatcggaataaatgcactcatgccgtgtgggcaccctatttctgtgcggacagaaataggggaaagaaccgtcggaaacccttttgattgggtttccgaaccttcctgaacaaccaaaggggcaaactcccctttggaaacccctactgcgcaagggtacagtaggggcaaaagcaaaacatatttctaaaagggagaagaaaaagtgacaacctataacccattttatgcacgctcttttggcacgttttttttcttgttggtagtagtttttgttatagtatttataattatttacgacaataaaagaactaagaaaaaaagagaagaacttcaacgcaaaattatgatgttggatagtaaaaagcccgaaactgtaggtaatgatgaagacatagaaaaactaccgtacaggcggaaatttttgcttacgaaaaacgagtactggttttataagagtcttaaagaaatagcggataaatacgactttgctgttttggcgaaaattcgctttgctgatttggttgaggtgagtgccgaggcggacaaaaaggaatatatgaagtatttcggcaaaatcaagtcaaatcaaatagattttattctttgtaaaaaggataatttatatcccgagctgttgatagagttaaatgacagttcgcataatactgaggacagaataaagagagatgaatttataaagaaaattgccgaaaaagtaggctacaaaatggtatttgtagacggcacgcaaaaccttgaagaaacgataataaaagcacttgaaattaaaagcgaaaacaataacgacccaccgatagatgagaattaaaaaaacaaggtaaaacaacgcggaaggtaaatgtgttgggaataagggcgtatgcgcgaagcgcatttattccacattccgaattaaaaaagtgaggatttttaaaaatatgtggtttatattatctttggttacaattatgttttggggcgggtcggatctgttttcaaaaatgggctccgattcgaccgataaatacagtcattggaaaatagtagtcgctgtgggtacggttatgggtctgcacgcgacatttgagctgctcacgggggcaaagttttatcccgtggactttataaaatattcgcccgcaataatctgctatgtttcctcaatgattttgggctatgtggggcttagatacataatgctttcggtttcttcgccgatatgcaattcatcgggtgcggttgcctgcatactttgccttgtgtttttgcggcaaatgcccgatgccttaagctgggcgggtatagtgcttgtgtgcttaggcgttacggggcttgcgttcgttgaaaagaagtatgacgaagaggcgcacgccttagccgataaagcggaaaacaaaaaattcaaatcgggctttattgcggtattcttcccgattttttattgcctgcttgacgggctgggcacctttgccgacgcgatactgcttgacaagggaatagtcggcgaggactcggcaaatattgcatacgagtatacattctttataatgggcattgccgcgtttatttacgtttatgtaattaaaaagcaaaaaccgagctttaaatgggatttacccaagtggctcggtgcaggctgcgaaactgcggggcagttcgcctatatttacgcgataggcgataaccccaccgtggcggcacctatgatttcggcttactgcgtgttctcggtgctgctttcccgcatattcttaaaggaaaagctttcgtttaagcattatttaataattttcaccgtctttgccggaattatacttatgggtgtttccgaggggctggcggaataaaatggtgggctgtcgggtaaaaccggcagccccagctttattaaaaaacaatgaatttttaaaaaaagtgatgacacggcaaggaaaaaatggtatactaatctatatatgtttaaaagggggaagtatgccttgaagctgctcgcgattgacggcaacagtattataaaccgcgcgttttacgggataaagctgctcaccgcaaaggacggcacctatacaaacgcggtgtacggctttataaatattttgaaccgactgacagagcttgaaaagcccgagggcgttgcggtggctttcgaccttaaatcgcctaccttccgccataaaaaatatgcggagtataaagcgggcagaaagggtatgcccgaagaactggctcagcaaatgccgattatgaaagagtggctgaccttagcgggctatacctgcgtagagtgcgagacctacgaggcggacgatattttaggcacgcttgccgctctttgcgaaaagagcgggaacgagtgcgttatagccacgggcgaccgcgattcattacagcttgtttccgataccacaagggttttgcttgccgcaaccaaaatgggcaagcccgaaattataaattacgataaagcggcgctttttgagcgctacgggcttaccccgcatgaaatgatagagcttaaaagccttatgggagactcatcggataatattcccggtgtggcgggcgtgggcgaaaagaccgcaaccgaccttataacccgttttcacagcatagataatatttacgaaagccttgaaacgctggatattaaagagagcgtgcgcaaaaagctggaggcggggcgcgaaagcgcgtatttaagccgcgagctcggcaccatatgccgtgaggcccctataaataccgatatttcgcactacaaaataaaaccgcggaacgacgcggaattagcgcgccttatgacccgacttgaatttttcaagcttatggaaaaaatggggctgaagcccgataattcgggtatgcagctgagccttgatatgtcggataaaaagagctttaaatttataaaaaacgccgaaattaagaataaggcggatatatatattgcggacgaaaaaatcgcggcggcatcgggcgatacggtcacggtaatttccgacggtaagcttgaagagctgcttaaagacggcggcataaaaaagcgtgtgcacgactttaaaaatttaagcaagaaatactccgatattgcaggcgtgcgctttgatacaatgctggcggcgtatctttgcaatccctcggcttcctcctatgcgaccgacagaataattgccgaatacgcgccctatgagcctgaaattgagggcgaaacggacgaatttattaaaaacgcctgccttttctcgcttgcctgcgatacgcttgaaaacgagcttgaaaaaacagggcaaaaaaagctttttgatgaaattgagctgccgctggcaagggtgctcggcgaaatggagctttgcggcttttcggcggacgtaaacgggcttaaagccttatcaagtgagcttgatacccgcataaaagcgcttgaaagcgagatatattcgcttgtggggtatgagtttaacttaaattccccaaagcaattgggcgtggcgctttttgaaaagctggggctgcccgctaaaaagaagaccaaaagcggctacagcacgggcgcagaggtgctggaggggcttaaaaacgagcaccccgcggtatcgctgctgcttaattaccgccagcttgcaaagcttaaatccacctatgccgacggcttgcaggactgcatagcagaggacggcagaatacactccacctttaaccagacagaggcgcgcacgggcagaataagctcgcttgagcctaacctacaaaatattcccgtaagaacggcggagggcaggcggctgcgcgagtatttcaacgcgcccgcaggcagagttctttgcgatgcggactattcgcaaattgagctgagagtgcttgcaagtatgtcgggagacactaatatgataaacgctttcggcagcggaacggatattcacaccgttaccgcctcgcaggttttcgggctgccgcaggatatgataaccccagagcttcgcagccgcgcaaaggcggttaatttcggcattgtgtacggaataggcgcgttttcgctttcaaaggatataggcgttacaagggctgaggcggacagatacatcaaaagctatttagcggcgtaccccgacgttgcggcgtatatggaaaaagcgattgaggacgcaaagaaaaacggctacgttaccacgctttacggcaggcggcgctatatacccgagctttcaaactcaaacgggaatatgcgggctttcggggagcgggttgcaagaaacgcgcctatacagggcacggcggcggatattataaaaatagctatgataaaggtatctcgcagcttaaaagatgaatttcccacggcaaggcttattttgcaggtacacgacgaattgatagtcgagtgtgacgaaaaggacgccgagggcgtgtgcgcgctgcttgaaagagaaatggaaagcgccgccgatttagcggtaaggcttaccgccgaggcgcatttcggaaaaacttggttagaggcgaaggcttaaatgaagattttattcgtttgcgccggcaacacctgccgcagccctatggcagaggggtatctccgctcaaagcagctgcccggcgttacggtggagagccgcggtcttgcggcgaacggcgcgggggtaagtgttaattcacgcattgcctgcgcggaaaagggaatagatataagcgggcatatatcaaggcagataaccgcggatgacgcagctgcggcagataaaattatatgcctttccccctcgcacaaggcggcgcttttaagcgcgggtgtgcagggcagcaagctgtttttactgggcggcggcatttccgacccatacggcggggatattgaaatttacagaaagtgccgagatgaaatattcgcggcgatagataaactgatatccgacggcttttttgccgattttaaaatattacctatggagcagcgccacacggcggctgttgcaaagcttgaaaaggactgcttttcagagccctggagtaatgatagcatacgcgaggcggcagagcacggcaccgaatttttcgttgccgaaaatgcggagcacctgctcggctacataggcataaagccggtgcttgacgaagggtatattaccaacgtggcggtttttccgcagtaccgcaaaaagggcgttgccaccgcgcttataaagcgggtgtttgagctggcgcgggaaaaaaagcttgcctttgtaagccttgaggtgcgggtatcaaacagcaatgcaatagccctttataaaaaagcaggctttaaagaagaagggcggcggaaaagcttttaccgcgacccgcgcgaggacgcgcttattatgacgaagaggttttaattcttttatgaagatattagctattgaaagctcctgtgatgaaaccgccgcggcggtcaccgaggggcgggaagtactttcaaatatagtagctacgcaaatagccgagcataaaatttacggcggcgttgtgcccgaaatcgcgtcaaggcggcataccgaggctatatccgccgtggcagatgaggcgctgaaagcggcgaatatcgggtataatgatattgacgcggtagcggtcacctttgcccccgggcttataggggcgctgcttgtaggcgtgaattttgcaaaagggcttgcaatgtcgcttaataaaccgctgatacccgtgcaccatttgcgctcgcacatagcggcgaattatatttctcattccgaacttaagcccccgtttctctgccttttggtatcgggcgggaacacggttttagcggaggttaccgattatacgaaatttaaaataataggcgaaacgcaggatgacgcagcgggcgagtgtatggataaagcggcgcgctgcttagggctttcttaccccggcggcgtaaatcttgataaaaccgcaaccgcggcggataccgataaataccccctgccccacccccacgtttccacgggcgagtttgatttcagcttttcggggcttaaaaccgcggttatgaaccttgtaaacaacacatcgcaaaagggcggggaaatagatgttcccgtgctttgcgccacggtaaggcagcgggtgtgcgatatgctgatatcggcaacgcttgccgcagccgagaaaacaggctttaaaacaatagcggttgcgggcggcgtttcggcaaacagtgagctgcgcgcaaggcttaaagcggagtgtgaaaaaaaggggcttacactttattaccccgagcttaaatattgcggcgataatgcggcaatggtaggcgtgcaggcgtattacgaatttaaggacggcaacacagcgggagcagaactgaacgccgccgctactatgccgataaattacagataaaaggagctttgtttatttatgggaaaaacacttcttatagtcaacccctgctcgggcaaggctaaaatgaaaaccgagcttttaaacgttgtgaacatactgtcggctgacggctcgcttgtcaccgtttaccccacaaaggcgcggggcgacgccaccgaatttgcagccggcgtaaaagaaaacgagtatgaaaaaatagtggtctgcggcggcgacggcaccttaaacgaggttataacgggaattatgcggtcgggtattgcctgcacgctcggttatattccctcgggcacgcttaacgagtggtcatcggggctgcaaatttcccgcagcattaaaagagcggcggaggatattaccacaggtaaaaaaatacgccttgatataggcaaattcggggataagtatttctcctacaccgcgtccttcggcgcgtttaccgacgcttcgtattccgccccgcaggatgttaaaaacgtgctgggtcaggcggcttacttttttgagggaataaaaagtctcggcaatataaagcccattcgcctgaaattcaagaccgatacctacgaaacagagggcgattttcttttcggcgcggtttccaattcaatgtcggtgggtggaatagtaaaatttgatgaatccgccgtaaagctgaacgacggcgagtttgaggtgctgctcatacgcaaccccgataatattttaaagctgcagcccataatagacggtattctgaaaaaggacttaaaccgcgagggcatagagttcttcaccgcaaaaaacattacggtaacgggcggcgcgggaatgtcatggacgcttgacggcgagtacgccgcgggcagcgaggaagtcaatatcaccaatctgcacaacgcaatagagcttatagttccgcaataataaaaagtttttaagggagttttgatatgttcaccagagatataggggtagacttaggcaccgccaatactcttgtttgcgtaaagggcaagggaattataatgcgggagccttctgttgtggcttacgatataagaaacgacgcggtgcgcgccgtgggcaccgaggctaaggaaatgataggcagaacgccggggtcaatagtagccgtgcgccccttgaaggacggggttatagccgatttcgacgttaccgccgcaatgcttaaaagatttattcgccaggcgctcaaaggctctgtcttctcaagagtcagaatggttgtgtgtattcccgcgggcgttaccgaggttgaaagccgcgcggtttacgacgcggcaaagcaggcgggagctaccgatgttgatttggtagaggagcctatggcggcggcggtaggcgcggggcttcccgtgtgggacgccgcgggcagtatggtagtagatgtaggcggcggcacaagcgaggttgcggttatttcccttggggatattgtaactgcgcaatcggtgcgtattgcgggggacgaccttgacgaggcaattatcgcctatgtgcggaaaaagcacaatttgcttataggcgagcgcaccgccgagcaaattaaaatagatataggctccgctaagccctacgataacgagacgtcggttgaaattaaggggcgcaaccaggtggacgggcttccgaaaaacgttattataacgtcggaagaagtacgaaacgccatggcggacccgatttcgcagataattgacaccgtgcggctgacccttgaaaaaaccccgccggagcttgccgccgatattatagaccgcggcataacccttacgggcggcggcgcgctgctgcgcggctttgccgagcttatcgccgaggaaacgggcatgccggtatctgttgcggcaaacccgcttgactgcgtggttttgggcaccgcaaagcggcttgaggctgacagcggctttgataactacgttttccgccgcggtaaacgtttcagataaaataattttggagggcgaaaaatgcgatttttctttcgcagccgtgggtttaaaataattgttgccgttgcggcggcgcttatagccgtttcggtaatatgcgcctttttcggcagcagaatgtcgccgcaggcggatattatgggcacagttaccgcgcccttccgctcggcggcggaaaaggtgaccggcgcggtttccgattttattaacgcctactcaaagggcgagcaattagcgcttgaaaacgccgagcttaaaagcgaggcagccgagcttaaaaagaagcttgccgagtacgagcaggcggtggagcagaacgagttttataaaaactaccttgaaataaaggacgatcacaaggactttaagttcacccccgcaaccctaatttcgcgcgaccgcgaggacccttataagggctttgttataaacaagggctctgtaaacggcgttgcggcacacgacccggttataaccgaggaggggctggtgggctacataggcgaggtggggcttacctcctcaaaggtagtaaccattttaagcgcggaattaaccgccggcgcgcttgataaccgcactaacgattcgggcatagtatcgggcacggtggagcttgccaaaaagggcgagaccaaatttttcaacctttcgcgcacctgcaatatcgccgtgggcgattacgccgtaacctcgggcgagggggtattccccgcggggcttttaataggcactatacagtcaataggcagcgataaatacaacacttcgatttatgccgatataaagccctttgcggatattgataaccttaaaaacgtcatggttataaccgagttcagcggacaaggagaaattgggaaataatgcggaattcataatttaaaattccaatttattttgcgctcgtgccgcgcagggcaccctatttctgtgcggacagaaatagggaaaagaaccgctgggaacccttcagattgggttcccagaccctcctgaacagccaaaggggcaaactccccaatggattcccctactgctcgacacttacaatttgataaaatattttagaaacacttaaaaaaggaggaatggttatgaacgaaaaacacagcgttaaagctgctgttataagcttttttctgttcgccctcctttttttgctgcattactccgatgtaataagcattagcattaaaaccgccacgccaataattcttttgccgcttttgtgcgcattttccattttttcaacccctgtggcagccgccgcaacggggcttgttttaggcgtttgtatggactccgccgccagcggcacgctttgctttaacgcgatagttttaatgctttcggcggcgctggtttcggcttcctcctcacgccttttcaaccgcaacctgcgttcggcggtgctgctttcgtttcttttaacccttttttattttgttctgcgctggcttattttttacgcgtttaccgtgagcgcgcaggataaccttacctatcttttgcactacgcatttccgagcgttatttataccaatgtatttatattcccgttttactttctttataagaagttaggctgattattgcctaagaaaggaggcagcttttaatgccgtttcagaaaagaagtcagacaaggcttaccgttatagccgtttttatggttttcgtgctgctgctttatgccgcgcgtatgtattcggtgcagattatccacgcggcggagtataccgataaaaacgatggcgccgcatctgtcagaacggcggttttaaaggcgcgccgcggcgaaattcttgattgctacggcaggcagatagccgtaaaccgcgatggctacaatgtggttttcaaccgcgcttatgttaaaaacgacagcctgaatgacgttattttaacccttataaggctttttgaaaagcagggcgttgagtggaaggacgaaatgccgctcaatatgaccgccccctacggctttaaggagggcgagagcacggacaagcttatttcaaagctgaagctggcgcactacgccacggcaaaaaactgccttgacgccgcaattgaaaaatacgaccttaaaaattacacacctgacgagcagcgcaaaattgccggcgtgcgctacggaatggatatagccgatttttcaatttcctacccctatacctttgcggaggatattcccacagagcttatgcgcaaggtttccgaggcgggctttatgctttcgggcgtatcggttgaggtggttccgttccgtgaataccccgatacatccctcgccgttaatcttataggcacggtgggtcccatattcgccgaggattgggaggaatacaagaaaaaaggctactcatatgatgataaggtgggcaaaagcggcattgaaaagtggggagaggaatatctccgcggaaccgacggcgaaataacctaccgcatagaccagaacggcaacattatttcaagcgaggtaacaaaggagccggtttcgggcaaaaccgtaatgctcacgcttgataaaaaaatgcagcgccgcgtgcaggactcaatcgcggccaccgttaaaaagctgcaaagcgagggcggcaccgcggttgcgggggcggcggttgcaatacacattgactcgggcaaaataatatgcgccgcgaattacccgacctacgattcagccacaataggcgaaaattacgaggcgctcaccaaaaaccccgcaaagccgcttaccgaccgtgcttttcagggcgtttaccccataggctcaaccgcaaagccggcggttgccgtggctgcaatggaaaacgggctttaccatgtgggcgaaacggtaaactgcgtaagaaaatacacctattttgacgattaccaaccgagctgcctgcactatgacggacccataacccttaaaaacgcgctggcaaaaagctgcaactacttcttttttgaaatgggcaagcgtataggcgcaacccgccttaccgattatttcaagcagttcggcttgggcgttgctaccggcgttgaggtggacgacagtaagggcattttaaagaaagccgacgcaaacggcggcggcgacaccttacagtttgcaatagggcagttaaacgcttttacgccgctgcagctttgcaattacgttgccaccctttcaaacggcggtacgcattaccgcgcaagccttataagcaaaatagtatcctatgatatgtctgaaacctttgacgaaagcgcacccgaggttatgaataaaatcaaaatatccgatacaacgcttaatgccgttaaagagggtatgctctctgttacagaggacggtaccggccgtgccgcgctcggcaactaccccataaaggtgggcggtaaaaccggtacggcacaggtaaacggcaaggcggaccacagcctgtttatagcctttgcaccctttgaaaaccccgaaattgcaatatcggtggttttggaaaacggcgcttcgggcttttcggcgggcggaatagttaaggatatactggacgcctacttttacggcagcggctcggctgataaaaatactgtgccttttaccgtgcttaactgattgacaaaaatatccgattgtgataaaatataggaaaagcgaggttttttaatgagtcagatttttgccgttacctcgggtaagggcggcgtaggtaaatccaccgtttcggcggggcttgcatttgcctttgcggggctttcaaaaaaaactctgcttgtcgatatggacgaggggcttcgctgcctcgatattatgctgggtgttgataaatcggcggtgtttgacctttccgatatacttatgggtaaggatatggctgacgcggtttataacgtgggcgaaagcggtaatttatttttagtgcccgcacctgctgaggttgggaaaattgacgcatttgccttttcgggctttgtgcgcgaggcggaaaaggaatatgacgttattatattcgattttcccgccggtatggatttttcactttacacctgcctgccggacggcacgctttttcttacggttgcagtgcccgaccccgtttcggtgcgggacgcggcggcggtaagcgaaaggctttcggaaatatcctgcatatcaaggcttattgtaaacaactttaagtaccgccttgtaaagcgcggaattttccgcaatatcgacgatattatcgacagcgcgggtctgagactcttaggcgttgttccgtcaagcgaggagctggcgttcctctcggttacgcacaggctgaaaccgagcggcaagcctatgcgggcatttaaaagaatagccgaacggctttgcggtgaaaatattttactgccgcagccgaaaaaaatataattaaaaaggggtataaaaaatgacaatcgcacttatagcacacgacgcaaaaaaggagcttatggtacagttctgcatagcgtattgcggaattttaagcagatataaccttgtagctaccggcgctacgggcaaaaccgtggcggaggctacggggcttaacatagttaaatttttaagcggctcgcagggcggcgcgcagcagatagcctcgcgcatcggctgtgacgaaattgatttgttacttatgtttcgcgatccgctcaaccccaagcccaacgagccggacgagcgcgcccttttaaggctttgcgacgtgcacaatattccggttgccaccaatatcgccaccgctgaaatgcttattcacgggcttgagcgcggcgaccttgactggcgcgagattgtgaagaataataaataattcccggagcatatatttatggcagaaattaaccgcgccgttaaaggcacgggcgatgttttaccggcagacagctataaatggcagtttgtagagggtaaaatgcttgaaaccgcccgcctttacggctttaacgagataagaataccggtttttgaacacaccgaggtcttccgccgcagcgtgggggatactaccgacgttgtgcaaaaggagatgtatacctttgacgataagggcgggcgctctgtcaccctgcgccccgagtttaccgccggagttataagaagcgccattgaaaaggggcttgtaaacggcgcgctgcccgttaaggcggcgtatgtaggcggctgctaccgctatgaaaagccgcaggcgggcagattgcgcgagtttcaccagttcggcgttgagtgcataggcgcggcgtctcccgcggctgacgccgaggttatagccttagccggtcaggtgcttaccgccgtaggtattgaaaaaatttcgcttgaaataaactcaataggctgccccgagtgccgcaagaattacgttgcggcgcttaaagactatttcaggcagcatattgacgaattgtgcgatacctgccgcgacaggttagagcgcaaccccatgagaatacttgactgcaaatcgcccatatgcaaaaaaattgcggcaaacgcaccggttgtgaccgattatttatgcgatgattgccgcgcgcactttgaggcggtgcaaaaatatcttaccgccgagggcgtggagtttaccgttaacccgcatatagtgcgcgggcttgattactacacccgcacggtgtttgaatttgtttcgggtgatataggcgcgcaggcaacggtttgcggcggcggcagatacgacgggcttattgcccaaatgggcggaccctccgttccgtcgctcgggtttgctatgggtattgagcgcataatgctgctgcttgaggcacaaaaaaccgagctgccgagacctgccccgtgcgatatttatattgccgctatgggggataacgcggcgcttaaagccgccgaaatttgcgcgcggctgcggcaggacgggttctcagcgcaaaccgatatttgcggcagagggcttaaagcacagatgaaatacgccgataaaactggcgcggaatttactatggttttgggcgataacgagcttgaaacaggtaaagcccgccttaaaaatatggcaagcggcagcgaaaccgaggtaaggcttgaaaaccttgctgacgagctgctttccgctatacattcctccgcacttgataatcttgcggacagtattttaaagcaataaatttttcaggcaatctttcggttgcctaagaggtgtttaaggttgaaacttgacagaatgaacggtatgaaacgcaccgactattgcggcacgctcacaaaggaaagagtaggcgcagaggtagtggttgcaggctgggtgcagcggcagcgcgaccttggtgggcttatatttgcagaccttcgcgaccgcagcggaatagtgcagcttgcgtttgacgatacaacggacaaggcggtttttgaaaaggcgaccgcgctgcgcagcgaatttgtggttatggcaaagggcaaggtgcgtatgcgctcctctgtcaataccgaaattcccacgggggatattgaaattgaagtaaccgagcttaaaattttgggtgcgagcgaaaccccgccctttgaaattttgcccgagaccggcgttaaagaggatttaaggcttaaataccgctaccttgacctgcgccgcgcgccgcttcagcgcaacattatgctgcgccacaaaatagctaaggtaacgcgcgattattttgatgaaaacgggtttattgaaattgaaacccccacccttattaaatccacccccgagggcgcgcgcgattatcttgtgccgtcccgcgttcacaagggcagcttttttgccctgccgcagtcgccgcagctttacaagcagctgcttatgctttcgggctttgaccgctacattcagcttgcccgctgctaccgcgatgaagacctgcgcgccgaccgccagccagaatttacacagatagaccttgaaatgtcgtttgtggaaaaagaggacgttttcgcggttgccgagggctatatgaaacgcctgtttaaggaaatactgggcgtggatattgaaaccccgctgccgaggcttacatataccgaggctatggaaagctacgggtcggacaagcccgatacccgctttgatatgaaaattaaggatatttccgatatagttgaaagctgcggcttcggcgtatttgccgatacggttaaaaacggcggcacggtaagagccgtaaccgccaaaaacgccgccggcgtgtacacgcgtaaggaaattgataagctgaccgaggaagtcaagggcataggcgctaagggtctcgcctttatccgctgggtggaggatgaacccaactgctcctttgcgaagtttatgacggcggacgaaatgaaagccatatacgagcgcacgggcgccgaaaagggcgacgttgtgctgatagtagccgaccgcaagaaaaccgtgctttcagttctcggcgctttgcgccttaccgttgcaaagcggcttgaaattatccccgataaatacaacctgctttggataaccgagttcccgttctttgagtataacgaagaaaccggcaactgggacgctatgcaccacccgttcacaaaaccgcttgacgagtgcatacagtaccttgattccgcccctgaaaaggtttttgccgacgcatacgatttggtgcttaacggcattgagctttcgagcggctctatacgaataaccgaccccgagctgcaaaagcatatgtttgaggcgttagggctttccgatgaggaggcatacgcgaagttcggcttcttaaccgacgcgttccgtttcggcgcgccgccgcacggaggtatgggcatagggcttgaccgccttacaatgctgctttgcggctgcgataatttgcgtgatgttatcgcgttcccgaaggtctcaaattcaagcgagctgatgtcgggcgcaccggcagaggtggataacacgcagcttaaagaactttccattaaaattgataattgatttaaaaaaagcaaaccaacggtttttaccgaggtttgcttttttataattcaatattttttgcgctcgtgccgcgcgggggcaaaatgctttatttatgcgccgcacatcttcattacaatactgtgcggcagcagctttgctataacgcggtaaaatttgtaaaacagcaagtttgtgtaaactccctttttgcgggcagatgcttcaagcgatttttttgccataacagcggggtttacacgcggcagtgtatcaaatgtgtggcttgagccgggggcaattcccgcaaccggcaaaaactctgtgtccataggtccggggcataccgccaaaacatttataccgcgcgggcgcagctcggcacgcagcgcctttgaaagacttaaaacatacgccttggtggagcaataaaccgccattcgggtattgggtgcaaatgcggcgattgagcaggtgttaataatctctccgccgtttttcatatacggcagcgataccgaggtcataacagttaaagcctcgcagttaagccgcaccataccgccgttatcggcgggggaaagcgcgtcaaaattaccgagtctgccaaaacccgcgttatttataagcagagctatttcgggcttttcttcttcaagcattgcggtatatttcttaatgctctcactctctgtaatatcaaggggtataattcgcacccgccggcttatctgctcggcggttttgcgcagattttcctccctgcgggctatgagccacagctcgtctatatcgttatacctttgtgcggcggcaaaggcatattcgcgccctaaaccggaagacgcaccggttataactgcaattttcaaaatcaacacgtcctttcgggttttattataacaactttgccgccgttttgcaaggaattaaaccaataccccggacatattattgaaacagggggcgaaaaaatggaatttttgaaatacggcggaatagcgctggcggcgctcggcggacttgcggtactgatttttgcatttaaaacaggcaagccccttcgggcgctgctgctcaatgcgctttcaggacttgccgtgcttgcgcttgtagatattacaacccgctttacgggggtacatattccggttaatcagtggacggcaggcatatcagcaggtctcggcgtgccggcagtgtgcctttttttggttttgcctgtaatgttcaaataaaaaaggaagacaatacaaccggacaaattttccgttatgggaagcattgtaccctgattgtattgtctaaacgaattttaaaatacgggatattgacaagccattaaagatgatgtaaaataatcagtgtatttaagccgacaggtgtagtatttatttgatttgtcgggcgccgcgcgtttaagtgtttatatgtgaggaaaaagtaatgaaatgcagaatagcggatttcaattttcaaattgataacatataccccggaacagagaaggcgtgcgcgcagtatttaattccggaaaacgagaagtgcgatatatcctttaaaattacggaaaaggatattgacgcagagattaacgacggtaatttttcaaggcattatctcgaatacatagcggtgtgcagaaaaatatccgaaacaataccgctgcacaatgcgtttttgctccattcggcactgtttgaggtggacggcgtcggcgtggcatttgcagcacacagcggcaccggcaaaaccacgcatatgcgcctgtggcagcagcttttaggtgaaaaaatggcggttgtaaacggcgataagccgataatccgcttttttgaggatgaacccgaaacgccatattcctacggcaccccctggaacggaaaagagaggctcggctgtaatatgcgcgctccgcttaaaaatatatgctttatagagcgcgcgaatgaaaactcttgcacgcctatggagaaaagcgacgcggtaaatcttatattcaatcaggtttatatgccggcgtctccggcggcggtggtgaacacggtagggctgatagatcgcctgctttcctcctgtaagctgtggaaaattcgctgcaatatggatatttccgctgccgagacggcatacgaggcgatttttgaaaaggaacctgcgctatctgcaagcgtataatatatacatataaaataaaggagcaagcagtatgaagctgaagtacaattttgtaacaaatgaggttgcggataaaatcgtagcggtggcagtcggcggcgaccttgaaaaattcaacggatttataaaaatgaacgataccggcgcctatattttcaatatgcttaaaagcgatgtgaccgaggaggaaatagtcgcggcaatgaaaaaggattatgaggacgcagccgaggaggaaatccgtgagaccgtcagcgagtttgtaggcaagcttaaagaagcggacgtgcttgaataatggcggaaaccgatttaaaaaacgttgaggagctgctgaaaacccgcgacgaggttatgacccgcacccgtggcataagtatgcggccgctgctgcgccagggtcgggatattgtggtaataaaaaagccgcaatttccgcttaaggtcggcgacgcacccatttacaaggtcaaaaataaaaaagaactggtgcttcaccgcattttaaaggtgaacgatgacggcagctatattattcgcggcgacaatcttttctttaaggaacacgtttttgaaaatcagatagtcggcgttatgagggcgttttacagagagggcaaatattgcgaatgtgaaaaaagccttaaatataaggtatatgtttttctcaacagaataagttacccgctgcgttgcctctggagtgtgcggctacgcccgctgctttcaaaaattaagcataaaatcttcaaatgaaaaaggggacattacggctcgcttttcaggctgtaatacctcttttttgcttattgcgccgaaaagctgaaaaacttttttaagttgagaggtcttttaaatacgtaaattccccaacatattgtgctgtttcggacaagcaaccaccaacgcaaaaaaactttcaaaaaaagataaaaaaagtgttgacaaagggggatggttgtgg

SEQ ID NO: 792 - DNA, 8176 bp, Unknown
  16S sequences of unknown bacteria
atattgtaaattttccattaaaaaaagtgaaatattaacctttcacatgcaaaaaaggggcgatttgcagggattagtgaaaggactttttcataccggcaaaaaatcctttcctgtcggccactctccccgaacaataaatcgagagccttttggccctaccggtcaaacaggggcgccggttttgcttttcgaaaagctcactcatctcagcagacctcatcgggcaatttgggggtctgccccagcgggaacctgcctcccatcagcaccttgaaaactaaataaaacacaaacaagcattgccgccgaagaccggttatccggtactgcggcggtgggaacagagtgtgattttttagctggcggtgggcccttaattaaagcggctcatggcttcttccggcttgccctgcatgatgagggtgcaggcttcggcggtattttgcagcaggggatacagggctttgccctccgcttcggtaaattgtcccagcacccaatcggccaggtcatattccgggttcggtttggcccccacgccaaatttaatgcgggggaaattatcgctgctcagcttgaggatgatatccttgaggccattgtggccgccggcggagcctttggtgcggatgcgcattttgcccaccggcaggctgatatcgtccgaaaggacaataagccgctccggggggagcttatagaaccgcatggcctcctgtacggcctgcccggaaagattcatgtaggtggtgggcttcatcagcaggatatgccggccatccagcatggcctcaccggtcatggcatggaagcgggagcgctccacggcggcgccgcagtccttggccaggacatccagcgcgcagaagccgatattatgccgggtattgccgtacttgctgccggggttgcccagcccgcagacgataaattccaccggaccatggaccgggattgatgctgcggccggctgttttttcttaaaaaatcccatatagcctccttgggagagaaacggcaggagagaacggttctctcctgccaaagcataccataaaaattcgggggaaatcaagtgaaaagcggggagacgggcttgtcctcatagatgcggctgatggcctcggcaaagacgggggcgacagagagcatcttgatgcgggcggcttcggagccttccttggcggggatggtatccaggaacactgtttcggtaatgacgctatcggtgaggcgctggagggccgggccggaaagaacgccgtgggtagcgcaggcataaacctccttggcgccgcccagcttgatgagggcttcggcgccgtggcagagggtaccggcggtatccaccatatcatccaccagcactacggtcttgccgtgaacatcgccgatgatattcatgacctcgctgacattggcgcggggacggcgcttatcaatgatggccagggggcaatccagccgctcggcaaacttacgcgcacgggtgacggagcccagatcgggggaaacgacggcgatctcctcgcgggggaggttcttgaacttttcgacaaaatagggggccagaatgggggtgcccatcaggtgatccaccgggatattgaagaagccctgaatctgtgccacatggaggtccatgctgaggacacggtcggcaccggcgacagagatgagatcggccaccagcttggcggagatcggatcgcgggccttggcctttctatcctggcgggcgtagccgtagtagggaacgacggcggtgatgcggccggcggaagcgcgcttgagggcatcgatcatgatgagcagctccatcaaattattattgacggggccgcaggtggactggacaacgaacacatcggagccgcggaccgattcctcgatggagatggagacttcgccatcggcaaacgcgccgacggtgcagcggcccagcggcaggcccatggcggcggcgatgtcctccgccagctttttgttggaattgcaggcgaagatcttgatgtcttttccgtggatacttttcatggtttttctactccctactgatgatattgaattttatatggtcaacaccgggtggtgtgtgttcccgtggggaagaggagcttttccggggagaaaagcgagcaaaagatttatttagggcgggtttgtgggcgcctggcggcggggcggagccttttgcaacggcatagtttgtaccgcttgccgcgggggctgcttttttcggatgaaagtgtgtaaaagaatttttggatcaagatggtggtcgccttcggcggggcggagtcaccggagggtgacagcctgtacgcctacccggcgagggaaagtttgttgtcgcctgtcggcgtcgcgaagattatgcagggtgcaaagccggtacggctcgccgccgaggcgttccttttgttcgtacaaaaggaaccaaaatacgcttggggctgtgccccaagaccccctaacgctcaagctgcggctggatacgaacgatgtaaacatcgtccgtacggcgccgcagatacgctctcaaggtgcctgcggcgcattttattttggagtttgcagggactgaattaaaaatcaaccttataagcgtcgtcgcgtcggacgcaacctccgcttaagtcggatcgaccctgcgctttgctccgggcagccctcctcgctgcggtgcatcctcctttccccacaaggtcttgcgaccttgcggggcctcaattacatggggcataccgacgcgttacgggtctttagggcggagccctgaatgacttttgcctacttttcttcatagaaaagtagggccccgccggataggcgtacgggctttgtaccctgcaaaatcaacgcgacgccgctaggcgagatgagactatcgccatagtttgcgccgtcaacccctcagtcagccttacggctgccagctccccttacacaggggagcctttggggtggtacggtgccacgccctttacacaagggaggctaagggttggcgcgctgccgatttgttaccccttacacaggggggcaatggggtgcgggagattattttttctcccggcggaagcggcgggccagaccgggcttgacggtctgctcggcgcgggcgatgagcatggcgtcctcggggacatcccgggtgacggtggccccggcggcggtgtaggcgccggccccgatggtgacgggggcgacgagattggtattgcagccgaggaaagcgccatcgccgatggtggtgcggaacttttccttgccgttaaaattggcgatggccacgccgcagccgaaattcaccccgctgccgcagtcggtatcgccgacataggtgaggtgggcaatggcggtcttttggccaatatgggagtttttgacctccacgaagtcgccgattttgcaccccgcggcgatgtggcagccggggcggacctgagaaaacggcccgatggagacattctcctccagggtggattcggtgatgtaggtgtttttgacgatgcagtttttgccgatgacggcatcggtgaggacactgccggggccgatgaccgagccggcggcgatggtggtattgccccgcaagacgcagcccggcaggatggtggcgccgggggcgatgcggacggtttcctcgatgaggatgccatcccacagagggatggaaacgccggaggcctccagcgcggtgagcagcgcctcgcgggcggggtcggttttgggcatggggattctccttttctgataaattaggagggggagggggcaccgcaaggcggcaagggctatgacccgccaagggcggcggcgggccgcaggccgcacagggacattatctatttaatattatgggctgtttggcgggcttttgcaaggggagaagcggctaaagagggagaaaaaatgccgccgccgggcgggaaaattaggcgttatccacagaggaaaggagagctttggcctgggaaggggggaaataaggcatttttgcagcaacttataggagaaatcctatgaaaacagaccgaaaatctatcaaaaaaactgtggcattcgcatgaaagcgtgttataataataacaatggtgccaatgcgccaatgtgccggacaggcatttcccccgtagcctgaccggagaatttaatttatccaaggaggacaacgctaaaatgtttgggaagaaacacgctgcggaaagcggcaagaaaaagtacctctatatgtttgaagagggcaacaaggacatgcgtgagctgctgggcggcaagggcgccaacctggccgagatgaccaatgccggcatgcccgtgccccccggatttaccattaccaccgaggcctgcacccagtactacaccgatggccgccagatcaatgaggatatcatggctgacatctttgtatacctggagaagctggaaaagaaggttggcaagaagtttggcgatgtggagagccccctgctggtctccgtgcgttccggcgcccgcgcttccatgcccggcatgatggataccatcctgaatctgggcctgaacgacgaatccgtacagggcctggccaagcagaccaacaacccccgctttgcttacgacagctatcgccgtttcatccagatgttctccgatgttgttatggagctttccaagaagcgcttcgaggagatcattgacgagctgaaggaaaagaagggcgtaaagaacgatgtggacctggacaccgaggacatgaaggagctggtggtccgctttaaggagttctacaagaaggaaaagggcgaggatttcccccaggatcccaaggtacagcttatcgaggctgtcaaggccgtattccgcagctgggataacccccgcgccaatgtttatcgccgcatgaacgagatcccctacgactggggcaccgccgtcaatgttcagtccatggcattcggcaacagcggcaacaccagcggcaccggcgtagcctttacccgtaaccccgccaccggtgagaaggcgctgttcggcgagtacctcatcaacgcccagggcgaggatgtagtagccggtatccgtactccctcccccatcagcaagctggcggaggagatgcctgaggtttataagcagtttgtggacattgcctcccgtttggagaagcattaccgcgatatgcaggatatggagttcaccatcgagaacggcaagctgtatatgctgcagacccgtaacggcaagcgcaccgctgccgccgccctgaagatcgccgttgacctggtggacgagggcatgatcaccgagaaagaggcagtgctgcgcgtagagcccaagcagctggacagcctgctgcatccccagtttgacgctgaggcgctgaagaaggccgaggtcatcggcaagggcctggcggcttcccccggcgctgcctgcggccaggtggtattcaccgctgaggatgccaagaacgccgtagagagcggcaagatgaagaaggtcatcctggtccgtctggagacctcccccgaggatatcgagggcatggtggtttctcagggcatcctgactgtgcgcggcggtatgaccagccacgccgccgtagtagcccgcggcatgggcacctgctgtgtttccggctgcggcgagatcaatgtagactatgacaacaagcagttcaccctgggcggcaagacctaccacgagggcgactggctttccatcgatggttccaccggctgcatttacggcgaggccatccccaccaccgatgcgaccatttccggcgactttggccgctttatgggctgggctgacagcgttcgccgcctgaaggtctttaccaacgccgataacccccgcgatgccaagcatgccgttgacttcggcgctgagggcattggcctgtgccgtaccgagcacatgttcttcgagggcgaccgcatcaaggcggtccgtgagatgatcgtggcccgcaccgtagaggcgcgccgcgccgctctggccaagatcgagccctatcaggagggcgactttgaggccatgtacatggtaatgggcgagcgccccatgaccatccgttacctggatccccctctgcatgagttcctgcccaccaaggaagaggacattgtggagatcgccggcgagctgaacatgagcgtggacgagctgaaggccgttatcgcttccctgcacgagttcaacccgatgatgggccaccgcggctgccgtctggcggtttccttccctgagatcgccgagatgcagaccaccgctgtgatcaaggctgccatctccgcctccaagaagctgggcaccatgatcactcctcacatcatgatcccgctggtaggcgaggtgaaagagctgaagttcgttaaggatatcgtagtagagactgccgataagctgattgccgaggcaggcgtggacatgaagtacgaagtaggcaccatgatcgagatcccccgcgcggccctgaccgccgacgagatcgcgaccgaggcggacttcttctccttcggcaccaacgacctgacccagatgaccttcggcttcagccgcgacgatgccggtaagttcctcaattattactatgagaacaagatctacgagagcgatccctttgcccatctggaccagaagggcgttggcaagctcatcgagatgagcgtgaagctgggccgccagacccgtcccaacctgggcctgggcatctgcggcgagcacggcggcgaccccaccagcgtggagttctgcgaccgtgtaggcctggactatgtttcctgctctcccttccgtgtaccgatcgcccgtctggctgccgcacaggctgccatcaaggccgggaaataagccgcaacagaaaaacgactgcccccatccgggagaccgggtgggggtggttttttgctttgcgctgcgggggagaatttgctataatgaaaaagcaagatacacaagaacaggagaaacggggaggagcggcccatggcggagcagacaatgaccaaaaagaagggactgaagaaaggctggagaatcgtgctggggattctggcggggttgatcctcctttacgcggtgctgggggtactgccccggcgggagaactatgccctggcgaacccgatgatgaaggagggcgcgctgccgctgctgatcgcccacggcggcgggaataaggagttcccggataatacactggaggctttctataatgcatacagcgtggataaaaatgcaatgatggagaccgatgtttccattaccagggacggggtggtcatcctttctcacgatacgacgctggaccgcaagaccaatgtgaccgggcggatcatcgactggaattacagcgacctgatggcgcagaaggtggactttggctacaccaaccccaccgaggagatgcagctgagcggggagcgggtacgctttaccgatagggacggacggcaaaagactccggctgatgtggagtaccctgatggggtgacgccgagggacgaggaggtcttcttggcgacgacactggaggagctgctggcggccttcccgcagaaccgcatcaatgtggagataaagcagagcggagagaccggcatgaaggccatgagggaggtgctgcgcctgctggagcagtacgatgcttgggaccgggtggtgctggccagcttccacgatgagatatacgaggagtaccagcggctgcaaaaggccggggaggtgccggagagctttatgtgctcgccgggggtaggcggcgtggcaaagttctaccttttgcaggcagtgaacgcggatgtgttcttcggcgaccagatgtgcgtattccagctgccggtgaaggcttccatcctaaacctggcgaccgaggcctttgtaaagcggatgcacagccacaacctggcggtacactactggaccatcaacgacccggaggagatgcggtatctcattggaataggggcggacggcattatgaccgattacccgcaccttttgaaagaggtttatgattcctacgggaaatgagcaaaagtggagagcccccatccgggagaccgggtgggggtgcttttgcggggtgatgttgggggcgagagggggcacagcccccgccgccgcaggcggcggtagtggcgggcccatggggtccgccacttaggcggcgaag

SEQ ID NO: 793 - DNA, 32759 bp, Unknown
  16S sequences of unknown bacteria
acagcttgtctatattaccatatctctttccctcttgtcaactctttttatctacttttttttacttttttcgaggttctttcgttttttatatttttctttaataatttgatgttatatataataatgtatatgaaatatcagaataaaaaaattgaaatatttcttaaaaatgtacatagaatttattgacaaaactcaaaagatagtttataatatatcatactttcggggatatggctcagttggtagagcggtacgttcgcaacgtacaggccacgagttcgaatctcgttatctccaccaaacgcgacagagtttgaacaccaagaagaaaatacaatatattttcgtcagcggtgtcgcgggctttgttattgaaaaaggaaagagcaatgcataagcgttgctctttcctcatatatacttgtcaataattagtatatatgatataataaacctgtaacatataaacttgtatggtaatgggtaaaacaacaaatgacggaaaaagaaataacattaattaattatataaatgataagattaaaccatattctctaacaacatctgctgaaaatgatgttattcttttgttaaagaaatatacattgtcacttttaattgaatgtgtagatattagtctatctacatatatctcttacggtaaagagggaaagccaaatcaagattccattgacgaagcgatacgaaagataggaggtattgcatataataaatctttatcccctattgatcaagcaattttacatatctgcaatgcaggagcaaagacgtattcttactgggacaataagaaagcaaaagctttattacatcaatatgtaaaacacttgtcaaaacattgggatgagcaagatattgaacaagaccttaaaacagaagtaatggatttatttgcaaccaagtcaaattggtcgcagtggacttcacaaatcgattcatggattgatgatattattggatgggataaaccttcaaatacgccagtaccagaggaaacaattttaccaaatgatttatttagtaaagcaccaaggtttcttgtaacaattcaacaagaaataaacgccagctatcaatatggtttatatgactgtactgcgattatgatgcgtagattgactgaaatcttattaatacaagcatatcgtaaaaaagggatagagtcagatataaaaaatgaagattactatataaatttagacggtatcattaaaaacgcaaatacaaatactgtattagatttaacagcttctacaaaaaaagacttaaaatctattaaggaatttggtaatttatctgcgcatagaatattatttaattgcacccaatcagatatagatgcaattaaaatgaaattcagaactgttattgaggagttattgtataaagctcagattatataacagttcgattagggataaaagcaatgcttaaaagtattgcttttattattcttatagaattaaaacggtatatccccgtcgtctgcaatctctatgagcgtaggcggcttttttaattctcccgtgaatttgtttacgggaatatctttgcttttgtcaaagtcatataccgccgttatccgtcggcaaaacgccgcccacgttttcggctctgattgctgtatattcgtatattgctctttcaatgagaggttagaaacgatatacacggtatcatagcaagccacgcggttatagtgccgcccgcgtatgcgtatcggctgcccgtccagatagtccagtatctccgagattttgaacgaactgcggaactcgtcaagaaacaatatcttttcgccgttgtaatcgtctatccagccgaactcgtaatttgtcgttcggtacacgtcatcgtagccgtgtttttggaaaacataacttgtctttccgcaccccgcagagccgtatatgtaataaactttcatattacgaaacacccgcttgaacttgttttccaagtgcgattgcctgtattcctttgcccatttcataacacggataaagcggttgccgtgttttttggaaaggtcgtaaaaactcattccgttttctatatcgtgcataatgtcggtaaggtcggtgcgttcgccgtcctcgataaattcgccgtattcatagtattgcgggctaatgcgcgtttcttcgtccatacagtattcacgggcttgtgaacgcttgccccgccttgcctcgatatgcgcgtcaacgcctatatgctcttttgaaaggtacttttttatggtggtaaaccacttcggctgtgtaaactcaaaatatccctgataatgttctgtacccgtttcgggagcgcgttcccgctgaaagaccacatagcgcaagtcctttacggtttgcaggtactccataaattcttgttcggtttgcacggggttatttatcgtaaagcaccagtcgcgcgcctgcgaatttctttttgtttcggtcgtttcgtccgatacagataaatctattttaatcttatcgtccataatacccccgcaaagagtgaaaatgtgttacacgttacggggtggactggtaatactaagtccacccgcgcacacgggcggctgtcgccgcccgtgtgttgcccgtttggttacgacgggtgcagaagatcggcgggcaaaacgtaaatgagcgtttcgctttttcgttttctccgttcttccgcttgccgccgtttctgctcccgccgcaataggcgaaaatctttgataagttcctttgttacaaactttgtgttcttgtttagaataccgattttcgctttatagtcgaaaatcacgtcgtcagtgatttccttgaaaaatcgcggcggcagttgcgtgttgctctctttcattgcgttgagaatgtctatattctcgaagataagcgcaagtttttccttgtgcagttcggcaaagtctaatttctccataggtcaaccgccttgtcaatatctttgttttcctctttcgggaaaagcggatagcgttcgcaccgcgcgagcatagccgccttattgttgcccgtaacctctgcgggcgtggtatggtagttgcccgtcataccgttgtaaaagtattccttgccgctgaaactatccacgcaattataaatattcccgtaatgcgtatatgtctttttgacggctgatttcgcgttgtccgtatctttatagcgggcatattgccgcacgcccgtaaactccaagcaatgccataccgttttaacgagccgcccgtggcggtcgtaataatcgcgcttgccttgtacttctatgagcttatccgcaagggagcgaaagcgtttatccgcgctgtcgtctatctgcgtgtcagcccacatctgaacgccgacttttctttgccgttcgatataccgcagaaaataatcggctacccgttcggcggtcattgatttgcggctgtccaatttgctttgaatttcgggcagaaagatttttgcatacggcagtaaatagcagacctcgtgaacgccgtcatacagcccgattttttcaaactgcaattccatagacacgcgcggcatatatcccaagccccgtgcaatgaaagtatcgtccacgacatagacgaggtgttgaacgtgcggggcaagcgaaagattatcccaaccgcccgcacgcagccgcgcgatctcctgtttgcataagagcaggtcgctgatcgcgcgcggcggtatcatatattcgcaagcaaaatgcgcgagtaatgttgttttgcctacgccgcgctccccgacaacgtaagtcagataatagattttttccataggctaccccgaaaagagaaagggagcgaacgcgcgcgcccgctccctgcattgtattactgtttgcctttcgtcgatttctttgccgccggtttgggcggtgcggcgggcggtgctgccgcttcgttctttttcagattgtcgtagatgaaaaaggaatttcgcctgccgatattccccatatgcgcgtatgcgctccgttgccctttgcgataggacttgatttcgttcggggtgaattgctttgcgtattcctttttctgttcggtggtgtacggtacatattttttgttttcttcgctcattgtctttttctccttattgtctgctatgctttcagactttgaaaccataacgagaacgggcgagccgtctgcggcttttgcgtaagtgccttgataccctgcggggattttggggtttgccataggttacgcctttttcgctccgtcgttctgcgccgcctttgcaatgagcagttcgacaatggtattcgttgcgcggggcagaaagtaaaagtattcgtcgtcgttgaacattttgagaacgacggcgatatattccgcgcccgtcttttcgcttgtgcggcgttcgagcgtaaaactcttgaacggttcaacgcccagttcggtacaagtttggataagttcgacgacttctttgtcgcaccatacatcggcggaacgcccgtttacgagttccacgcggacaaagtaatttttgccaccgcgttttgcgggctttgcaacgattttgatttccttgactaccttgttgagattttccattttttactctccttgaaagatttttatttgcaacccgcgccgaccttgcgcaccgatcggcgcggggtatgccgaaaagattttagccgcgtttttccttgattttctctattatcgctttgattagtctgaacggcgcggagataagccaccaaagccccttgaatatccaaactatcaatttgccgataaagccgatgattgcagggaaaaacattatgagcaggaacagcccgacgataacgcccagcacgatgagcagaatttgccaccattccaagccgtcggggatatacacgggcggcgttatgtcgttcactatgtcgatagggtcagacacggcggggataaccgtatatgcgccgtccttttggaaagaaagctgtataatgtcaaagtccaaaaatacgctctcccaagcgcgataggcttgccctgtcgtgtgcttgtcgctccataaaaagcccttgcccagttcgattatatcgaccgccgcagaatagtaatcggaagtcgcaaagcggaataaaacgacgaccttttcttcgtcggcggtcaaggtgtcaacggtgattgcctcgttgtaataatcgcgtagggcggacacgtcgtgcgggttgattaagagccgttcggagatttcttcgtccgtgccgttcaaatcgtccgctttcagagtgtagataggcgcaacggtgcggctttcctcttgcgggatattgcccgtcattgcgttccataagccccagtttatccagttatcccaaaaggacgggtctgtttcctgccagctcgaaagcgtttgcaagtccacgtcggcatcgaaatcgtaatagctataacctttttgtatcttgccgtactgcgtgtcgattttgcggtattcgtctatatcgtccgcaaataagtccgcacttatcgttccgtccttgactggcagcgttccgttttcatacgttttgttatagccttttatccattcatagagcgcgttgctcgtgataccgccgttttccactatatccgcgtaggggtcgtattcgctgatattgtccgtcttgaacagataatagagcgcgggcgcgggaacgtgcaaatagccgctccccaaattccaaccccaagccgccatattcataccgccgcccgcgtcgcccgcgttctgacccaaactgtaatagatttcctcgttgtattcggtcattccgaattggtcaaacgcgcccgtctgcctgccgagccacggatatgctttgtcgtagaagtcctgattgctcgttacgactatatctttcgtcttgtattcataccattccgctttgatacgttgcagtttgccgtaggtatcgaacagccgtttgggaacggcaaaatataccgtgtccaactggttctgatagcccgcgcccttgctcgatgtctttgtgcggtaataggtatgccgcacgttgagcttgaccgtttccaattcttccaccgaacacagcagattgttttcggcgttttggtctgttccgtagccctttgcgtagcccgtgaatttgtaagtaccgcccacgccgtagtcgcgcgcgttgtccgcgcccgtttcccaaagctgtatgcccgcaatgtcgtaacgccgatagccgttgtcgctctcgtgcgtgcgggcgttccgtaaaatcgcgccgtcctcgtctatgatacggaatttatagagcagtttggaataatcgcccgtcgctatcccgcacagtttgagcggcacgttcgcatagtcgcagggggtgccgtcctcgtcatacgcgattgccatattgacggtatttgcgccttgccgctccgagatcgcaagccgcgcggggttgtagatatacacatacagcgcgtaattttccatattcagcgcgcttgccgaaaagcagtattccgcgagcgttacgaactgaatacttccgtttttgtcgtaaacgaattgcgacaggtcgtattccgacaaatcgtccgttacggcggtatcgtcgaaattgttttccgtattttcggcggcaaggacagtattcacgggcgcaaatcccgcaaataccgccgctgtcatcagcacgaacagagcaaagaacaggcacagcccgtgtttgattttttccataccgcgcccctaaaaaataattgccgactggtctaacgaaatgccgactacttccgcattgatatagaagtacgtttccagactttcttcgcccgccacaaccgacatacgaaagataggcacgggcggaaattcgtccgtctttacggtcattccgttctgaatacgggaaagcacgtcgttcagcccgtagtgcgttattgtaaagcccgtttccgtccgcgcaaagtcaaagcccgccgtgaggtttcgtccgtcgaaatcgccccaagtgtacggctcttcgcctaccgttaaagcaaagtcgttttcctgcgtgcagtaggcgtatatttgcacgtcgtacttttccgcgttttcaacggtaaattcctgcccgctgtccagtaagcccaaagagccgccgttttctatcttcgtgccgttcagatagagggaaaacccgttgccgccgacaacgggaggacttccgccctgcgtgaaatagaagtacaggaacacaccgacgcccgcaagcaaaaccacgaccaacagcacgataagtatgcgtttgagttttgccatacgctaccccttaaaagacgatacttcccttatcgacagaaatggaatttgtcgcggcaaacagactgtcaatattgataccgattttgtaccacgcatcacaatcgacaaaagtatcgctgattgccgatgtagatttgaaaatgccgagtctaaacacgttttcctcgccaaccgtagttgccgccgcccgcatatagctgattgaagtatcattcaatccgatactgccaagcaaatcgttgaatacgccttgcccagccgctcccgaatcaaaatcatattcgtgtgtatgctcgtattcacttccgaggttggcgcggttcatttttcgtgtaatgtctgtcgcagacccgtttgcctcgttatatgcggcaataaattcgtccgtaaaggcaagcccgccgatgataagttcgtcaaagccgtccgagccttgcccgaagtaactttttgagccttccgaaaaggtgtagtccaaatctgctaaaacggtatcgaataaatttactttcaaattgcaggtttccgtagaaagcggcgtgccgtcaatggaaagtccgtttacgataagccgctgttgataatccaccgtacaagtagccgttttttcagcgtttccgcgcgcttttgccgtcaatataatttgttccgaaaacggctttacaagcgttaccgttgccgtaactgcgccgtcctctgcgcttaatgttacatagtctgtaacggtctttccatttgcccatgaagaattgccgtctttccacgaaagcgaccaatctgctttttgcaatgccgtaataagaaacgtattcattgacaaaattagagggttttcgacagtatatctgtacttatataataagtgcgaacttgtaaatgaatttagccaatgatataataaataataagacaaactttaaatttgagccttacaaaagtttttgcttgtgcttaaccgccttgcgggtatttatcgccgccttgcaaaatgttcaagggcggctatttatctcccgtgaggcataaaccgccgtcgccttcggcgcaaacccttgacattttcctgcggcggcgggactgtctgattaaggcggttaagcacataagcaaaaaccgaaaataaatttaaggcgcaccccgcgtcgaaaggagcaaccgcaatggaaaatgcagttatatatccccgttacagttcacgcggtcagaacgatatgaccatagaggggcaaatccgtatatgcacagagttcgcccacagcagggggctgaatgtaatcaaaatttaccccgaaaaagcaaaaagcgcgtccaaagacacgcacaagcgcaaggctttccaacagatgttacacgacgcggaaagcggcgcgtttcagtatataatcgtttacaaatttgaccgtttcgcccgcaaccgctttgaaagtatgatgattaaacaccaactcaaagagaaatgcggcgttaaagtgttatcggcattagagccggtaaccgacgacgagggcggcgaactgtatgaaatgttcgttgagtggaacgacgaaaaatacagtcagcggctttccgtgcgtatccgcgacggcttgactaccagcgtagaaaacggcacgttcacgggttcaaaactgattttcgggtataaactcatagacaccgacaagacgggcaaaaagggtactatacataaagttgctattgacgaaaaacaagccgaaatcgtgcgtttcgtatataccgaatatgccaaaggcacagacaagaaagacatagccgccgcgctcaatgcacggggcgagcgtttcaacggcaaaccattcaaaggcagaacttttgacaggtggctgacaaatgcgaaatacacgggcgaatattacttcggcggcaggctttgcgcaaatacctatcccccgattatagacaaactgctttttgccgaggtacaaaagcggcttgctaaaaataagattttagcgggcgcaaattctgcaatagagccgtacctgctcacgggaaaagccttttgcgggcattgcggcacggctatcgttgcggacggtggcacaagttgcaacgggaaaaagcactattattacgcttgcaaacagaagaaaaaaggcttgtgctataaatcgcgggaaaacaaagacaatttggaaatgcaagttgcccaagcggtcaaagactttttgagcgacaagcggaacgccgaccgcgccgccgctgatacgattgcatattatgagcaacgcacgggcgatagcggattgcggagcgtagaaacgcgcataacgcaagcgcaacaagaagttgaaaacttgacgaatgcttttattgaggcgaaaagcgcattgctccgcgcgggcattgaaaagaagatgcaggactatgaaacattgcttgccgacctgcaagcgcagaaatcgcaaatcgaattagagcgcgggcggcaggtaacgaaacagcagatactcgcgttcgttgccgaacttatcaaaggcgaaccgaccgacaaagagtaccagcgcaaaattattgataaccttgtgtttatggtctatgtctatgacaatgagattgtaacctatctgaattttggcgttgacaaaacgattgagcgcgtgcggcttgacgaaacaaacgcggcaatagaggacttgaaaaatgttcaaactctttccccgctactccaccaaatcaaaataatccgaaccttttgctgaacggcgattggttcggattattttttgtcaaagtttatttcctttttagaagttatatcttgtgataattaaagcgatggtaataattcagtcgtttttgggtttacctttatcccgaaaaataattatttctacgatacgccacacaatatccaaagccgcagcaataaagcagacatttgccccaataatatgctcatagtgcagaagaaaaaaacctcccgttatcaacgcaatagctataactacgttgatgcaaaaaactgcaatcttgcccgcccttgttcctgtcgcacgctctaccgatttatcaaaacggtctgccgctgcttcaatgcgcttctctgcctttgccgctacactttctacacgttgttcaaaatgcgcggccgcgttgtcgatagatttctctatcttttcttcaaattttcgcttatccataacttacctccaatatataaaccgaccgtcggtttttatatttgtgaaaaattactgccgcattgcgggcagttttttatttttttaacatttgattgtatgtaataaaaggttgggcaagttcttcaagttctatatccgcgccgatgcgattgagaatagaaacgagcacttcgcaacgtgaacgtatctcttgatttgtggaaggtaaaagaagcggattgagccataaactgataagcagcgatatatattctgccgtttgacggggatatattatatcgtgcaacgtaccgtctaaaataccttgttcgagaataggctgcacataggcaggcgcaacttctttcaaaaggctctccacctgcgtcgccaaaaacttgggattggaaatcatatacgtctgcatgggaacaatttcgtcattgaccgtatttctgagggctgcggaaaacaatgctttcagtttctctttacccgtcattttttcattatcccgaaccttggaaagcaacagctccgtcctcttactcgtattttcacaaatttttatgaaaatatcctctttagacgcaaaatggtgataaattgctcctttagaaagcttcgtttcatccataatatcctgcaaagaagtcctctcaaaccccttcgctgtaaacagcctcgcggccgtctccaatatcaactttacggtttcttcaggatatttgtttctcgacatcacttatacctctcgtttacaaaccgttggtctgtatatagaatagcataagaaaaagcatttgtcaactattttgagtaaaaaattcctgataataatttcagttaccaaaaagatgtactctcgagggaatttcaacagcggaaaaattttttaagctaaaaaatagcgttacaatttctacttgatagtaaaatttagcagttcaaaaagttcatgaaatatttttattctgcaatagattcccgcaaaatttcctctttactgacttccccgaaataaataaaccattcgtaaattttttctattagtttctgtttccaacgataatatgtgctttccgataagggaagctcttttaatgtcattctatcagtatatcctttaataattttactcgtaatcattcttataactaacggttccgtttcataatgaagaatttcttctatacatattttaagtttataaacttctggttttaatagcaaccgtatttttcgccccgaacgtcctattataatttcttttgtattttctgttaacttatctttaattttccaataaatgcgtaaataacttctgatttctttttttgtcatttttttcttccctagtaagttttttttgagggcgttattgcttaacgccctcaaaggggcatatgccccttttttgtttgttttattattttcattatactattattttttgtaaaaatactgccagatttttttatatttttcaccgttcaataaaaaagcttcaccttaattcaaaggtgaagcttttttattttttatgttgtttatatttacatgttttgacggatggttcggataaaatattgccgtagatgtcgaaacgagagccatgacaaggacagtcccatgtctttgtatcgccgttccattttaattcaccatgcatatgaggacacattcgcccgaggacatataattttccgtcttcgtcgcgatataccgcacgtctttttccccgataaaaaacaatcattccttgcccgggaaggatacccgacgttctttttattgtaaaacgaaaatagccgagaaaaatttccgaaatattggtgaacgcattggaaataaatggaacaaaagctctctttatcctccttgacggagaaaacaattcggcataaggatccccccgttctaaaattgcgtccgtcaatatcgaagcacaaaccatggagttagtcatcccccatttattaaatcccgtcaccacgtaaatatccttcaaattttttgcatatttacctgccatgggcataccgtcgaacgtcataacgtcctgagccgcccaacaattcgtgatattaaccgatccgaattgtgtctttactcgttccgttaacttttcaaatttcccatattttcctattcttcccgttcgatgatctattccgccgaacagcgttccttcgcggaatggccttacggacagcccctccgcacgttcttccagccacattccttgcgaacatttttccttgaccgctatcgtataagaggtcgattgccgcaatttcatgatataatttccgtggggattaataatcggataatgagtagctacaataattttttttgccttgacgcacccgccgcctgtatacacgagcttattgactacgtctacctttatcgcgcgcgtattttcatatatttcaaattcaaccggaagagagctcaaaaatttcagtgggtcgaacagatactgttccgtcattttcaaggcggtcgctttttcaaacggagcttcattctgcacaatctcgcagtccgcgccaagggagcgcaaagtccggaaaagctcgtctatttttcccggttcctctacggaaaaaatatatccgtctcttttctcaaaatcgcaatcgatatcgtaacggcggacaagctcttcaaattttttcattccgtcaagctgcgcctgataatataacagagcgacggattccccataacgccgaaccaaatccgcataaacgctcccctgattggctgaaattttggcagtcgtccgtccggtcgtccccgaaaacagcctgtccgcctccaaaagggtgacgctttgtcccgcctccgtcagtctgaaagccgttaaatatccggcaattccgccgccgatgacgacaatatccctgtcgatatattcttctaaacgcggatattcctttgccgttgatctccaaatcgattttaatttcatatttcgccttaccttatagtttaccccgaaataaggccgtcatacgaaattcatttcgatttttctctgcattttcgatttacaattttttgaaataagaaatagactttttcagatcctccgtacatttgagctctaaaaggcaatctgcgccgatccgctcggcagtacgcttataaaaggccgcgtctatctttccctcgcccaaacaaacgtgatccttttttacgcctttttcctcttctctgacgtcgtgaatatgaaattcttttacgttgtgaaaacttgtagcttcaaatatttttctcggcaaattcgagcacatttcatcatgtccgatatcgaacacgaaaaaaaagccgtcctttttcagccgttcatacgttctttccatatacggcacagtttttgaattttccaatgccaaacggacgccgttctttctgcataactcgcttacacgaaagagcattttttccaatctctcggaatattcttcgaattccttttcatagacataatgctttacgccgccgatcgtgacgacaggtccctctatcaaatgcacgaccaatgtggaaagtccgtattccgaaacgggtaccatgtatctttccaaaagtccgaaataactttccgccacttcttcataggtaccgaaatctgcctcgtcaaaaaaatgcatggtcaatcccaagccatatttttgagtcagttcggacatcaaagaaccgttgcaaagttctttacggcaataggaaaaattcagattgagttccacaaaatcaaactcattttcctccgcaaaggaaaaattctcttcgagacgatcaaattcatacaggacgggcataccgattttcatcggatcaccctcactttatagacgttctcgatctttgaaagcgacgaaacgacgcttgaaggatcggcctccgtatcgacgacggtataagcgcggtcgcccttgctgcggttggccatattgacgatgttgatctgattttttcccaagaccgccgccagctgtccgatcatattgggaacgtttttatgcaaaaccgcgagtcggtatccccccgtcagccgtccggcgtccagcgtcggaaaattcacggagttgcggatacttcccgtttcgagatattctttcaattccttcaccgccatgaccgcacagttatcctcgctctccgaagtggaggcgccgagatgaggcacggcaatgactccgggcaccccgtgaatcctttcattcgggaaatcggtcacgtagcgatggacttttcccgacacgagcgcggcgcgcatatcctcgtcattcacgaggaggtcgcgggaaaagttcaggatattgactccgtccttcatctttgcgaacgtctcggcgttaaagagatatttcgtactttcgagcaaagggacatgtacggtgatataatcgcactccgaaaaaatctcgtccaaggatttcaccgttatcacgctattttgcaaagcgagcgcatgctctatggaaagattgacatcatagccgtaaacggtcatgccgagggaaatggcgctgtttgcgacgagcacgccgatcgcgccgagtccgattacccccagttttttccctgcgatttcctttcctgcgaaggcttttttgcccttttcgacggctttcggaatatctccttcaagagtctcggtccaatggattcccgcgacgatatccctgctggaaagcagcagcgcggcgatgacgagttccttgaccccgtttgcgtttgcgcccggcgtattgaatacgacaatgcccctgtcagaaaacttttcgaggggaatgttattgactccggctcccgctcgcgccacggccagaagagaattttccgcctcggtttcatgcagggagctgcttcttaccaatgcggcgtccgctgccgaaaaatcctcagtaaaggtatatgcgtcatccagctgtttaagcccgcaggcggatattttatcgaaacatttaattttataggtcttacgcacggccgtgttcctcctcaaattttttcatgaactccacgagcttttccactccttctttcggcatggcgttatagatgctcgcgcgcattccccccaccgttctgtggcctttgagatttacgagtccctctttcgccgcttccgaaacaaacagagcatcgagtttttcattccccgtcacgaacggaacgttcatcaaggaacggtctttcttgacgacggtcgggcggaacagcttatcggaatcgagaaaatcgtagagaattttcgctttttcttcatttgcctttttcatcgcttcgaggccgccgcggcgtttaatccactcaaacacctttccgcagatataaattccgtagcagggcggagtattgaacatgctgttttcctttgcatgaacggcatatctgagcatggtaggcgtccccgacagaacgtcgtccgtgatgagatcctcccgcacgataacgacgaccgtacccgccggacctatatttttctgcgctcccgcaaaaatgagtccgtatttcgtcacgtcgaaaggctccgacaaaaaacaggacgacatatccgcgaccaaaattttccccttcgtgtcgggcagatcgtgaaattttgtgccgtaaatggtattgttttcgcagatatagacataatccgcctctgaagaaacgggcaggtcggaacaatcgggaatataagaaaaatttctatcttcggaggaagcaaggatattgacttttccgaaaagagcggcttcctttgcagcttttttcgcccaaagccccgttaaaatgtaatccgcgacgcggtttttcatgagattcatcggcaccattgcaaattgcgtgtgtccgccgccctgtaaaaacaaaatcttgtattcgggaggaatcttcgcaatctctctgagaacggcttctgcctccgagatgattttcccgaattctttgccgcggtggctcatctccatgacggacatgcccgtaccgcgatagtcgagaagctcttcctgagcctctcgtaatacttccaaaggaagttgtgccggtcctgccgaaaaattaaaaattctgttcataaaaacccccgcgatagaaaaaagtatttgtattattatattatcaaaacacaaataagtcaagtaaatttttttatttccttataaaacagctttcataatagagaatgcaagtaatgccgccctataagggtggcattacttgcatttcgttttgcataaatttttattcagttctatttcacattcacagagagtaaaaatcctctccaatgagcgtttttaatagcacctgtgcataaacgcgatgcatgtaatcattgggatgatttgtgttggaggatgtagtatcttgaaaacttttccgtaacaatagttccttatgaatcgttgttacgtccgcgacacctacactttcccacttttcctctgcttcaagaagagctcctacataggattcgtgataatttctcaggcacgtattttgctgatatcctaccttatcattaggaagcatgcttgtgacaactacaatttcggcttcaggacagcgcttttgaatatttttgacgatatttttaatattggcacaaaatgttgcagcgtcggtaacgactccgtcgttcattccgaaggcgagtacgacgagatcaggattctcgtcacaaacttttatataatttgagtattgcatgccccattcgctggtttctccgctttttgacagattaactcggaaaatttcagccccgtatttatcttcgagataatccatcgcaaggtcgcagtattttggacaatacggggcgcgatcgacttccgcaagggcggtagatccccacccgtaagtgatactgtccccataaaacactgctttaatattttctccacgggaaagcttttcgttgagccggggaaagtgctcgcttttagattccggaatagaaatagagctgttttccgaatgcgtatatgtgacagccaagcaccaagccgacattccgggattatcctttgtcgtctctgcaacaatataagcacccgtaggagttgaggccggaatttgcgtctgcaatccatcgtccgtatacgtctcgaaatagtattgttcgtacggaagaacgggaatttttccaccgccaagaatccgcaatgttcccgcctccgtaacctcataatcctttccctcctcatatttcaccgagaggtcggcgctacgcacggaaataattttatcgattggataaagcaggggaataggttccgtctgtccttcggcattctccttgacaaaaacgccctcggcataagagacttgtccttcccatatcggagcagtatatttttccagctcaaacgttgtcaaatcataatcttccaaatctatttcagaagaatctgtcgatgaaggaacactcgtcgaactttgggaaagagagtccgaatgagaggggctattttccgaacctccgcaggaaaccatggggaacaataaagctgctcccaaaataaaagaagtcatcattgtaaatcctttggattttttcattattttcctcctttccactatatttaaaagcgatgcctaattaaaataaaagccaaacccaaaatgacaaaaatccctgccggcgacgtaaaagaaccgcaaccggttgagctctcccccttttcctcttctccgaaattatcttccggtaaatattctacgcgaacaatgttgctcaataaccaccaatttcccgtatctccccgaagaatgatttcggcataatctcctttatcctgccatgcaaaaatttctgcctgtatctccgtccttgttccgtcaaaattttctatgacggcgggtaaggtaaatccttccttggatagttcggcttttttcacggcaggtaaattttccgcagtcaagctctctgccaacgcgccgcaggataccgcatcattgtttgtaattccatatactccgtcgcgaatagcagtctccacgtccgtttgagtggaatatgtccaataagccggaggaaatcctctttcgagaaaatcccgcattaaatcgggcaaaacatttccgtaagacatgtctattcccacatttttttcacacaagtcgacgattgtctttcctgtatctttatccggattattaaggtctatcgcccaaagataaggaattttttcccttatggacaacaactggtttcggtcaaaagaaatgacgacgattttatcttccattccgtattcttctatcttactcttgaatacctccgcaaaatttccggccgacgtctttatctcaaaaaataacactatatctttatccttgcaatacgaaaacaaatcgtccgccgtcggtatctccgattcttcacccgtcagttgattcccaagatttcggataattttatagcgctttatctcctctaacgtcatcgaacggatatttccgctcccgttcgtcgtgcgcgaaagactcgcgtcatgcatgataacaatttgattatctgcgctcaaatgggcatctacttcgagatgcgtagctcccgcctcacaggaagcgataaatccctccatagaattttcgttataatggaacgggtctccacgatgcgcgatattgagaggtgaacggggaatcgtaaaacctttcgtctcttgtagttcctcatatacttccgcgattttattcggattttcgtccgtcaccagaccaaaagcgccggaggcgattccctttcgtatctcaaaatcttccgcacaatccaatttcacccaaaccgccttcatacgggactgaatataactaaccgtattcctgtccgcctgcgacgaggacaaaatcaaaaataacgctcccgcttcgttcgattcccgaaccgcttcggcggggcggattatcctgcgggcagagtaatccaaggccactcgaaaataagggattctctttctcgccttttttgccaattccgccgtaggtgtaataatcgccgcatctgtaagctccggattttcctccgcatatccgacgagcgccgaaagctgctgagccgtcgatacgtaaaaattgggaatcactttaccgtccggctctgataatgcgagttcgagcgattctatcactttttccgaagcgtccaggacattaaggttttcatcaatatagtacagagcgttcgtcgctgccaattcgtcgttatccgcagagacataatacagattgcgtgcgtccgtcatttcagccgcaatggcgggtgcagaacgaaggcgtaaaaaggagtagtccactgtatcggaaaaattatatttttccgcaatagcctttaccctgttgttttctatttgagctatactcataaaagcaaaagatagagaaagcaaaaacgtcaccgcgaaaatacacaaaaagtttcttttttctcttttattggaatattcttttttccacttcatttgcgttttcccttcgtcgaattttccttttcaaacagcattatcgccgcgcaaagtggcttttccccgaggctgattctcactgttccatccctttcgacaatttcgacatttccgtaagaggacacaaaacgatattcttcggaagggaattctaccgttctttccctttcattatatgaaaaggcataacagagcagtctatctccgtcggcactttttctggcgagtcggacaagtcctttcggatgcctcaaagaagtaatttcgtcggtatcgataagcaccgtttctccgtcgcggataatttctttaattgtctgataatattccacgcctgaccggacaatagaaagaatcttttccgatgcagtgagaatatttccggacagacaaattctacccagcatggctttgaccatcgtaaaatacacctcatcaggcgtatattcagagagtatgcttgcccaaatttgcatcgtgcggggttgcatgacccgatgaaggtccgccgccacaactgctccgtcaaaattttcgtgtgcatcggaaaaggaaaccatactgcccaaagtctgaaacaaaggttcatggcgcataccacccgacgagcaaatttccataaccaattcaggaactgcgttacgaagtgccttaaaaaattctacaacgcgttcgatatgtaatctaagcccttcaccgggactttctgctccatctgcgcccattccgatattctcgttataatctattttgatatatttaattttattttcattgagcgtatcgattacccgacgtttaaggtattcggtaacttccttttttcggaaatcaaaaaacatgcgtccgccgtggtcgattacgagaccgtcctctttcagcagcaaatctctcctttttgaaatttccgaaagcgcagtaactccttcaaattcataccacaatcctcctgccttaaagccttcccgttcgagttcagatgagaactctttcagacctttcgggaacctcgttttagaaacttcccaatctcctaattggctatcccagctctcgcaaaaccaccccgcgtcgacgacgaaatattccgcccccaacgaacgcgccgccttcatctgcgggcgcagattttccatcgtgggattgccccagctatacagatattcattataaataacagggagagaattttcggataaaggaaggttatatctcgtctcctggtattttgtaagcgccgcacacgctttcgtcaaatctcccttcaccgcagtaaaaaagacagaatgggtacaaaaaacttccccttttccaagtttttttcgccagtgtccgaaaagataatccgcatgtccgcccgtcagagtaattccgccgtaacggtgcagagcttctatttgccaggaatcgggcgcctccgtttgcaccgcccaagtgacggagttctttttgtcctccaaagccataaacgggatatacccgcgcgcaggcatagatccgactgcgccgattttatgtatccgaacgccgagcgaggaccaagagtcctcaaaattgaaatgagaaaccggagtgctttcctttcttccttctccggaccaattactttgcaggcaatgtaagacgagcgtttcggggtcgttttcttcttcaaaaggagtaagtgcggaaatcgcaaatgatgaagcgagctctatcgtcgtctcctctccctcattttctatctctgtcctgagctctgccgctttgtagccttttctttgcgtaagaatatgccgagccttcaagccgtcggaatttttaaggagcgtgattatctctcgttttgactcgtcctcaaaaacctgctggttataaggaataaaagaaaacgcagtggagctatcgtacagagttgctccggcagagaagtcccgacggggagaatttcccgtacgggcaatttgtaccatgggctctatttcgggatatgggtgagcggagttaaaactcttatatagcttcctctctttaatattgcctgccgttccttcgggaacacaagtaaaggacattactccgtcccgaattgtatagattgccgtcataccctccagaggataacagatgatttgtcgtttttgaaaatccataaatattctgcctttaatgcccaatttttcgtaagatactatccttttttggaaagtgtattgatttttatatacttttcctcagtccagcccgatgttccgataataaatttcagcatatagtcgtcactgcggttttcttccgtcagcgtctctccgtttttagagacattgtcgagataaaacgtcccgaatctcgcccccggattttgtaaatccaattctgccagccgaagtaaatatcccgtagcataagtacaatgcacattcttaatatagacttcgtcaataagttttccttgctgtttaagctcacaatttatgacggcaggagaataacatcggtaaatctcaatattttcaaaacggatattttccaccttgttgaaatgatccccgagctgtatcgctaatgcaccgattctctcgtcccaatccgactgtgcaaatcctaccgaacaatcgataaaggtgacatttttcacatcgtgattcgtctcccagacgacaccataccccaagcctttatccgtccagcaatcgttatcgcggaaagtaacgttatccgtatatccctgcgccgaagtcgatttcgtctccatcgcatcgtcgcccgtgcgtacaaaacatgcggtgacctcggaatctcgacaatccgaaagcataattccgtctgaatatgtccgatacccgaataacatacatcgagataccgcgacattctcacagtccgtaaaacacagagtccaagtattggaattaatcgaaatcactccgtccactttgatatttttcgttccctgaaaatcaaaggcccccttctttttggcatctcctcccatacaggcagaaaaatccactactccgcgcccgcaaagcttcacattctcagtacccgacgaagtccgaaagacaggagaatattccccgtctccgtcaggataaacttcaagataagctcccgcctccaaatatacctcggcgttcgaaggaatactcacggaatctataaagtgtcgtcctttttcaaaatagtataccgtattttccgcctcaaaagtcgtttctgccatggtatgttttttcgcttccagacgctgaatttcccagccttcggggacagagaattcctcatattccgcgagatacagcgtcaaggcctcatcgccttttttgttaaaagaaaaagtaaagctcccaaaatcggaaaggcgagcagtcacttccttttccgaaatctctgcctccactccccgcttttgtggcaatacggttacagagggctcccattcggaaaaaacagaggattgttctctcgctgtaagcttgacctccacttcaaaatttttactttcatccgtcttttttatgtccgcccaagcaaaggaatgaacgctctttgcgcatctcgtcgaatacacgggcacctcttcaccgccaatagtcaaagtataatagggacttatgaccataccattcttcaatggtccgtcgtgactcgccgctccgtccgatacctcagacgcatagcggccgacatctttgatctccgaggcgtcgaaccataatcccgaaatttcacagttaactctttctgccgcctcagaaatggacgcattctccccctccttacacgcggcgggaaaaagcataattccggccaaaataaatgcccaaaacgcttttattcttttcatgaaaaattttccttactcgtctgagagctgattgatttttatgctggactcgctgaatcgagctccatcgtcgagggcaatattagtatattccttgtaattatcctctgtaatctgtattccggcataagtaatattatcgagataaagtgcccctatcgtactgttctgccatgttgccccttctaaaagccgaataactacactcagacaatatacggggagattcgtctgctcgacgtattttgccgagatattttcaaaatagatatctttaatttttcctccctctgaagcattattcgcacgattgaatatacttaaaagggaacaggaggttttatatacttctatgttttgaaaatgcacgtcctcccaagtggaagttttgaccgaacccatctgaatgacacagcaaccgagatgctcgctccaagaagcctgtgcaaagcctacagaattatttctaaaaacgacgtttttcacatcgtgttttgattcatagatacaaccgtaggcgattcctttatctgtccaaacacagttattttcaaaaagaaccccctctgtatagcaatcggagtcattggaatcggtaaaagcctttacctccattgcatcgtcgccggtacgaacgaaacattctcgagccgtactgtccttgcagtcggaaaacataattccgtccgaatatgtccggtaagaaaagaacatacagcgggagacatttatatttttagaattattgaagcacatagtccaattatgggaattgacggaaatcaatccttctatgtccataccattcacctgggtgaaactgtaagctccctttgtctttgcgtctccccccatacaagcggaaaaatctacgagtgcacgtcccgctatttttatattttcggagccattggcagaaattgctgcaacgtagtcgtccgtcccttcttcataaatacgcagagaagttccccgttcaaaatagagaatactgttagagggtaaagaaatcccagaaatatcataggctccgctcttgaaataatagagcgtattttcatcgataaaagtcgtttcggcctgagtatattctcccgcctcaaatgtccgtgttgtccacccctctggcgcggatatttctgaatacggagccacatataacgttaacgcccgatccgctttctcgtcaaaagtaaaggaaaaacttccatattccgcgatcgtagccgagacagtatcaccgttcagcgtcgcctttacccccaatttttcgggcagaaccgtaacggattctttttctcccgagagcaacttcacctgtacgtcgagggcaagggggccgtctgtctctatatctatccatgcaaaggagtgaacgttataaccgcaccgcgcggaatagacagggacttcttttccgttgacagtcagactgtgatatactccttcgacaaatccataatctaagggaccgtcgtgactggcaccgttcggctgtttcgtttcattgtaaaaggtttccatatccgtctgcgtctttacctccgagtaggaaacgggataaatttcgcaaaaggtagcaatctccgaagagctgtcaggtgaggacgactctccgccgtccgaggaggaaacggagggcgaactattcgtcccgccaccgccgcaggcggaaccaaggagcaaacatattgctgtaagcgtcgagaataatgctgttagttttttcataaattattgcttctccacttttccaactaatatcaattctctgtaagcgtattgatatgaagatatttctccatatcataaccgcctactacgttgtcgtaaatataaccgtcttccttgtaattttccggtgtcaaaagaatatcgttcgatacgatattatcgagatataaatcatagataaaacaattttcgctgtcataagtacggacgttcaggaacgctccgtaattcctgcgtgcggtgatatttttgaaatagatatttttgacaattccgtagccttctccccggcctccgcttccgcctatatatacgttcagcagtccatcgttatgggacatgtagacttcaatattatcaaacgtaatattttccatcaccgcgccttttctgttccccatctgaatgacgcagcagccgagatgattgctccatgtaccgagggcaaatccgaccgaacaattttcaaaacgcacgtttcgggtatcgtgattggattcataaatacagccgtaagcaacagccttatccgtccaagccgcgttgtttcggaaaagaacgttatcggtaagcccatttgcagttgtcgatttcgtttcaaaagcgtcgtcccccgtgcggatgaaacaatcctcgacgatggcgtttttacagtcggacagcatcactccgtccgcgaatacccgataggcaaaaaacatacaatccttgaccgaaactccttcgcagtcgttcatgcaaagtgtccatgtctgagaattgataaccgtgattccatggaatgaaacgtcgtccacctgattgaaaataagcccgcttttattgttggaatacccggccggaacctctcccccgcaacaggcggaaaagtcgaataatccccgccctgcgaccttgacgttttttcctgtccccgctgtgagcgctgcattagatccgccgctttcaggcggcattacttcaatataggcaccttgttcaagatacaatatgctatccgacggcagagaaataatgtccgtcttatatctccctgccttaaaataataaacagtttcgccctcttggaacgcagttcccgatttcttctccactgaggaatagtcccccggctctatatattctatcgcatattctccaaaaagctcctccgtgtcttctttttctgccacaaatacggtaagcgcttcgtccggttttttattgaatgcaaacgagaagctcccgaaatcccgaatgacggaagttaccttgttttccccaagctctgcggtcacccctgcactttcaggcaacatgacaacactcggctgacgatcggaaagcaccgaacctgcatccaataccgtcacctccgtatttaaggcaaactcttttgctttgtctgtcacctccacgtcgatataagcgaaagaatgtattccgttggcgcttctcgtagcatatacaggaacctcttctccattgaccgtcagcgtatagtaagggctgtaaattactccatcggatacgggtagattcgttgacacctctcccgcataattggaaatatccgaaatcttttctattccttcatatctcgtgggataaatacggcaattcgcttctatcggcgttatgcctccggaagatgctgaatcgctctccgttatgcctccgcatgcactccctccgagtacaaatacaagactgaagattaaacaaaccgacttgggaaatttgttcatacttttcctccttaaaaattccttccctgtctttcaggcaaaagcccctttattcttttaccgaacctatcattactcccttaacgaaatatttctgtaaaaagggataaatgagtaaaattggcgtaatagaaacgacaatcatagctgcattctgcccttgggaaaagagttttgaaccatcgagcccgacatcggggttgacgggtgtctcccccgccatattattgagtacgtttctcagttcaagagccaagggataaaggtcgtctctgctgggcagaaagaaagaaggccaataccaatcgtcccactttgctaccaaataccaaagtcctacggttgcaagccccgcttttgagagaggaataacgaactgaaacagaactctgaactcgcttgcaccctccatgcggcaggactccaagagactttctggaacctgagaaaagaaatttctgagaataatgagattaaaactattgatgccgaacggaattacaaggcaccaaaggttattgattccgagcatcgatttcacggacaaatagaagggaataattccgcccgaaaaaaacattgtaatgagaatgagggtaaaacaaatttttaatccgggaatatcctttctggtaaacgcataggcgccgaaagaagtaagaatcatggaatacagcgtcccgcccaccgtaatcaagaaggaaataccaaatgctctgggaactcgtccctgtccgaaaatgaatttgtatgcttctacgttgaaatctctcgggatgacgagtagctttgcagtgagatagtccgcttttgaagcaaaagacataagaaagacatagatgacggggaaaatacagataaagccaaacaacgtcaaaagtgaataattgacgatatcgaatactgtcacttttggtttgagtcttctttttctgcccgaaggcagaaccgtagtttccggattcgattctttgagaatatccatggtccacctccttaatcaagcgaatacatgctatatccgtttatcttcttcgtcaaagcgttgccgccgatgagaagaataaagttaatgacgtttttgaaaagtcccacagccgtcgagaactcctgttttcctccaataccctcggtatacacgagcgtatcgataatttccgaaacatcgagaatggtatcgttatataaattataaacagaatcgaagcctgcattcatgatgtttccgagctgtaaaataaacatgacggtaatgataggcaaaaggctgggaaaagtgatatatctcatatgcccgaaacgtttacagccgtctatcgtagcggcttcgtaaaggcatggatctattcccgaaatcgctgcaatataaatgacagttccccagcccattcccttccacagttccgttaaaatgagaatgggatagaagtaggaggaggtttgtaaaaacgctacgcgatcctttccgaacgccgccaggatattattgaaaagtccgtcgtctatcgccagcatctgtttgacgagacctccaatgaccacccaggaaatgaaatagggaagatataccatccactgtaataacttacggtattttgccacacggacttcattgagaaaaatcgccaaaataatcggcgcggggaaacagaataaaagttttaaaaaactaataacgagagtatttttcaatgcccgaaacatcgcgggacgggtgaaaaattgctcaaaatatttccagccgacgtcggggcttcctaaaattcccatatcgggaagataacgtttccatgcaagaataattccgtacatgggtacgtagctgaataaaatataaaataacataacgggcaacagcataatatagatttgcttgcctcgcttcatgcgctcccatattttttttcgcttctccccggccggagttttgtgaggtgtttcttttatcgagtcctctaccggcaaagatccggctttttcttgttctgccatgttttcctcctttttttcttcccgatttattcttttgcctttaacaaaggccgcttttataaccttaattttagaaagcggcctttgaggcatagaatgtcttcaatacattttaccttttgaaattctcattttttctttttcaacgcaatagccgctccggcagccaaaatgacaaatccggcggaaatacccgcgacgcttccacagccactattatccgaggtctctcctcctgcggaatcggaagaagaacttcctccgtccgtctttgtatattttgcatacagggaaatatccacaggattcgcataatcgagcgccgcaaacggttttgttaacgcagcatctgtataccagccgtcaaaagtatatccctctttatcgaacgatttcaacgtctcatctccgttatgggtatatttgctcgttccgagcttggagtttccgtcataataagtgacggtaaattcttctgccgaggcctcgataataacttccgccccgcctgcaagctctatgtagtattcatctcccgcctcattttcaggcggccattccatatccaggtatgagacggcgtctatggcgctgtatttgtcgagcactgttaccttgaaggtcaaattatgcaattccgaatcgatgggagtaccgggcgtataagcgtttccgtccaatttgatttgcgaaacgcgaacgagagtttcatcataatcgaaacggacggtatagccgtattctgcttccaaaataagttgctccgtcttagcatacggcgtggagataaagccgttgatttccgtttcggaaaccatataccaaagaatattcacattgatttctgtgccgttagaaagcgtggcctttgtcgtcttgggcaaagtttcgttcatgatgacgtccacggtattaacatctgtggccaacaggtcgagcgcagctgtatctacggacgtaaccgaggtaatatacgttccgctctcctcagcgatagcctcttctccttcgaccaaacgtttaacatttgtttcggaaagcgcactgtcataaactctgcactctttaatgtccgcggttgcataacatgttgctgcatttcccgttatctggcactgtgcgcccaacgtaaaagcgtaggggtcagaacgccaagagaaaaatgtatccgaaagttgtatgggatctcctgccgcttcaccgttaatatagatagtagctgcattcttcactgcgtctgtactaactgtgacagtagtccaattcgacgtatcgaccgtataaaaagcgagatttttttccaaccattgttgtttttcatcattatttgcaccgggcgccatatccatattgttgacttggatttccaccccatttttccaaggagtgatttggaaagcgtcgttataccgccctaccgcaagcatataatgatcgccctgatatttagagttatccctgcggaaagtaatagacactgtataggactctctgatgaggtcggaaaaatccattccggaattgccgagttgcggagcatataaacaagctcccgtttttccgcctttgtcctcggcattacgatcactgacaagggagacatatttttccccgtccgtatcttctttaatttgtatggcttcatctccattttgagaggtattcaatactttgagatcaaacccatttccggaagtatcttgaccgggctttgtctcgtcctcaaattcatagagggccatgggttgaatgatgtcctccgtttctgccgttgcggaaacgaacggcgcgcttcccagcgtcataccacccgcaaatagtgcaagtgtaagtcccagacttaaaatttttttcatgtcatttatctccttatctcaaattttcaatatccgggaagtatttatttacttccgtccgcctttacggcaaatccgccgtcaatataggcgttatattcggatattacgtcctctccgccataatcttcaaggtagtcgctgacaaaagacttccacttattttcaaaggtctttgacacaatgtagaggtcatcccaatcaaaagtctttgcgtcataggtccagctgctcgggttccaatagagatttttctcatttttttcgagcacggcaatcgtctctaagaagaaatcgtgacagtcggtaaggtactctatgcccgcctctgtctgcaaagccggataatcggaaaagtacgagttcgcttccgaacgttcttcgcgggcgcaaataatttccgcattcgtacaggtagtcactttgtagtgcatcgtccaatctacgagtgcatagaggagcgtagcggggtcctctgtgacgatggtcttatagaatccttcttcgttcttctccaaaaggttggatttcgttccgtccgtggactctgcatagtgtacgtcctctacgccgtattgaaggagctcatacccttcgtcgctgaggagaaaatcatacaattcgagacatttgcggatacgggaattgctgtttttagcgttgatacagaagccctgccaatatccttcctctccggcgccgttccatgtaccgtttttgcctgcgggaggatcgcacatagtaattttcgcggtagcttcctccaaggagcatttttccacagccataatcccggacacgaaattattcagccagttgtgcgcatacatcatacccgctttcccttgtgtaaatctgtcctgcttggtaccgttgtccgccgtcagggaatcctgagacatatatccgtctgtaatcatgcgcgcgataaaagaagtcgcatacatggccccgtcggtaatatcgctgtgcgtatattttcccgtttcttcgtcctcgacgaattgatcccaacccgtatcgaacgccatataaatccaagcatcgaaatctttgttcgattccgacatatatccgaaggtatcgtcttgcccgttattatcgggatcataaatcgtaaaggcacgagcgagacgatagaaatccaaaagggtttcgggcgccttaaattcccatttcgtacgcaattccgccgtaagctctccttccgaggagataacgccgtccttgatgagaatatccgctaatttcgcattgagattatctatccagtcctgacgtacatacagcgacttttcattgtgccaagaagaaggaataaaccatgacttgccctttgcgtaagagatattgaagcgcatataggaaaattcctgcatgcgtctgtaaatattcggataagtctcctccgtcacccaatcggaaatagcgataatgtcgccgttatcgatgagcttgctgaaaaaatcgggcgccccggggccttccgtcaaaaagatgtccggcaaatcctgatctgcctgtaagagtacaagctgctgttgccaattcgctccggagctgttcatcgccacgacatcgcagccaagttcttctttaattctttgatagacgggcgaatttgcctggcgtgcattattgaacgcagcccaatcgtttttgaatacggtgatttcctttacgttctcatc

SEQ ID NO: 794 - DNA, 7289 bp, Unknown
  16S sequences of unknown bacteria
gtgctggtttgggactggttttaggtactctttatgactcaaaataaaattatgcctgttgcggttgcaacaggacgcgctgccgctattatgatataataaaaatattagaaagtaaagaaaattttggatacacagagaactgttttatcagcctgtatggcttatactaaaagagaacaagaactgtttgaagggagttttcagaatgaagaagttttatcgttgcgatcattgcggcattatcgttggcattgtagaagaagggggcggcaccttggtttgctgcggtgaacccatgcgcgcgctggaggccaataccaccgatgcagcgcaggaaaagcatgttcctgtggtggaagtgaacgggaataccgtcacggtttgtgtcggctctgttctgcatcccatgttggaggagcatcatatcgcatggatcgcactggagaccaaccagggcatgcagcgcaaggaactgcttcataccggcgagcctaaagctgtttttgcgctggcagagggagaaaaggctgttgcagcgtatgaatattgcaatctgcacggtctgtggaagaaggaactgtaaaaatacttttgtccggcgcagagcgcacggaaaacggagcggacagcgcggcgcggaaaagcgtgaagcgctgtccgatttttatgcgggaaaaggagcgatcagtcgttctagtctttatattcaggcatttgcctgcggaaagatggtttgcaggaaaagggacgtatgcgaaatggaatctgttgaatattgtaagttggaaatttttatcccggagactcatttggaggcgttgcaggaagtgctgcgggcggtggatgccgggcatatcgggcaatacgattcctgtttgtcctacagccgcgtcatcagctgctggaggccgcgggaaggcagcgcaccctatctggggcgtgcgggggaaatcagtgtggaaccggaactgaaagtggaagtgacctgcctgcgcgcgcaggtagatgaaacggtaagagcggtgaaacgtatccatccgtatgaagaaccggtgatcaatgtgctgcccctgtggcgcaccagtttttaagcgccggacgcctgatggaagaaggcagaaagcgtagacattcttttaccggggatgtattgtgtagaggaaaccgtgttttacacggtttctttttttgatggcgtttcgcggtaaacggatggcgtgaaagggaaccctgtgcttgtgttgatgaaaacaacagagcatagaaagacagggacggtgctgtttggcaaagtcgctaaaaagaggggagaagaacttgtatttttgtcagaatcgtcgttgcgcaccgtggaggcctgtggtacaataaacgttgtttgaaatacaaatgctttcgagaggtggacaatgtgagtattactcccaagtattatattgtggatgccaaagccctgccagaggtgtttttaaaagtggccgaagccaagcgtatgctggaaaccggcgaggcgtccactgtgggtgaggcgacccggcaggcggaagtcagccgcagtgcgttttataaatacaaagatatggttatgccgttcaacaatatgcgttcgggccgtatcctgacattttatacattgctcaaggataagccgggtgtattgtccacggtgctggcgatttttgccgcctccggcgccaatattctgacaatcaatcaaagtattccgaccaacggctgcgctgcggtgacgatttcggcagaaacatcggatatgaccgagagcctggaagaactggttcaccaggtatcttcggaaaatgagattatccgctttgaaattttggcgggataatggaaaaagaggagagaaaggcgacatgattcacattgcagtaatgggcttcggcaccgtaggcgccggtgtggcagagatcctgcagaccaacggcgcgctgctggaaaaacgcttgggtgaggccgtggctctgaaatatattttagatatccgggatttcccggacagtccattcggtgcgctggtggtgcatgattttgaaaccatcgtcaacgatccggaagtggacgtggtggtggaaaccatcggtggcacaggcgttgcatatgagtacacccggcgtgcgctgcaggcgggcaaacatgtggtcacctccaacaaggaactggtggccactcaggggcggaaactgctggcgctggcagaagagaaaaacatcaattatctgtttgaggcgtctgtgggtggcggtatcccgatcctgcggcccctgcagcagtgtctggccgccaatgagattgaagaggtgttcggtatcctcaacggcactaccaattatattcttacccgcatggtgcgcttcggaattacatttgaggcggcgctgaaggaagcgcaggctatggggtatgccgagcaggatcccaccgccgatgtggaagggcaggatgcctgccgcaagatctgtattctggcggatctggcttttggccgggaagtgttgcctgagcaggtccccaccgaaggaatttccggcgtcacgctgcgggatgtggagatcgtggaacaagccggctggcgtgtaaaacttctgggccgcgctgtgcgccaggcagatggaagcgtttgtgcctatgtcgcaccgcatctggtggaagagcatcatcccattgccgcggtggaggacgtgtttaatgcggtgatggtgcgcggcaatgctgtgggcgaagtgatgttttatggacccggtgcaggcaaactgcccactgccagtgccgtggtggcggatgtaatcgatgctgcgcagcaccgacagcagcgccgccggatcggctggaaagccggcggaaaggaagtctgcggtggtgttgcagcgctgtccatgcgctgctatctgcggacgaaagacgacttgggcagggtggaagcgctgttcccggactgtgagatcctgtcctcccagaaaggagaagtggcgtttatcacgccgaaaatgccgctggaaacgttgcggcagtgtgcggaagcgctgcaggtgtgcgcaaaactttgtgtactggaatgagcggtctgcgtacaatggaacagcaggattttttccgagagtataacaagaacaggagagagcaggaatgggtctgattgtgcagaaattcggcggtacgtccgtggccaatgcacagcgcataaaccatgtggcagatattatcgctaatacatataaagcaggcaataatgtaatcgtcgtgctttccgcccagggcgacacgacggatgacctgatcgaaaaagccaacgagatcaacccccatgcgtcccggcgcgaactggatatgctgctttccacgggggagcagatctccattgccctgtgcgccatggcgctggagaagcgcgggctgccagtgatttccctggcggcctggcaggtgggaatccaaaccaacaacacctataacgatgcccggatccgtaaggtcggcaaagagcgcatccaatcggaactggataaaaagaatatcgttattgtggcgggctttcagggggttaacgcctacggtgatgtgaccaccctgggccgcggcggatccgacactagcgccgtggcgctggccgctgcgtttcatgcggatttgtgccaaatttataccgatgtagacggcgtatatacagccgatccccgtgttgtgccggacgccaaaaaattgccagagatcacatacgccgatatgctggaactggcttcccagggcgcgcaggtgcttcacaatcgcagtgtggagctggcgaaaaaatatcatgtcaatatggaagtggtttccagcatggagaacgtgcccggtacaaaagtcaaggaggtagtcaaagtggaaaagacgaatatcggcggcgtagccaaaatggataattttgtgcggttttcactggttggtctggaggatcgccctggcgttgcgtttaaggtgttttccctgcttagccgcaacagtgtcaatgtggatattattttgcagtccgtgggccgcgacggtagcaaggacatcagttttacctgccccctgaacagtttggaggcagcgaaaaacgtgctggaggagaatcgcgacgctatcggctattcctgcatcgaagtggatgaccatgtggcaaagatcagcctggtcggcgcgggcatgatgacccatgtgggcgtggcctcggatatgtttgaggcgctctacgatgctggcatcaatattcagatgattgctacctctgaaatccgcatttccgttctggtcagcaaaaccgatgccaaccgtgcgctgaaagtggtgcatgacaaattcttcgggatcgaggactgagtggtctaagcgtgtctgatgcaagaacacctttgtttttgcaaagagtacagggaattttggaacagagtctttgattttgcaaagcagcgtgttatactatccgtacagtataacgcgctgcttttctttggggaaagtgcaggaaggagcatgaggtatgatttatcgctgcagcagtaaggactgcggatactggtgtgaaggcgaaatgctggaaggcgccgcctgtccgtggtgcggcaaggaactgttgcgtgcggaggaaaagaacatgagcggcgacgattgggcggccctgggcggtttctggtccgagcagggcgcaaaagggaagacgcgaatggccgagtgtttccggaaagccgcctatctcggcagcgcttggggcacctgcaatctgggcatctgtatggagcagggcgatggcgtggagcggaacccggagcaggcgttttggctgtacagccaggcgatggaaatgggtagcctgaacgctgtatgctgcctgggcgtttgctatgaatgcggtgtcggcacggaaaaaaatctggaacatgccgtggcgttgtaccacaaggctgctaaatatggctctccccgcgcgcagatgctgttggccagggcctattataccggccgcggcactgcggaggatcgggaaaaatccatgttctggctgaaatctgcagcgtatcagcgatacggcgatgctatgcatcgcttaggtgtatgctatgaatacggcgacggcgtacagcaggactggacgcgggccgcccgctggttccgcgaggctgcggaggatggcgttggcgcagctatgacggacatcggctattgctatgagcgcggctacggcgtggagcaggactggaaacaagcggtgtcctggtatcgaaaggctgcagcggcaggacaaagcgtggggatgacgaacctgggctggtgtttcgagagcggacagggcatccgtcagagctgggagcgggcggtttattggtaccgccgggccgcagagttggacgacacccgcgccatggggaatttggcctggtgttatgataacggaaaagggctggaaaaagacagcgctgccgcagcccaatggtatttgcgcggcgcggagctggaggatgagcggtgcatttactgcacggcatggaattacgaatacggcgacggtgtggcgcaggatctggaacaagcggttttctggtactgcaagggcgcggcggctggcgaacgacggtgtatgaacaatttgggctgttgctatgagcgcggcactggtgtggcgcaggatttttctgccgctgtgcaatggtatcgccgcagcgctgaggcaggctatgatgaggccatggccaatttgggctactgctatgaagcgggccgcggcgtggaacaaagctggccggaggcgattcggtggtacgaaaaagccgccgaggcaggaaacggccgcgccatgggaaatcttgcctggtgctacgacagcggtcagggtgtagaacataatgcagaggaagctgtgcgctggtatcgtgccggcgtgcaggcgggaaatcttcgctgcatgcacaacctgggctgctgttatgaacatggcgaaggcgtggaaaaaaatatggaagaggcgctctgcctgtaccgcgcggcggcagagggcggatatgtgtattccatgtatgcactgggaacctgctgtgaacggggcataggcatggatgcggacctggaacaggctgtaatttggtttgagcaggccgcctccggcggcatggcaaaagccatgtattggctggggcgtcattacgcatttggtacgggcatagagcgtgacctttctaaagcgattgcatggtataaaaaagctgcggaagcagggtatggcgacgccatgttcagcttgggctggctatacagccaggggacagatcggcagccggattatccgcaggcggtttactggtatgaaaaagcggcagacgcagggatcgacgcggctatgaacaatctcggagaactgtatgcacagggcctgggtgtggagcgggatctggacaaggccatggagctgtaccgtcgtgcgtcggagcggggcaatgccatggcgtattacaatatgggctggtatatggagcaggccggcgagctggacgaagcgctgcgccattaccgcaaggcagccgacggcaacgatgacagcgcctggtgggcgctgggccggttttatgaaaacggcgtctgcgtgccgcaggatgagcggcaggcgcacagctgctatgcgcgcggtgaatccttgggcagtgtgaagtgcaagatgcgcttggctcgttgcaaactcctgggcattggtacacggaaggcaaagaaacagggccttgccttgtgccgtacggcgctggaggaagccatgaacagcgaagaaaaagaagattacggctatgcagccgaggtggccctgctggagcgcaccattgcagagaacgaataaagaaacggggggaccgcgtagcggtccccccgttttcagttctcttttgaaacaccggcgcataaactccggaacaggaggagggagtttatggatcgatctatgcgccagtgcggcggtatttttctgactacagtggccatcgccgtggcgctgcgctgtgcctgggaggtctggccgggaacgcttttgggattgtttgcaccgcagaacaccagtgtgtgggaactgtcgaaaattgggctgtggcccggcattgccgctgcggtgctctatcatgtgccgctgcgggataaaagcagtttatgcgcgtatctgatggtgccggcggcgcttccggtggcgttgctgtttgtgtactggtttttgcgcatggtctgcggcatttgcagcgctcttgtggatgtggtagtttggatatgcc

SEQ ID NO: 795 - DNA, 6737 bp, Unknown
  16S sequences of unknown bacteria
ctccaccccttcggggcttcgacggctacggcctgtttcgcgcactgcgcgcggccttcgtgcgccccactggctgcgccgtctctttcgccctcattggggtcttcgtaccggcctgcgcttcgctggcccggtattccggggctgcggacgccctttgggcgtgtcctcgcccctccaccccttcggggcttcgacggctacggcctgtttcgcgcactgcgcgcggcgaagctccgtcccacagcgcgcgcgcttcgtgcacccctttggccaatccctccgtcacggctacgccgcgccacctccctttacacaagggaggctctggggtagtgctgcttactgcgatagtgccactaaccaaaaggctccccttgattccaaggggagctgtcggcgttagccgactgaggggtttggcatccgatcaatcgataatccgcagttccacgtcgatatccagcacctcggggttgaggagcgcgttgccgcgcgcgtcgtaatagcgggccaccgtgagagtcaccgtgtcgccggcctcatagccatcgagcaaggcgtccatctcatcgtagttcatgcagcgctcgccgttcacgtgcgtaatgcggtcgtacacctgcaggccagcttcttctgccggactgccctcttccacaatgcggatttctacaccggccggcgggtaatcgcgcaggggctcttccggcccatcctgatccaccacgctgatgcccagccgcggccgcagcacacggccattttcaatcagttcctcaatgatgggcttggcgtcgttgatcgggatggcgaacgccgtgccttcgatcacgctatcggagctaaaggacgccttcagcgtggggatgccgatcagttcgccgttgccattgagcagcgcgccgcccgagttgccgctgttgatctgcgcggtggtctgaatcacgcccatgttttccgtgtagctgtcgcgcgcctcgatgccctcgcggtccagcccggagatgatgcccgtggtcaccgtgccatagagcaccgcttcgcccgagcccggattgccgatggcgatggccagttcgcccacgcgcagcgcgtccgaatcgcccaggggcaccggctccgcgtctacgctgccttcaaacttgagcactgccaggtcggtggccgagtcggtaccgacgatttccacgtccatctgtgtgccgtccagccacacgatctgcacggattccgcgtccgccaccacgtggttgttggtcacgatatagccgcgatcgtcaatgtacacgcccgagccatagcccagttcggtttccgtggtttcacccgtgtaggggttccaaaccttcgtcatggaaatcacctgcaccacggcgggacgcacgcgctcggcgatgtccgggatgggattggccgatgtgtaaacgctcgccggatccgtgggatccagggccgtttccgcgctggcgggattggccaaatgcaccgaaacgccgatggaagtgactaccagcgccagcgccagtaccagcgcccatttccttagtccattttttaagctcttcatgctgagcacctctttctctatcggatgcccatagtataccaggcggttttggatatctcatgaacaaagtatgaatgagcgcggaaagaattgcgaattcgattgcgaacaaattttcgcccgtttgccgacgcaactttcgcgcctttcccggcgtgggaaaaggattttgccgcctgcgcggtgaatactatacacggaataccaaaggcaaggaagggattgtcatcgttatgtggaaggagtttaaggccttcgccttcaagggcaacgtgatcgacatggccgtcggcgtgatgatcggcggcgcgttttccaaaatcgtcaccagcctggtcaacgacatttttatgcccctgctctcggtcttaacgggcaaaattgatttttccacgctctacatctcgctggatggtaaggaatacgccagctaccaggccgcggtggacgccaacgccgccatgttccggtatggttcgtttctgcaatcggtgctggattttctgctgatttccatctgcatcttcgcgtttgtgaagctggtgagccgcttgcacaaaaagccggaagctccgccgcccgcgcccgtgcgcaagtgcccctattgctatggggaaatcgacgagcacgccacgcgctgcccgcactgcacttccgagctgccgcccgcggagatggtggaaaaagcctagtccttacaaaattacttagaaaggaacggatttgtctatgtcactcaaacatcccaattttgataccctgcaggcccacgcgggccagagcgtggacgccaccggcgcgcgcgttacgccgatttaccagaccacttcctttgtgttcgacggcgtggagcaggcgcgcgaaatcttcaaccacgagcgccccggccacatctacacgcgcatttccaaccccaccacggacgtgctggaacagcgcctggccgcgctagaaggcggcagcgcctgcgtgtgcttcgcctcgggcatggcggcggaggccgccgtggcgttcaccctgtgcaaaacgggggatgaaatcgtgtgcgccaccgcgctgtacggcggcacgcatacgctctttgccgaccggctgcccgagcgcttcggcatcgccacgcgcctggtggatatcgacgatttcgaggccgtggagcgcgccatcaacgaaaaaacccgcatgctctatttcgaatccatcggcaaccccaacatggtgatcccggatatcgagcgcctgtgccagatcgcgcacgcgcacggcgtgcccgtggtgtgcgacaacacctttggcacgccctatctgatgcagctcggccagtggggcgtggacatcgtggtgcattcggccaccaaatacatcggcgggcacggcaattccatcggcggcgcggccatcgatatgggctcgttcccctggaagggcaacccgcgctttgcggatttcaacgagccggatcccaccaaccacgatctggtgtacgccgatatgggcgatattgccttcgccaccaagctgcgcgcccagcagctgcgcgataccggcgcttgcctcagcccgttcaacgcgtttttgctgctcacgggcgtggaaacgctctcgctgcgcgtggagcgccattgccagaacgcgctggccatcgcgcaattcctcgccgccagccccaaggtggcctgggtgaattatcccgccctgcccggcgacaaataccacgagcgccagcaaaaatacgcgcccaagggcgcgggcggcatcttctccttcggcctggcaggcggctatccggcgggcgtgaagttcatcgaaaagctgaagatcttctcgcacctggccaacgtggccgacgcgaaatcgctggtgatccacccggccagcaccacacacggccagttggatgaaaagggcctcaaggaagccggcgtgcagccggagatgatccgcatgagcgtgggcctggaggacgtcaacgacctgctagaggacgtcgcgcaggcgctggaagactgaaatagcctcaaaatccctccgtcacggcttacgccgtgccacctcccttttgtacaaaagggaggcttttgggcagagcaacttccagcgatagtgccactaaccaaaaggctcccctttcgcaaaaggggagctggcggcgttagccgactgaggggttgcctcctcccgctgtcgcgaagccgactgagcagcgcacgaagtccgcagcgccggaacactgcgcaagcgttagcgcagcgcggtgcgcaggctggggtgcgggcgaaacaggcgagggcggtgcgaagacgcgaaacagcgggccgcttttgctctggctgtggcgatacctcttctcccggatgatagagaaaaaggacgtggattttctcggctgtcccttgtggatggggcgtttaattttactatgtactgctcgataaatggagaagttgtcgttagctcatcctgatactaaaactttcatggtattgcttcattacttgtttaaaaaattcgatattagcatcagatatgatatctattaccatctctgtcccataatgctcactccaaatattgcacaaattattttctacatgaatcgtaaaatattttgtcatcttattatatatgcttttgtctgcggcttcttctatcagcaatttctcaagtagttcttttgttaggaaacccttgatggacacttcgtatttatcgtcaaccgctatgccatataaagaagcttcctcaatctcggtaacttcttctctccaacaacgaatttcaaatgcatctccaacttttataaaatgcttcactatcgttttccaccattgtgatgaaatggaattgtctatcatttgaacatcaaaatgcttcataaaagcgccgcctccaattccggtttgccgcctcgtttttaaaaaagcatatcataagattgcgaacaaatccatatctagaaagagaagcggcccttctgccgcaaattccgcgcttgcgaattctgaaaacgcatccctgcagaaggctccgcagggatgcgcccatgcgctattcgatcgcttcgtattccccgtccgccgtcttgcggaacaggggcagtttttgcaggaagatgatgtccgtgcgcgcggccgcgtcgccctccgccagcagcgcggcctttttcaccacggaagcgcccgcgttttgcatcagcacttccagcgcgtgcagcgattcgcccgtggaaatcacgtcgtccaccaggcaaacccgcttgccgcggatcttgtccgcgtccacgccgtccagatacaggtgctgctcgcccgccgtggtgatggagtgcacggaggcggacaccacgtttttcatgtagctcttggtgctcttgcgggccacgatgaattctttgaggcccagcagcttgctgatttcataggccagggcgatgcccttcgcctcggcggtgacgatggcgtccaccgcgccgatgcgccgggccatttccggcgcgcaggcgctgaccaattccgtgtcgctcagcaccacgaagctggcaaaggccgtggtatcgttgatggggatgaagggcagcgtccgccgcacgccgcacagttccatttcgtatgctttcatggttcttctctccttttccgctttggcgttacaggcccaagagcttcaccacaaccccggccagcatgccgaggaacgggttggtgacggcggtgacgaccatggccgcgccgccagccgcggggttttccgccagcgcgaggggcgcgtccggcacgacggtgctgaacaggcccagcacgaacaagaagcccgcgatggaagaagagggcacgaacttgccgattttgggcagcagcttgaacaccagaatcaggccgatgatcgccatcatgatcacgcccgcccacaccgggtgcggcgcgctggccgtggcggaaatgatggattccaccggcgccccgccgaagaacgaggaaaccatatcggccacggaggaaatcaccgtgaggtggtcgacgttgtaattgccgctggtggccatgcccgccgtgatgccgccgaaggagatgttgctgccgatgttcaggcagaccatgcccagcgcgccgatgatcacgctggaattgatggtgaacttctgccgcacaaagccgtcgttttccaccacgatgttggccttttctttcttgaaaatcgcgctggcgatgcaggaagccaccaccgagatcacaatggtgtataccagggcgttggaactatcgcgggtgaagaaataggtgatcagcgcggccgccagggaaacgccgccggagatcgcgtccttgcggatcatgtcgatggccgccttggtgaggatgatgcccacgccggccatcatgccgtaggaaacgtcctcgccgatgaaatcgacgattttggtcagcagcccgaacgcgccaatgatggtcatgatgacgccgcccaggaagatcatcgcgcagcgctccgcgcggtttttgcccgccgtgcccgcgtaggtgatcgtctccgcctggaacgagatgggcgccacgctctgcgtgatggtgttgccaatcacgcccacaaaaaacgccagcgccgtgggcaccgaagcgaagccatacgccagggccaaaagcccttggggcagtccattgagcactacgccgattacggcaagcgcatccgtcaaaatgtcgttcattgcgtcatttccctctttctcctcagtagccttgacgaaatctttcccatcgcggccccatttcttgcaaattttattataaatcgcccagtcgcaatatcaagaattcgcgcgtgaactgttgacaagctttgggtaaaactgtggcatttgccgccacacagcttgtcaaaaaagtctttttgacaagctggtggacgggggagcaagctatccacaattcgcaatggtcaccctgctgcgcctagcggcttgcagtgttcccttgctcattgggcttacttcgcgctgcttcgttcctcaattcgcaatagtcgccttgctacgctaccgcttgcaagtctcctttgctcattggacttccgcttcgcctgtttcgcgcactgcgcgcggcgaagctccgtcccactgggcgcgcgcttcgtgcgccccccgccactgccatcctcaattcgcaatggtcgt

SEQ ID NO: 796 - DNA, 11188 bp, Unknown
  16S sequences of unknown bacteria
ataagtattttcaaattcgtattacatactatggaaaaagaactttttgacattttcacagatgcgtgataatatgattatagaaaaagagtgctaccgatagacggttagtcctgttttacttaattgattaaaaataaccgttcagtttgcaggctggggcggttatttttgtgatttattattatctttgccaaaggtatatccaagaccaaagcaggttaagccgaagctaaccatagctatgaagtcaacaatactcatggcttagccctcctttcgagagatttccaccagaaaactctggggatttctatgtaatcagaggggggctgagtgccggtggcactcgtttagcaccgaccgcaacggagtgtagaccacagtccctctgttgaaggactaaccgcctaccgttatggtagcacccatgtttcgattataacagtcaggacaggaatccgcaatcggaaagttgccagtgcataaaaatggggctgtgataccattttgatactaaaatgtaaagagaattaaaatataactcggaaaatcggcaatacaggacaatatggacacgaaaatcacaggaaataatgagattttaagaacctcacaaacgtgaaggtggacgtactgtaggatcaggacgtgttgctacaatcatcgagtaatcactgattgacagataataatatataaatcagtatcagaagataccatgtgtccaagcgtaagataccctggaatcctaaggtttccggggtttttctgtactctaagaaaaggtatctgaaagcatggaagttaatggaaagaaaacttttggatatgacgaaccaattatttataagcgggtataattcaagagtggaatatggcgataaattcaagttgaaatcaggagagaataagaattattgacagatttgacgaaatgcgcagcattttggaagttggttctgagcagtagcaaaaatatacaaaaaagaaggaaatacagaaaatggagataaaaacagtcgccgttctcggtgcaggagcagttggctcttatgtgatatggggactttccagacggaaggatatcagactgggcgtgatcgcagaaggagagcgcgcagaacgcatgaaaaaaggctgtctgatcaatggcacagtgtatcatcctgaggtatggacaccacaggatgcaagagagacagacctgctgatcgttgcgttgaaatacggtgcgctgccagctgcactggagggcatccgaatgattacaggtgagaatacgactgttatgagccttatgaacggggtagacagtgaagaactcatttctgaaaagatcggagcttcccatgtcctgcactcattgattaaaatcgcctcccacaaagaggaaaatggatattatttcaatccggagacaacgatcggaatcattttcggagaacttactgcgccgtatcagagtgagcgggtacaggcagtagagtctctttttaaagatacggggctgcattaccgcgtcacagaacacatcagagaagaaatctggagcaaattccggctgaatgtctgtaacaatctgccgcaggctattcttggcgcaggggtgggatgctatcaggacagcgttcatatgaagcagatcagcggcggcctcagacgggaactggaagcggtcgcagcggcaaaaggaattgacatcagccaagcagacagttcctccagccatggaagtgcggttccgccatccgcgcggtattctaccttgcaggatctggatgcaggccgccatacagagattgatatgttttccggtgcgcttgttcggatgggcagagagcttggaattccgacaccctacaatgaatatacctaccacatgatcaaagcgctggaagaaaaaaatgatgggaaatttgattacagcaaggatggcagggtgacctgtgcaaagtaagttactgttcaaagtcaatggtaaagagaatattcgcaatccgctttgacgagtgtacttaaaaatgcaagtgttttacgtatattttgcgaaattttgtctgcctctgaagcgttacgaaattattatgtctgatagcgttgaatttggaactataatatagtatgatgagtaaataataagatgtcaggggcaaaggtattttgcccctagtatcatagtaagaatcaaagcaaagatttgcaatacagaatagcagaaacataaaaagatcagctgtttttatatactgaaatgaatggttttccgttttactgatctgttttgctgaattgtacaagctggaaaggatgccatgcactacttagaaccgatcaatgaaacttcctatctttccgttccaaacgcaccggtctatcgtcagatcatgcgctgcttttaccgtgaatatgagaaaatgaactttcagctttacaaagaagatgtgctggagcttctgaaaaaagaggaacaattttcggattacacgatggagcagctggttttggatctggaggcactggtgaaatggaaaaatctgactccgattcaggatccggggagagtttatacgattgcggactataaaaataaacagtatcaatattcgatgtcggaatatgcggtggaaattgaacgtctgacggttcggctggaaaatatttttctggaatcggggagtctttccaccaatttttttgtccgtctggaaaagagccttgaggaggcgccggaaatggagcaggcgtcactgaaggaagtgaacgaatggtggaatcttttgcaggaggattttaaacgactgaatcagaattatcaggactatctgcgggatttttactccggaaaatcggagcagctgatgaaatcgattgaatttgtcacgcataaggacaaatttgttacgtatttgaaagaatttgttcaagaaatgcagcgccactcaagacggatcgagcagacgcttcggaaaaatgaggcgcttatggaggagaagcttctggaaaaggtggtgcgcagcgaactggagattccacacgccatgctggaaatgcagaaaaacgcagaagcaggcatccgtgaaaatgtgatggggaaatgggaatccttgaaaaactggttccttgactcggaaaaacgggagtgtgaatgtaagaaggtacttcgaattacgaatgatgtgatccgaagcattcttcagaatgcggcgctgcttgtgcagatccagaatatgggagtcagcagaaaaaatgaatataaaaagtttcttgagctgtttttggcgtgcgaggatctcgatgaggccaggagagtatcggcgcatgtgtttggcgtacagaaaatccagcattttaagacgatcgtgccgcgcgaagaggactcgatcaatagcagtgtttacggggaagagcctgcttcctttttgctgaagccgcatacgagaagctaccgggaaaagaaagaaaaacggggatttgaagacaaatcgatggagaagctgatgcagcgtcaggtgtatctgagcaaggcgaggcggcaaaaggaaatcgtgctgcattatattaaggaagacagaattattttttcggagattcaggagatcatctcagcggaaacgcgcaccgtttttctgcagtggatcgcgcaggcgaatatgagctcacagaagcttgggaggacagaatacggacaggaataccggatgatccgcaaaaaaggaaactgcgtgctgaagtgtgaggacggcgatctggtgatgccgtcatttgtattggagtttaaagaagtatgaacgagatcagaacattatttgagcaattctggatctgccgcgatacggacagagaaagctactataaggtcaaacgggatattccgaagtttcagcgctttgtccgggagcagctcggatggaagctggttcatacggagcatctgctgaagctggaaaagaaaccggctcatgcagagccgtttatgggaatccaggaatttacagacatcagagattactgtattttgtgcattgtgctgatgtacctggaggatatggaggagcagaagcagtttctgctctcggagctgatttcttatgtggaggcacggctgtctgagtatatgacggttgactggacctcttttgcacagagaaaatcactggtgcgtgttcttttatatatggaaaagctgcagatgctccgtgtttatgaagggcaaagcgaggccttcagtacggaggccggacaggaggtactgtacgaaaatacggggtattccaggtactttgcaagcagctttccggtggatatttccggatataagtcatggcgggattttgagacggcagatttcgatgaggtcgagcaaaacagaggagccatgcgcatcaaccgcgtttaccggcagcttgcggtctgcccggtgatgtactgggatggaaacgaggatgccgatgcttattatctcaaaaatcagcgccagtgggtggcaaaatatctcggggaaaatctgggcggaaatctggatatctacaaaaatatggcctgcctgacgctggatgaggatgactgctacggcgcagtgcatccaagagatgcgatgctgccggagcttgtgcttttgctgtgcggaaggatccgggaagagcttgaaaaagggaggctgcaaaaacgagaggatgagtgcatttatctgaccgatgaggaatttgcagatctgttattttcctgccggaaacagtggaagagtggctggagcaaagagttccgtgaaatggaagaggaaaagctgctgcagacagtgacagaatatatgaaaaactggatgatgctgaggcaggtggagcatcaggtgattttgccgccggccgttggcagactgaccggagtttatccggatgactttgagggagataccggaaatccggcttcataaccgaattccacctctacaggtggtgaagtgaattgcagacgggaaaataaataacagtattgggcggatagaaaacggtatctcatactgatccgaggcaaaccagagtcagcatgttgctgacatgtcagactctggtttggaacaggcacgggaggcttacaaacgggaggaaaagaagatgaacaatcgctggaagatgaaccgcatcggttttgtcaatttctggctgtacgatgaagaggatttcgaatttgaagacggaaagctgcttttgcgtggacagaatggctccggtaagtcaatcacaacgcagagttttattccatttgtattagatggtgaccgtacaccaagtcgcctggatccgtttggctccagcgaccggagaatggaatactatttccttggcgaagagggaagagacgaggcgaccggctatctgtatctggaatttaaaaaggaagagtcggacgaataccggacgatcggcatcggacagagggcaaagcgcgggaaaccaatggatttctggggctttcttttattggacggaagcaggatcggaacagatctgcatttgtacaaagaaatcggctccagccggattccgcttgataagcgcgaagtgaaagcggtacttggagaggaaaatctctttactgacagccagagcgagtataaaaagctggtaaaccagcatattttcggattccgcaaggcagagcagtacgaacagtttatccggctgctggtaaaggtgcgggcgccgaagctttccaaggaattcaaaccgacaaaggtatatgagattttgaatgattcgctgcagacattgacggatgaggatctgcgtgcgatggtcgatgccatggaaaaaatggatgagattcaggacagcctggaaatgctgaaccgtgcatttgatgacgtgaagattattcggaatgagtatacaaggtacaatcaatacatgcttgcaaaaaaggcgcaggcatatatggcgaaaagacaggaagtttccggcatgcagcagcagctggaaaagcaggagcaggaaataaaagaaacaaaagagcgccagaaagaaagcaccgacaggctgaacgcgctggaagagcgaaaacagcttgcggaaacagagcgaaacggacttttggatctggatctggaagaaatagaccggaagctggattatgcgaaaacacagagggacgaggcagcccaaaaagaagcacggtgggagtcgaagattcaggagtacaaagagcggatctgggaagcggagcagcagctgagggagatagaagatcgtctggagcaaaagcgtcaggagctgcaggaacagcaggaggagcttctggagcagcaggaaattctgcagtgggagcagcatgaagccgcgatgagaagcatcggggaagctacaggctttgcgcgtgacgaaattggaaaagagctggatgcactgaggcgccagctggaagagtgccgcagggcgattgcgcagtatgaagtcatgtcggcagcgtatgatgaggttttaagcgagctggagcagtgcagaaaggaaagcgccagaaaagagcaggagctggagcaggcacaggaagcggtaaatttaagcattgaccagtggatcgtgactctttttgaaacagaaaaaagtgcaaaatggtggcatccaaaacaggaagtgctgaaaaaagcagagcagatgattcaggaataccgatccgtggaggatgcaggcgcgattcaggagctgcttcgggacgattacgatgtacagagagcgttgttactggataaaaaggccgtaaaagagcaggaatggaaaacagagaagaaacgcctggaagagatcggcgaggaattgcttcgcattttaaaccagccggagctggaaccggagcgtgatccgcagacggagcagacgaggcgcatactgcaggaaatgggaatcacagcggtgccgttttataaaacggtggaattttcagcaaagctggacgatgcagattgtgtaaggctggaggcacagctgcaaagggcaggaatcctggatgcgctcgtcgtttcagcggcagattttggggttatccgcagaaaatacccggagtttcaggacacggttttatctgcatggaaaaaaggaagctcggcatttgacggtctgcagatcagtgaagcactggatcccgcactgaaagaaatggtcggctgcattttgagcaatctatataaggaagaaaacggaaatggcatttatctgggaacggatggatggttccggcagggcatgctggttgggcgcgcagagaaaagcggcgaagcggagtttatcggaacacttgcaagggcgcgccggaaagaacagaaaatccatgaactggaagagctgcagcgcgaactggaagcatttgtgcagggcgcagaagaggaaatcgcagaaatcacaggcgcgcttgcaatgctgctggaggaataccggaaaataccgggattttcaggaatcaatggtgcactggagctggagcgtcagtgcatatttgcggctgagatggccagaactctgcgtgaccagaaggagacgcaggaaagagaagccggtgagagaaaaaatcagaaatatcaggtaatgctgaaaaagtgcacgccgttcccttatggcaggacagagaaagcgtatgaggaggcgctggatgcagcgggcgagtatcgccgtatctggcaggaaatccgccagaacgtgctgcagatggcaacagaacaaaacaatgctgcgctgaaacgggatgcaatggaacgcgatgagcagcagctggatgatgcgttcgtcgaaaaacgcggctatacgacaaaaagaaaagagtgtgagattcagatccgccagtacgaagactacttaagccggccggatattgcggaaaaggcaaatcggctgaaggagctgcgcgaagaactgaaacagatagaaagagatactgcttctttgcgcgaaggactcgcagtatttgcagaccgtctgaatcgtctggaaagagaggagccgaagagaaaggaagagctgcagcggaaaattgagacagagacaaatctccgaacgtattttgaggaagagctttctctgaagcttgtactggaccgtgagggcagatcactgccggaatgtgccaaaatggcggcaggttttctccgggagagtgacaaaaacagagaatccggtgaactgctgaattcgcttctgcaggtctatcagaaacacaatggaagcctgatcaattacggaacttccgtggaaaactgctttgaggcggcacagccagacggggaagagggcggcagcgcactgcgcagtcgtgtgcgcgtcgtatccgtctggaacggtaagaaggtttatctggaggaattttacaagattttaaaggcagcaatcgatgagacagagctgttgatccagaagaaagaccgggagctgtttgaggatatcctttcacagacaatcagccagcagctgacagaccggatcgcagagagccggaagtgggtgacggatatgtcaaaccttatgaaagcgatggacacctcgatgggactgagcttctcattggactggaagccgcacaaggcggaaaatgacagcgagcttgacaccgccgagctggagcagattttgcttcgcgaccggtcgcttttatcgatggaggatattgaacgggtggctgctcacttccgcagccggatccgcatggagaagatgaaggtagaagagggaaacggaatcatcaattacatggagctcgtaagagatgcactggattaccggaaatggtttgaattccatatgtatttccagcgaagagaggaaccgaaaaagcttctgacgaacgcggctttcaaccgcttcagcggcggtgaaaaggcgatggcaatgtacgttccgctttttgcagccgtgaacgcacagtataaaaaggcggaaagaaaggatcatccgaggatggtagcgctcgatgaagcgtttgccggagtcgatgacaaaaacatcagcagtatgtttgagcttgtggaaaagcttgattttgattacatcatgaattcacaggcactgtggggctgttttgatacggtaagaggactgcggattgcagagctgctgcgcccgcagaattcaaaaacggtaactgtgatccgttacacgtggaatggacgggagagagtgttggatgcacaataataaggatagggaatgtgcgacctactttaaaagcagggaagaatatcgacgctgtttcggggagctctggaaaaaatggcgctcctacggaagggcagccgggaaaatcacgctgcacggcgcttcagaagaagaacgccgcgcagtcggcgggattaccggaaaaatatattatggggaagaggtccgtttttctgtttctgaatttgaggcaggattgcagaaaacaaggtttgcgccgatagaactgaaagcacttctggaggaatactttggaaagccgttgtgctcaaggcaggaacaaaaagaaacgaaggaaaaagaaaaaaacgatttctggcaggaaaccgcagcggttctttttgaaaaaacaggccaggagtccgcagcagtcaggtggtttgaagcggcattttcacaaaaaaagtatggttatcagatcctgaaccgggaatacgccgaagacccgcagcagacaaaacagctggtatgccatatcgcgaaggcatttacaaggctggaggcaggaagaaacatggatgaacttgaagttccacttgccgtatttgcagcggatatttcgggcaatccgcattattttgaccgtggaacgctgcccggccagcttctgacacaggcagtatgctggctggaacaggcagagctgccagaaaattcctatgagtggcgtgagcggatggagcaggccgggatcctgccggacaatgtttcttcaagtctgcatgcattcgggcttttgctctacctgggacagcaggcacatcctgcttatgaggcgttttgcagactgcgccagccctttgtgatcacgatggagaacctgcgcggagtaaccggagcagagccgctcggagagcggatttatattgtggagaatgagatggtcttcagctatctggtggcccatctgataaaaagcggtgaggaaaagcagggcgaacagaaaaataccggcgagaaaatcctgccgtatacgctgctttgcacctccggccagccacgcgcggcagcgcagaaactgcttccgctgcttttaaaaagcggcgcatccatttactacagcggcgatatcgatccggacggaatgcggattgccgaccggctgtggcagaaattcggagacgggattcagatctggcgtatgtccccggaggattatcagaagagcatttccgcagaacacatcacagaaaatggtctggtaaagctggagcagcttcaccatcccctgcttcgcgggacggcaaggtgtgtgaaagaagagcagatggccgggtatcaggagaatctgctggaggagctgctgggggatatggtaggaagacgttttcttcatatagtctcagataagttcaattgaaaacacttgaagaatcaaaaaagaagtgttatagtatagaaaagggaaagccagaaacacacggtctacccttgataagatgaaaacttggtactttttagcaccagccgttcactattgcgagtagtgggcggctatttttttctcccaaagactgtgtagcacaatcctatgagagagacgatgaagatacctgcctgaattaaatcagagtatgtaacgtacatcggcatccctcctttctttcgtctggagggttgcccctccgaagagggtagaccgccttttctgtgttctgactttccgtgagatcagtataccacggctcagaacgtttgtatagtctgcagagtgcgtttaaggcgtcaggtggaaaggttatcgccaaaaggtctcagctcagattattgctcagaatcttcttcatcatcgaaggaataattattcagctctggaaaatcaagaaattcacttaaagtcattccaaagacgtttgaaatcttgtgaagcgtgcggacctttggatttttgcttgtgccgcggatgatattatcaacggtggattgttttaacattccaattgcaacaggaacaatcagcagcatggtaaaaagatgcgctgacagtctgagtg

SEQ ID NO: 797 - DNA, 18321 bp, Unknown
  16S sequences of unknown bacteria
cagcgtcggtcgatgaaattgaccgacgctgcgcgctgttttattgcaatgaaataatgaaatatttatttcgtgaaaattatatctgcaacagattttctcgttgtctgcacattacttaccacttacaagaaagggtggtacggtaagttgcaagaagatggaactccattatgaatgaaacatcaatcacatattcaacaaatagagaaatcggtgatgtttcatcaagtaactatttggaaaaattgagaaaaaggggcaggtcaatacagctgctcttgatgaatatttggaatcacatcggatggatgtggatcgttgtagaagtgataattttgatcaacatataattcatagggccaaaatactcttagattctatcgaaggagctgcaggaaaagctatttcgggaagaaatactgaggacgttattaaaatgttcggtcaaacactttgttaaatcctttgcaaagtaagcgctcagtaacctgatgcctttcattgaaaaatctaaatgaaataattgagagtaatttggagtcaatcggttgtctcactggcccttaatcaacttttgagacttccgcaatgagcgtagcagatcaatgaatgccggaaaagcggacagatcttgtttcatcgtggcgcatcttactatttccaacgcagggcgattgatttctaccggcgtaataagaaatatgcccttgataatatgtcaaaaataagagaaaatgaaataaagtaaagttttgcaaacaatattatagcaaaaaggagcaaaatatgggttttttagattcttttaatgatgaagaaagcaaaatcaacagtggtactggcagatatagagttatgcaggtggtgctgcgggaaaaatttgtaggaaagggatcgaagaatttccgggaaattgaggatctttgcaacgaacagtatgcagaaggataccggctgcatacctttgctcagtctaccgccggatcatcgggttttggcggcggtgaccgtaccgtgtgcaacctggtctttgaacgtatggattaagatgaaaattcactgatataaggttactgtaatcggagagactgctgcaaaatgaatttcgcggcagtccctttaaaatagtgatcgcaagtttttcgcaaccgctattataaaaaagagcagaatccggaaacggttctgctctttgatcttttattactgtctgaatccccgaacttcctgttctgcatcgaaagaaagccttggaatacagatctttaattgccgtttcagctatcacagatgagagtatctcttcctcttaaatcaagccttgcagccgacggactttacatccggctttatttcagataaatgcgacgtccgctacaggagccttattcgttgcagtgatgcatttgaaacgctcatggattccgatattaaaaaaacggggcagtttcctgccgccccggttcgcaaagagctttgtttgtgatccggcctcaatttgacgcggggccgatctgctgtttctctcttcgcctcagtccttcagatatttaaaacatgtcgtccatggagtagagtccgttttcctgctggatgaggaatttcgctgctgcgatagcgccattggcgaaaatttcacgggaataggcggtgtgcttcaattcgatgacttcatcgggacctgcgtagatcaccgtgtgttcgcccgggatggttccgcctctgaccgcgtggattcccaggtcagtcatttcgaatttatcatctttgccatgtctgccgtaaagatagtttttcttttctttgcaggctgcgctgactttgtcggccaggagaatcgccgtgccgctcggggagtccagctttgcggtatgatgtttttcaataatctccacgttgaatttttcttccagtaccggagtgatcgccgaaatcgctttcgccagcgcgttgatgccgatggacatattcgcggagcggaagaccgggatttctttggaagcctgatttagcattgcgaagcactcgtcgtcgagagcggtggtggctacgacgatcggtgtttttatttttgcggcgtggcgcaggagattgggaactgcggtgtagtgggagaagtcgatgatcacgtcggctttgatgtcgcagtcttctgcggatttgaaaaccggatagtcggatttcacttcgccggtagcgtcgatgccggcaacgacctgcatattttctcctgccgcgatcatgcgggtgagtacctggcccatacgtccgttgcagccgttcagaatgatgtttaacatgagttttcctcctgtacgaataaaaacagagcgattcttttcgtctctgtcacagaattttcgaaagagggtgcctctcgatgagacaccctccggctttcatttttcaaggctcttgctcttatctgcgggagcgttcggaaaattttagagaattccgtacgctttcagttccctttcaagaagtaccatcgtggattcttccggatcgcagagcggaaggcggaaattcatcttggagcggcccatgatgtccagggcggctttgaccgggatcggattgacttctgcaaagagcgcgtcgatcatcggcttcgcttttagctgtccactgatcgctccagcgatgtcgccgtcgaagaacttctgtacgatttcgtgcgtctgtctcggagcgatattggagagtacggagatgactccgtctccgcccagcgccagaagcggcgtgatcatatcgtcgtttccggaatagatagagaaatcttccggaaccagccttgcgatttcagcgcactgagagatatttccgctggcttctttgatcgccgtgatattcggatgcttcgccaattcgactaccgtgctgggtttgatattgacaccggttctgccctgtacagaatacaggataatcggaatatttacgctgtcagcgatggcgttgtagtgccgaatcaatcccttctgggtcgctttgttatagtatggagtgacctgcagcagcgcgtcagcgcccgctttttcagcttctaccgacaggttgacgccgtgttttgtatcgttgctgcccgcgccggcgattaccgggacgcggcctttgactttgtccacacagtacgatatgacttcgatctgttcttcgtctgtcatagtggaggcttctcccgtggttccgcaggagatgatcgcgtccgtaccttccgcgatctgccattcgatgagttctccgtaattatcgaaatttacggatccgtcttcattaaacggtgtgacgatagcgacaccggctcctctgaaaatagccataattcatcctccttgatagctttttacttgccgattttatcgagcaggagttctgcgatctggactgcgtttgtggcagctcctttgcggatgttgtctgcgacaacccagatattgataccgttttccacgctgaagtcgcgtcttactctgccgacatagacttcatctttgcctgcaaaatcacgggcgagagggtagacgctgttttcgatatcgtctaccagattgcatcccggcgcggcggcgagaatctcttttacttcttcaatatcgaaaggcttttcaaattcgaggttgatgctctcactgtggcaggagaagacgggtacgcggacggtagtagcggtaactctgatattgtcgtcgccgagaatcttgtgtgtctcgtcgatcattttcatctcttcttttgtatatccgttgtcgaggaatacgtcgatctgaggcaggcagtttcctgcgatcggatgaggataagcgaccatgatatcattgcctttcagtccttcttccagatctttgattccttttatgccggaaccggataccgcctgataggtagagtagacgactctcttgatcccgtatttgtcgtgaagcggcttcatcggaaccatcgcctgaatcgtagagcagttcggatttgcgatgatgcctctgttccagtcgatatcgtacggattgacttcaggtacgacgagaggaacttcgggattcattctccatgcgctgctgttatcaacgacaatgcaaccgtgtgccgcggcgatcggggcaaatttttcgcttgtggaaccgcccgcggagaaaagcgcgatgtcgataggtttgtcgaaggaattctccgtcagttcttcgaggacgtattcctgtcctttaaatttgacggtttttcctgccgatctgtaagatgacatgacatacagattttcgatgggaaaatctctttcctcgagcacctttaaaaaagtgcttccgacgagaccgctggcccctaccacagcaacattaggttttttcattgataagtcctccaatgtctatctaattataatgtgtttgtgactttcgctgattacagcgtataatttatcgtattattatatacttttacaacgtgaaatggaatagtaaagagaaaataaaacaaataggcggcgataacctctgctgtcgccccattttcgcagcagcggtctttttaccataaacatatgcggccgggaaaaaattatgtgtgatttccgacggcgggaatttgtcggaagaaaacgaagggcggtgttcaaaatggtctgagaaagctgacaaatagaatatactgtgataaaatatattggattttttggagactgcaggagacggcccggcgtcgcaaaagtaccgccgcggagcgggaatgcctaagaaggtcgggtttgtgcggttttcgctgttatttcataatttatacctatttaaatcggagcagagttccgacagattcgctcgattggagcgtgcggccgattttagcatagtgccggggattctttctcttccggtttctgccagagatcgcgtttctcgcagagatacggggataacagaggcaggtcatcagagctgtgttatatagggacgtgtttgactgatgaacagggggtatcagacatgagtatgattgaatcgataattctcgggctcgttcagggccttgccgaatttcttcctatcagcagttccggccatctggcggcgctgcagcattttttcggcatcagttcggacaatgtgctgacatttaccgtaatgctccattttgggacgctgatcgccatcttcgtggcctactggaaagatatcgtggatctggtgatcgaactgtttgctacattgaaggatctctttaccgggaaagggcttcagatgaataaaaatgagacgagacgcttaggggtgatgattatcatctcgacgattcctacggcggtcatcggacttttgttcaacgatctttttgaatctctgtattcttcgatgctctttatcggagcggcgctcctgattaccggaacgtgtctctggtttgcggagcgtaagggcggcggaaaaaaaggagtaaaagagatgacgatgaaggatgcgctctttatcggtgtctgccagtcgattgcgatctgcccgggaatttcccgttcgggagctacgatggtagggggacttttatctcgttttaacaggccgcatgcggtgagatacgccttcctgatttctattccgtcggttctcggagcgtttatcatggaactgccgtctgctgtcgatgcggcgtcctcggagcagggcatcggtatgggggtgatgatagccggtatcgcggtagccgcggtttccggttatgctgcaatcaaagtgatgattaaagcggtcaccaacgaaaagttgttttatttttcgatctacacctggatcgcaggccttttcctgatcggttattccatatttgccgcaatggcctgagggatacaaagacaccggtgattgcgatcgaatccgcataaaataatgcagaagaggggggtctatggctgatacaggtaagatgaaaaaagggtcggccgcaggcggccggcaaaaaaatacgaaaaaaaactcacaggcggccggaagcagaaagtcctcttcggcggcatcgaaaaaaacaggagcctccggaagatccgcaggatctttcggtgcaaaaaaaggtgaatcgcggctgagggatgagattacagcgatccttctgatcgctgccggcatgtttctgatcgtttccgtgatgacgacggcggcgggaaaattcggcgaagtgctgtcccatggactcaagggattgttcggtgtgggagcttacattcttccattttatattatcctttacggtcttctgattctgctgaagcggatggccagagtcagcgggagaagtatcttttttctcgtgctgatgtatatcgatctggtgacgctgaatgccgtccgtttcgatgcggtgaaaattccgcagttcagcggagaatatctgaagaacatgtatgatctgggctcatctttggaaagcgccggcgcggtgggtatggggatcggctggttggcggtaaaaggaatcggaaccgtaggactggtgatcgtctgctccgctgttttgattgtttctctgcttctcctcgtcaatacgcccatctccgcttttttagatcatcgccgggaaaagaaatatcagcatgctctggacaaagaagcggcggaggaagaagcgaggaatcgcgccagggagatcgaagaacagaaagccaagctgagagaagaacgggctcggatttctgcgtcagatcgggagaaaaggggcagagaaacggctgttttctcagaacctggatttaaagatgagggagtggaaggaatcttgccgggagcggagatgacggaggaacgcgccgaaagagattctgtttcccatagccgtaaaaatgcctctccggtaggcgacgcctttgaccgcctgaagattaagagcatgaatctcttccgcggcgacggaagtcagagcggaggaagcaaacagcctctggcagataataaacggcagattctcgagtatatgaaagatgacagcctgtttgacggcggagctgccggggtgtccggccgcggcctttacggactgacagaagaggacagcgtttttccccgggaaaagtatggaaatttttctgatctggggatggcggaaacagaagcagaggaagaaaaagacctctgtcgggcatttgacgcagaaaaactgtcaaatatgtgtccgagtatgatcgatgacaatgatgtgaaaggcggcacgccggaagttgccgaagagaatacggaaactgagaatttctccgcagatatttccggcgcacaagacggagcggagaacgcttccggtctgtcgtcttctgtctcagctcgcagacgagcgggacaggctgccgattcgaagttatcgaaggctgaggtggaagccgcgatgaccgcaggagctgcagaagtggcgaatcaggcgaatcagacgcctgcgaagaaaccgtaccggctgcctccgccgacactgctcaatgcggtgaaaaagaaagaaaaccgaaatctgaagatcgagctggcggcaaaagcacataaactggagaccgtactccgcgatttcggcgtgagcgccagagtcatcgatgtaaaacagggaccgtcggttaccaggtatgaaatccagccggattccggcgtaaaagtaaacagtatcgtccggcttgccaacgatatcgctctgaatctggaagcgaagagcctgcggatcgaagcgccgattccgggaaaagcggcggtgggcatcgaagtggaaaatgagaaggcggcggtggtcactctgcgggagatgatcgaatctccggattttcaaaaggcggagtcgaaaatcagttttgtcgtgggcgaagatatcgcgggaaattctatcgttgcagatctgaagggaatgccgcaccttctcatcgccggttccaccggttcgggaaagagtgtgtgcatcaattctattatcatgagtatgctgtataaatccacgccggatgaagtgaaattcattctcatcgatccgaaagttgtggaactgggaaattataacggaattccgcacatgctgattccggtggtcaccgatccatcgaaagccgccgcggctctggcgtgggcggtacaggaaatgaatgacagataccgcaaatttgcggagagcagcgtgcgggatctcaaatcctataattcaaagatgaaaagagaggatcagccggagaacgtgctgccgcagatcgtcatcatcatcgatgagcttgcggatctcatgatggccgcaccgtcgcaggtggaggaatccatctgccgccttgctcagctggccagagcggcgggcatgcatctcatcgtagcgacccagcgcccttccgtagatatcgtcacaggtctgatcaaagccaatattccttcgagaatcgcttttgcggtatcttcgcaggtggattccagaacgatactggaccgggcgggagcggaaaaactggtgggaaaaggggacatgctctttaaccctatcggtaaagcgcaggcagagcgtcttcagggcccgtttgtcacggatgaagaggttaacgccgtcatcgagttctggaaggcacaggcggaagaatccgacgggccgaaccggatcatggaatctatcaatacggtgaagatcgatatcggcgatgaggaagaagaggacgagcttctcaacgatgccatcgagctggtggtcaatgcggaacaggcctccgcttccatgctgcagcgccggttccgcatcggttataaccgtgcgggacgtctggtggatatcatggaatcgcggggaattatcggtcccagcgaaggcagcaaaccccgcagggttcttgtttccaaagaggaattttatggcgcaccgacagaaagggcggaagacggcgggatactccctgaagatcagccgttttccgaccagatcacaggagagcaggagacataatgaagattttttttaatacactgggatgttccaagaataccgtcgattcagaaaatgcagcggctctcctggaggagaacggtcacgtcatcgtggattctcctgaagaagccggagcgatcatcgtaaatacctgcggttttatcaacgatgcaaaagaggaatccatcgacacggttcttgagatggcggaatacagagaaaaaggtacggttctcatagctgccggatgtctgacgcaacgctatgccagagatctctacgaggaaatccccgagatcgatatattgctgggggtcaacgagtatctcagactgccggagattctgaaggaatatcaggagcagaaaaaacgcgtttccgtcatcggcagtgcggcgaaagattattgcgaaattccggtacgccgtccggagccgggtgcgtattattcctatctgaaaatttccgagggatgcgacaaagtctgttcgtactgtatcattccttcgattcgagggcattaccgcagcagaaagatggaagatatcgtgagagaagcagagttcctcgcgtccaaaggctgtacggaactgattctcatcgctcaggatgtaactgcttacggcatcgatctgtacggagatctgattctgccgcagctgctcagaaaactctgcggcgtcgaaggaatccgctggatacgccttctgtactgctatgaagacgaaattacagaggaattgatcgagacgatccgcagcgaagaaaagatctgcaattacctggacattcctctgcagcacgtcagcgacagcgttctttccgatatgaaccgtcattctacttctcagtcgattcgcgaaacgattcagcggctcagagcggaaattccagacattcatatccggacgacgtttatcgcgggatttccaggggaatccgaagaagattttgaggaacttgcagattttgtggaaaccgtaaaattcgatcgcatgggtgttttcgcttattctcaggaggaaaatactctggctgcggagatgaagcatcagatcgacgaagagacgaaaatacatcgtcgggatacgctgatggaaattcagcgggagatttccctgaaaaataatctggcgaaagtgggcggtgttttcgaagtgatcgtagacgaaagagaagaaggcgatacttatctgggcagaaccaggtttgacgcgccggagatcgacaacggcgtcattttcacctccgaaagagagctgattcccggagagtacgtgtatgtggaaattacggacgctttcgattacgatctgtcggggagggaaacagcagctccgaaacaggatggagaccatcggccggaagtcgtttagagacggcagttcagaagtcgaaaaaatgctgtcagattcggatatctttgcggtttccggtgccgggacacagatctcccgacagaggcggcactgtcagcgctgtatttttcaagaaagataagaaagttcgaaaagaagaaaggcggaacgagttttatgaatcttcctaataaactgacgacgatgcgtatggcgctggttcccgtattcatcgtcctgtatctcatggactatcactataccgcggccgccgtgtttatcgcggcgtcgcttacggattttctcgacggtcatctcgcccggaaacataatctggtgaccaatttcggcaagatcatggatcctctggcggacaagcttctggtgacttcagctctggtgtgcatggttcagacgggcgtcgttcccggatggatggtcatcgtgatcctggccagagaatttgccatcacaggtctccggtctgtagccgccagcgagggagtagtcatcgccgccgcatggtccggtaagataaaaacggtgacgcagatgatcgccatcattttccttctcatcggcaactggccgtttgaactgatctctgttccctttgcgcagatcatgctctggatcgctgtgatcatgacggtttattccggtgcagaatatatttacaagagcagggaacttttccggtcgagatagttttcggtacggtttctgtttctatatagtggaagtgatcggatactgacagtgcggtgaacggatggttccggataaaatgaagccggcgctgcgctgttgacaggtgaaatagaaaaaattcagaagaaatgcaggcaggtgataaaaatgaaatcagcgattatttcggtgggaacagaacttcttttcgggcaggtggtcaataccaatgcggcttatctctcgcaggagttgaatgagatgggggtagacgtgctgtatcactatacgatgggagacaatcccggccggctgaaaagcgtaatgcagttcgctatgcaggactgtgatctctttctcatcaccggcggtctggggcctacggaggacgatctgacgaaagagacgctctgcgagcttctgggggaagaattgattctccacgaaccgacgatgcagatgatcgacgactattttgagcgggtctggtataagaagacggaaaataattataaacaggcctacgtgccggagcacgcgtctgtttttcagaatcataacggtacggcgccgggattcgcactggaaaaagacggaagaactttcatctgtatgccgggcgtaccccgggaaatgaaacggatgtttcaggacgcggtgaaaccttatctgatgaaactggcggacgcgtatattatatcccggtcgctgaaagtcttcggcgtaggagaatctctggtggaaaccatgcttctggactttatcgacggtcagacggacccgacgatcgcgacgtatgccaaagagagtgaagtggagatccgcattacttcgaagcgcaggcggaaaaaagacgccgctgcggcagtagacgagatggcagccggtgtggcggaggtgatgggcgacagtgtcttcaccatggacggggaggatctctatcaggtgacagcgaaaaaattagccgaggcaaaggtttctctttctctctgcgaaacggtaaccggcggagaaatcgccgcgatgctgtgccggtatccggactgtgcggaaatcctggattgttccatcgtcgtgcctgcggaagaatttcaggtcggcgaactgtcggtttccagagatcttctcgacgaatataccatttacagcgcggaggcggcggaagcgcttgcggaaagtcttttccgcaggacgggcagtgctctgtgcctttcggtgacgggaaatgccggtcccgattactgcgacggcgtggagccgggaactttctgcatcagtctgctgtatgacggtaagatgacgacgcggcgttatgtcaaaagtttcagagaacggaatctggctatcgaatttatggcacgcagcgctctgaacttcgtgcggctgattctttcgggaaagacgcctcaggagagcctgtaaaattattggggcgcagcgccgatctccgcttccgtaccggcggcgtgtaccagagaatatggagtgaacgccggcccgcagaaatttctgcgggccggcggttttgctgtttttctcagtatttaatgattttgcggttccgttagagaggagaaatcgaaagttccggacatcgtagccgggagcagagaagaacagccggatttctcgctgtatctctgaaggagttttcaatgaaatatatgttttttctgtcagctgagtctcatataaagcagaggatagggacctccctgctcatcccgttctgttcttttatagacggtaaatcccatgaattcatagaactctttcgcggcgggattttgttcgttgacgcatacttcgcgaacgccgaagctgtcgataccgtattgcaccaggcggcttccggagccttttcccatctgctccggagcgagaaacaacatttccagtttgccttggccgattcccataaatcccgctaattccttttgttcatcccgcagtgcgatcaggtgggggatttctctcagagcgcgtgggacgaaaccggagatccttcggatttcctcttcgctcagaaacagatgagtggaccgcaccgaactctcccagacttccgtcaggcgggaaatcagcgtttcggtccggcgatccggcgggataatctgaaagtccgggaagaattcgctttttccgatatggttcggattcttttgcagttctgtattccgcatatattttcctttccttatttataacataatacgcttagttagcattctatcagatctttttcctcaatttaaagtcttattttcggtctgctgcggtttttctctcagacaaacttcgaactctgccgttcgggccggaaatgaaagggcggaggaacgcgtcgggatcaggagggaggttttcaggagcgcaggacggtattcgcagaaagaaacgggcgatttcggattttttgacgctctcggcggatgaaaggaggcggaacagttgacggtagaaaactaaaaaaagatttacatatatttacaatttgcggcgggaatgttaaaataaaaagaccttgaccgggatgagaaaaagagttatcataaaataagaacgaatgttctcttaataacgttaagacgaaaggataacatacatatggctgcatcaaataaaacgacgataaacagagtgaccgacgatcatttcgataaggacaaagcgctggaagccgcgcttcagcagattcagaaacaatacggcaagggcgcgatcatgaagctgggggagagcggcggactcaatatcgagacgatttccacaggttctgtcagtctggatatcgctaccggcgtttccggtattcctcgtggtcgtattacggagatctacggaccggagtcttcgggaaagacgacgctggctcttcatatcgtagcggaagcgcagagaaccggcggcagagccgcatttatcgacgcagaacacgctctggatccggaatatgctgcaaatctcggcgtagatgtgggtgaactcctggtggctcagccggataccggtgagcagggattggaaatctgcgagatgctggtgcgaagcggcgccgtggatgtggtcgttgtcgactctgtggcagcgctggtgccgaaagcagagatccagggagagatgggagacagtcatgtgggccttcacgccaggctgatgtctcaggcactcagaaaactggccggagctattaacaagtcaaaagtttccgtcatttttatcaatcagctgagagaaaaggtggggatcatgttcggcaatccggaggtcactaccggaggccgcgcgctgaagttctacgcgacgatgcgtatggatgtgcgcaggatcgaaagcattaaatccggcgatcagatcgtaggaaacaggacgagagtcaaaatcgttaaaaataaagtagcgcctccgtttaagcaggcggagttcgatatcatgtacggcagaggaatttccagagagggcgatacgctggactgcgccgtagagcgcaagatcgtggacaaggcgggcgcgtggtacagcttcgagggcaatcgaatcggacagggaagagaaaatgtaaaacgttatctgtccgaaaatcctgaagtcctgaatcgtatagagtctctgctgatggaatcgatccggcccgcaaagaaggaggacgtccaggtggaagtggacggatttgcatcggagaatccggaggattttcttcctcagatcgatccggaaaccggcgagattatcgaatagataggagcagcgaaaaactctctgagaaccggtgaatattattgacactgtgattatcgtatgataatatggtccggtaagccgctcgagaagggcgaacaacagaaatgccgaaaggctgccctgacggcgagtccgggaagaggaggtaaagaatatgtacgcagttgttgaaacaggcgggaagcagtacagagtccaggaaggcgatgtgatcactgtagaaaagctgaatatcgaagacggcgccaaagttgttttcgataaggtgctcgtcgcaggtgaaggtgctgatattaaggtcggcaagccgtacatcgaaggctgtactgtcgaaggtactgcagttgaaagcggaaaaggtcctaaagtagtcatcttcaaatacaaggcaaagaaagactacagaaagaagcagggacacagacagccttatacttctgtcaagatcgaatcactcaatatctaatcgattctgacatgatggaattttgccgagccggacaggccggcggtgatttcatgcaggcggtttggaaaatctgtcattttcagattttccgtcgaaaagcttttcgaaacagaatatccatgttatagaagagacagcacagaatagaggaggtgtgatccatggcaagtaagaagggtgtcggcagctcgaagaacggtcgagacagtgagtcgaagcggctgggagtgaagagagctgacggtcaggtagtaagcgcaggcagcattctcgttcgtcagagaggcacgaagttccatccgggaacgaatgtcggcagaggcggagacgatacgttattcgctaaggttgacggtacggtcaagttcgaaagagaaggcaagtccagaaaaaaggtaagcgtttacccggtcgaaatcgaagcttaaaattattcagaaatcagaaagcccctatttttaggggcttttttcttgatacgaaggaagaaaatacgaaatatccgcgctaaaagagtgcggatcaggaaaagacgggaggcggaagatgtttgtagacagagcccggattacggtaaaatcgggaaaaggcggaaacggcagcgtttcgtttcgaagggagcctttcgttccggaaggaggtcctgacgggggagacggaggaaagggcggagacgtcattttcgaagcgaataacagttacagaactctgatggatttccgctacaagagaaaatacgaagctcctgccggtgaagacggcatgaagaaaaaaaaatacggaaagaacggtgaagatctcgtcatcatggttcctccgggaacgatggtgatcgacgaacttaccggtctggttatgaaggacctggttcgccacggtgatcgcgtagtagcggttaaaggcggaaaaggcggaaagggaaatgtccactttaaaaattccgtaagacaggcgccgaattttgcggaagccggcggcgctgccagagagcgcgctatcgttctggaactgaagctcatcgccgacgtggggcttctgggtttcccaaacgtaggaaagtccacttttttgtcggtatccaccagcgcaaagccgaagattgggaattatcattttacgacgattacgccgaatctgggggtggttcacctctacgatagcagctttgtcatggcggatatccccggactggtggagggcgcgcatgaaggcaccggtctcggtctggattttctcaagcatgtggaacggacgaaggttctcattcatgtagtcgatatcgcaggttcggaggggcgggatcccatcgaggattttgataaaattaacggcgagctgatgaaatattcggaaaaggtgctccgaaagccgcagattgtggtggggaataagtcggatctcatctatgatccggaaaaggcggaagaattccgccggtatgtggaaagcaaaggttatccgtttttcctgatgtccgcagccacttcccagggcattaaagaagttctgtctgcggcggttcaggccctcagtacagttgaggaggaagaagaacccgtcgaatatctggaggaggattttcacggggaagatccggattacagagaaatctacacttatgtggacgagcgggacggagcttatgtcatcgaaggaaaacagctcacgaagatttttaattccacaaatttcaatgacatggaatcacttcgctatttgtatcgctatattgaaaaaaaaggagctgtcgcggaactcaaggaactgggactcgaagagggcgatatcgtgagaatcaaagattacgaatttgaatattcggaagagtaagtctgtcagaacgacaaaagcgccgtgaacgtacgtttcccggcgcttttttgatctttgttttttcgtatcctcagtgatccgccggatcatccggttcagcggaaatgagaacggaaaactgttttattgcagcaaagaacattgggtcggtcggcgttttcatctgcggctgtgtgaggctttgtggatactcaaattgtatttgtgaaaacttttcgacaaagtataggaaatcgtcgaatatttctgtatactgtatggataatgatgaaaaggataagaatacatcagatatccgaattcgtaataatatagatggaaaggatggtgcgggtttgattacacgggaaatgtatgaagaagcggagatgaaaaatctttcgtcctgggcgacgaagtcggcggaatccagaggcaggatcgaacaagaggctccctgccagctgagaactgcatttcagcgagaccgggacagaatcattcattcaaaggcgatccggcggctgatgcacaagacgcaggtgtttctctcaccggagggagatcattttcggacccgtctgactcacaccatggatgtggcgcagatttcccggacgatcgcccgggggctggcgctcaacgaggatttgacagaagcgatcgctctgggacacgatctgggacatacgcctttcggccacaacggagaggaatatctggcgatgcgccatcccgacggctttcatcacaatgttcagagtcttcgggtggtagacattctggagagtatgccgggaagccgcggactgaatctcaccgcggaagtcagggacgggattctgaatcattccggatctgagaaaccctttacaccggaagggtgtatcgtgcgcatcagcgacagaatcgcatacataaatcacgacatcgacgatgcgatgagagccggcgtgatacggaaagaaaatcttcccagagattgtatcgaacatctgggagaagatcaccggacgcggattaatacgctggtactggatatgattcattccagcgaagaacggggagagatctgtcagagcgaggaatgcagctactatatgaataagctcagagaatttatgtttgagcatgtgtacaaaagcagagtggtaaagcaggatgcggaactggtcaaggtcaagcatctcatctttactttatacgattattttatggaacacccggagaaaatgccggatgaacatatcgagatgctctatctgtatggaccggaagaagtggtgaaggattatatcgccggaatgaccgaccggtatgcgatcagcgtctataaatcgc

SEQ ID NO: 798 - DNA, 2784 bp, Unknown
  16S sequences of unknown bacteria
gctctaccgccgcgtctttttctgcggcgctgcgttttctaaaattatcaaactccgcctgcagccgcaatgcctggtcttgccattgttcagccttttgctctgcctccttggcgcttttcagcgcttcgtccgcggttttcaaggcctccatcatctgctgggccgcggccttggccgccgcttccagcgtttcctcctttgtctgtgcgctttccgcctgcgccggcgtttcctgctcggccgcctcgtcggccgtttcggcctgggccgccgtctcttcggtgtttacttccttttcttccggcgcttgctttttctcttttttcatagtgggaaatgcccgcctccttttttccgcttttgctattctctatctttgggatcgcccagcatttggtccatgcactgggtcaggtaattcatgatggccaagacgcgcgcgtaattcatacgcgtcggcccgatgacgccaaacgacccgcactgctgcccgccgacggaataggtggcggttacgatggaggaatccttgagcgattcatcctcgttttcgctgccgatggagatatggatctgcatctgctgggcctggctgagcatatcgtaaaacaattcgcgggtatccatggcggccaaaaaattctgtgcgcgctccaggttgttgtattcctggtgcttaaataggtttttcgtgccgtcaaagacgatgctgcgcatcttttgcgattggttttggtggcgtacagattcgatgagcgagcggaacacgccttcgccgttttttacctggccgcgcagtcgctctaccacctgcggcaggtcttggatggtcttgccgcgcatctgctctgtcaacgcgttggaaacggtttccaggtatctttcgtccatctcctccgggatggggatcaaaacatccttgacaaggccgccatccgtcacaaacactgccagcgcgcggccccgcgtcacggggatcaggcggatctgctggtagcggatgttccgggtctgcggcggcagcaccatcgccacataatcggtggtttcggaaagcacgcgggcggtggtggtgatgacatcgtccatatgccccaaagaggattgcaggtagccgcggatcttttccgcttcctcatggcttagctttggcacctgcaaaaagcggtcgacatgcagccgatacgccgcgtcgctgggcacccgcccggcggaggtatgcggctgctccaaatagcccatttcctccaaatcgctcatttcgttgcgaatcgtagccggcgagtaccggccgccccacatgcgggaaatcgtccgcgaaccgatgggcatgccggaaacgatataatcgtcaacaatggcctgcaaaatgcgcagcttgcgttctgataaatccatggcatactcccttccggccgtttacgcggtcttttttgtttgcccctgcgggcgttgttagcactctttgttgtcgagtgctaatccatggtttgagaatagcacgttctcccccatttgtcaacgggagactgtggcatttttgtgaaaaatccagcggcaagctgccgcagtctattccggcccgtctttggcggattgcgctctgcctgccacggggccgctttgccagtttggcctaatttaccgggcggctgtggcgatgccggcccatccttggcgcaccgcttttccatccgccgaatgcctttatccaggccgtggcttgggggatttttccaggcttcgttatacagtatttacgccggagtgggaaatatacaaggagaataagaaaaaaaacacccggcaaacggatgtttttcatgctttgcgccatcggcgtatcagcgggccctgtcctcgccgtccggcacgatcttttggcagcgcgccatgtgctgaatggcggttaggtagccctggataaacgcctgctccctggcgtcgttcaaatagtcttcctctatctcgcaatatttcaaaaacagccgtctttctgcttctgagagcgtagagatcagccattccccgtatttacacatacggtctatgctcatctgcgcttcgctctgcgggctcacggtgggctgggccgggtcgatggtatgccaaaacatgcgtttcaaggttttttccagcggctctgcgccaacgcgcggctgcggctctgtgagccgttcaccctggaaatccgtcgtagacggcgccatcgtttctcccggttcgttggggactattttcagcatttgatcatctcccttttggaacgccacggataggtggccttataaagtttgccctgtgtttgtaacgtaaactggcttttataggaggtgtatccgggtggtaaaaagcctttgcgaacgcattaaagagctgcgcgaagaccatgacctaactcaatttcaggtcgccgaaatactgggctgtgccaaatatacctatcagcgttatgaatacggcgaattgctgctgccaacggataagctggagattttagcggattattatcaaacctccaccgactatatcctaggacgcaccaacgtggcgcatccctatcccccagcccggtaaacgcctgttttctgtttactgtatgcgccgggccgcttgtcctatgccaaaaggcgtcaacatctcgctttcacagggtatcgcccatacatagtagcattattttgccaaatgtcatcattttcgacaaaaaaacagaaatatcgcaatatattttgtgttttcccccggtttttgtctcaaaatgcgtgtgggctgctgtgg

SEQ ID NO: 799 - DNA, 8095 bp, Unknown
  16S sequences of unknown bacteria
gctcggtcggctcgccgtatccgcagaagacaagctccgggaatttctcgggcgagcggcgctcgatatcggcaaggatctcctcgcgggtcggctcgcggtcgagccatagatcaccgtaaagcgcctcgccatgggagcgtacgcagaagtcgcaggtgtttgagcagcggttcgtggtgttcacgtagagagaatcaccgactgtgtaggttatcgtcattttatcatcactttcatatatttatctttatcagccttgtgcggcgttgttttttactggtataaaaaagccgccggcgtgcggcggctttcagcctgattgctcagacaaatctcggcgggatatgtactgcccgccacagactctgcgggacttccaccaattatcatcggaggaaagcccctcgccacggaaattattcctcgggcttcggagcctctacgggacatacgccagcgcaggtaccgcagtcgatgcactcatctgcgttgatctcgtacttgccgtcgccttcagaaatgcactttacaggacactcctcagcgcaagcgccgcaggcgatgcactcatcaccgatcttatatgccattttgtttacacctccgtttgtttgatgtgattattattgtaccacaaatttttcaaattgcaagcctttttgaaaaaatttatatattttttacagcttgaatcaattacaccgccagacacagtcggaaatagtatcatactcacatatccgcagcgcgaactctggtcttcgccgcggataatatcattctgtctgtcagccgttcatgccggtgccggtctcttcaaccgatatcacagtctcctcgacggtttcggtcacagcggagctttcagccgtatccgccgtattcgcgggcttctgcctctgatcgtcacggcgctgcctctgcggctttgatgactgttccttcggctgctggtccttcttgtcctgtctgtcctgctgtctcggacccttgctcttctgacctatgaccgtgacgtcgtcgcggtggaaaaccttcggcgcggcgtccggcttatcggtgaatcggacgcggacgagtccggcgagcggctgcacctcggtgacgatgccttctccgtccggagtggatacgatctgatccgccttcggcgtgcggcgtatctcctcctgatacgtgtcgtattcatatctcagacagcacatgagccttccgcaggcaccggatatcttgaccgaattgagtgagagattctgctccttcgccatctttatcgacacctgtacgaaatcggacaggaaggtcttgcagcagaacggtctgccgcagataccgataccgccgagaagcttcgtctcgtcgcgtatgcctatctgtctcagctctatgcgggttctgaacaccgccgcgagatccttgacaagctcacggaagtcgaccctgccgtccgccgtgaagtagaacagcagcttcgagttgtcaaacgcgtactcgacgtccacgagcttcatatcaagcccgtgttcgacgatcttcttcgcgcagacatctagagcttcctcggcgcggcggcggttctcgccggctttggcgatatcctcgtctgtcgcgcgcctgacgacctttctcagcggaagaacgacctcacgctcggttaccatgcggttctggagcccgacggtaccgaactccattccacgcgccgtgtcgactataactgagtcgttgcacaggaaccgcatgccgtccgggtcgaaatagtatatctttccgccgctcttgaagcgcactccgatgacctcgatcgtcggaaccagaaccggcggttcgggaatatactccgtgcgtacatcctcggtttcagccgtgtccgccgcgtaagcgtcctcctgtgcggcggtatcatcaggaatatcggcggtctcaaccgagttcagctcctcgattatctccgcctccgagggctcgtccgtaccggcagctcccgccacggcgatgtattcggatatagccgcctcttcctcagagatatcgtctatctccgcggcgctgaggttcttctgctcctctcttgcgccggagcggcgactccttccgcggcggctcttctgcgggcgctttttctgctcctgggcggaacggttcgcggggcgttcttccggcttctccggggtttcgtcaggaatcacgcgctcctccgcgtaatccggcgcaggggtattctcctctgccgtctgtgcatccgttctgaccgtgtccgggcgctgaccgttatgattcttcggtctgcggctgcgggggcgcttcggcctgttctgcggttcctgatcagaagaacgcacagactgtatggactgttcaggacggtcctgacgctgcggctcctgctttttctgctcgttctggcggcggtcctgattctgcgggcgcggcttctgcctttcctgctttggctgatcctgccctgtcgcgtcaggctgacgcttttcggggcgttttctttcctgacgcgggcggcgctcgtcctgctgacgcggctccttgcggtctccgctcctgattatcgctcctccgtcactgtcggctgacggcgggaggtcgtagcgtccgggcttaaccgttatcgagccgttcggcgacgactcctcatactgcgcgctgtcattctgacggcggcgctgatggaatttgtggttctgtccctttccgccgttctgacggctcttgtcaccgcgctgtgaaccctcgcgcggctcgtttgtgttgctgtccatttatctttaccagctcattttctgagcgtttcctttcgcttgtgtttatcttccggaaatgtcgagcgcgaaccggctcatgacaagtcccgtgttcatgttcataccaagcccgcgcacagcggtcgccgccgcgtcacagagtcggataagcagcgtcatcgggaatctgtcagcgagctccgccgcctcactcttatccgcgaagaacagcggtcccgcgcccttcgcgagctttacggcgatgaggtcgcgcgcggcgtcggctgtcagcatgtataccgacgacagctcctcgcgctgttttgccggagagatcttcgctccggactcagtagctttcgttcccttcttcgacttcggctgcgggatgttcgacgagagtctcgcggcgtactcgcgcagcttcaggtcccctccgggagcggtgcggtcggcgagcagccttatcagcttggccgcgcagccccagagacgcatacactcctctgactcctccgggtcgcagagcctggtcgccctcccgagacttccggacgacagcctgaccgccacggcaaacgcctgcgggtcagactttttcaatgccgccgcgttcgcgtcgttttccgagagccagtccgatacgacgtcatccttcagagcctcggttctgagaagcggcgcgcggctccgtatcgtcgcgagcaatccctgcgcgttctcagtcagcagaaggaacctcaccccgtccggcggctcctcgagcagcttcagaagcgcgttctgcgcctgtatgttcatcgtgtcggcggcgggaaagatgtatgtcttcgtgtcaagatcgttcgcggcgaacacggagtcctcgcgcagacggcggataacgtccacgccgagttgaaccttgccgctctccgcctcgaccgttataacgtccggcgactgtccgcgcattattttgtcgcaggagacgcatttcatgcagggcgggtcgctctcacggcaggcggcagccgcggctatcagcttcgcgagcgtcttcttgccggagccctccggaccttctatcatgtacgcgtgggcgagccttcccgccgcgatatcgcgctcaaggcgctctttcaacttctcattcccgagaaagccgtcaaaaccggacactgttccacctccgcaccgtttttatgactatgcctttcgaacaaagctattttgtctggaaatttattttcagactttctccgcggcaaaataccgcttctataattatatcagattttttcacgcttgtcaacatcaacagagccgtgacgccgatttattttccccaatttccgtgttttttcgctttggaccgacaggcggacagcgtgaccggtcgcttggagtcgttcatatatgaatgatatgtaaattaacacgtaaaaaaaagtaatatggcacacactggcgtatattaaatatataacgccgttgggggatggatcgtcttacgaattttcatttttcgcggccgttcagcgatgcgggggaggtgtgtccgtttggaggacgttactacagcgtcgcgcatacgcggagcgatcggcgccggactctcgccgttcgcgttccgtgaggaaaactcgatgggacgcatgagacccgagaaagagtcagaactccgctgcgccttccagcgcgaccgcgaccgcatcatacactcaaaggcgttccggcgcctgatgcacaagacgcaggtcttcatcgccccggaagaggaacactaccgcacgagactcactcacacgcttgaagtgacgcagatagcgcggacaatcgcgagggcgctcttcctgaacgaggatctgaccgaggcggccgcgctcgggcacgacctcggacacacgcccttcgggcacatcggcgaggaagcgcttaaagaatgctattcagaggatttcacacactataagcagagtctcagggtcgtcgaccggctcgagaaggacggcgaaggtctcaatctaacgtatgaggtccgggacggaatcctgaaccatcagggcgacaacctcgcgtcgacgcttgagggcaggatcgtgaaattcgccgaccgcatagcgtatataaaccacgacatagacgacgcctgccgcgccgggatactctcggagggcgacattccggaaagactcagaaaagccctcggcggcgaccactcgtcgagaataaacacgatggtgacgagcgtcgtcaggtactccgaagggcttttcgataaagaaaagccggatatcgcgatggagccggagatacgcgcggcgacggacgaactgcggggctttctgttcgatcgcgtctattacagcgacacggtcagagcggaggaaaagcgcgctaagggcgtcgtgacaatgcttttcgggcatttcacggcgagtcctgaagagatgccggagctgttcgtcaggatgacaaacgaggaaccggtcgagaggtgcgtctgtgacttcatctcgggaatgaccgacaggcacgcgatacggcttttcagccgactgttcatcccgaatacatggagtgagagaggtacgtattcatgattccggcggaaataatcgaagaaataaaattccgctgcgatatagtggatgtaatctcgggctatgtgcaactaaagcgcgcgggctcgaactacaacgggctgtgtccgtttcatagtgaaaaaacgccgtccttcacggtgttcccgtcgacgaaaaacttctactgcttcggctgcggagcgggcggggacgtcataaccttcatgatgaagcgcgagaacctcgactaccgctcggcggtcgagcttctcgccgcgcgcgccggaatcaccctgcctgaggacgaaaaaaaacctggcggaggtgagtcggtaaagcgcgaacggctcctcaacatgaaccgtgaggcggcgagattctatcacgcgacgctctacagcccggcgggcgcgccgggacttgagtatctcacaaagcgcgggctttccggggcgaccataaaacacttcgggctcggcttcgcgccggacgggttcagctcgctgacgccttacctcatgagcaagggctatacggcggaggaaatgtccgcggcgtttctctgcgggatatcgaagaagaacggcagaccgtacgactatttcaggaaccgcgttatctttccgataatcgacgtcgccggaaacgtcgtcgcgttcggcgggcgggtcatggactcgtcggtgccgaagtacctcaacacatcggacactccggtgttcaagaagagccggaacctcttcgcgctcaatttcgcgaagtccgtctgtgccgaaagactgattctctgtgaaggctacatggacgtcatagcgctccacgcgcacggcttcgagtacgcggtcgcgacgctcggcaccgcgatgacgccggaacaggcgaggatcatgtcgaggtacacaaagcagattatcctctgctacgactcggacgacgccggtcagcgcgccacggcgcgcgccatgaagcttttcgccgaggtcggactcgatgtgcgagtgctgagaattccaggcgcgaaggaccctgacgagttcttaaacaaagccggaccgaactcacacgagaaattcaagctgctgctcgaccagagccgggcgcagttcgagtacaagctcgagaacgtcctcgcgagacacgacataaagataccggacgagcgcataaaagcggcggacgagctgtgccggataatcgccggtataagctcgaacgcggaacgcgacgtgtgcgtcggcgtagtatccgaaaagctcgcgatcccgcgggactcgctgaacaacgatataaagcgcataatgaacgcgcgcgaccgttcggaaaagcgcggtgaactcgagaagataatccgcgagacctccggactcggagaccgggtcaacaccgactcggtgaagaacgccgggatagtcaatgttgaggaaaatattctcggcatactgatgctcttcccggagatgatcgttaaggtgaagaacggaaaacttccgctcacgtcggaggatttcttctccgagttcaaccggaaggtcttcgacgagatgatgctcaggtgctccggcaccggacagtttgatttcgggaccctcggagaggtattcggagccgacgaaatgggcaggataacacatatggcgctcaggcgccggcagctcaccgacaacggcgagaacgtgctctctgaccttgtcggaaagctccgggcggacgcggagatgagacgtctcgagaaatccggcgacaaaaacgccgagatcgagagagtgctcgccgcgaaacgcgcgaaaaagaaataaacgttacataaatccgcgggaacagcgtttccgtggggaaaggcagaaatatatgaacgagaaagacgtaaagacgactcccgaaaacaccgacggtgagaaggacgaactcgacgaggacgaagaaggcaaattcaatgtgaacgaactcatcgcccgcggcaagagcaaaggcggttcgctcacctctagcgaaatcatcgaggctctcggagacgcggattacgacatcgaccagatcgacaagctgtacgacaacctcgagtcgaacggcatcgaggtcaactacctcgacagcccggacttcgcggatatcgaaagcgagatcgagcagtacgagtccgcagaggacatggagaagatgctcatccaggagggtctcgcaatagacgacccggtcaggatgtacctcaaggagatcggcaaggtgccgcttctcgacaacgacgccgagcttgtgctcgccgaaaagatggcgcacggcgacgtcgaagcgaaaaagcagctcgtcgaagctaacctcaggctcgtcgtatccatcgcgaagagatacgtcggcaagggtatgttcttcctcgatctcattcaggagggcaacctcggtctcatgaaagcggtcgacaagttcgactacagaaagggctacaagttctcgacctacgcgacatggtggataagacaggcgataacccgtgccatcgcggatcaggcgagaacgatacgaatccctgtccacatggtcgagacgatccacaaggtctcccgctattcgcgtcagctccttcaggagtacggccgcgaggcgtccgccgaggagatcgccgagaagatgggcaccagcgccgacaaggtccgcgagattatgaagatagcgcaggatccggtctcgctcgagactcctatcggcgaggaagaggacacgcatctcggggacttcatccaggacgatgactctccgataggagtctcgagc

SEQ ID NO: 800 - DNA, 32759 bp, Unknown
  16S sequences of unknown bacteria
tccatttgtagtagcggtagtttgccttcatgtggtcgctgtactcttccttgacaaactcgccttctacgccgaagtaggcaacaatatcctcgtaagtagcatcaaaaatattattattgacctcgttcatccaaacgtagcccttttgtacctgctcctcagtcacgatgccgtttccgccgggagctgccgcattcgtctggttggtcggagcattctcctccgaaacaccttctccgatggcatccggcatagacttgcctgcgtcaatcagaggcagataccagtcggtataccggtagggatacgcatcttcctccatgtctttccaataaagaccccacgggcgcagataaatgtcatagtggaattcgtcatcgccgtcttcatagtcgccgctgatacagatcatatcatcgtagtccaaaagaccggggtcaacgatccaatcggcatgctccagtgttacgtttgtaaaccagccaccctcggacatcaccgtgccgtgctcgccggttccggcttcactcagactgacctgcgcggaagccataggtttggatctcgtgtagtcctcatcccaaagctcgattgtgcctgtgtagtctgtgtctaaatcaatgacgccgcagacatcccaccagtcgccttccatgctttcataatcgccgtagcaaccgctcatcttccaccagccgtaccattcgccgttccaccaatcgagcaatgtgtctccggtcgtattggtggtttccggttccgtatgggagactgtttcccggctgagcgtagccgggtcaacggtgattgtaccttttttgctgccgagaaattcctcaaaggtcgctttgacttcactggtcgtgtcttttagcacgaaagctgtccgcacctccagcgttgcacccggcgcaacatccgtaaactgatcgctcactatggtttcaaggttctcatagtccgtgataatagatgcaggttccagctctacaccgttttgcataaccgtctcatcgacactccagagatatgaggcgttttccttgctgttgtttgtgaaatccagtgtcagaacgattgcgtcgtttccgtccgaatcttccatgatgcatgcgcccttgtagagcagctcatagtcaccgagcttgattaaattggagtctttcccctccttatcctttccgcaggcggtgaggccgctgagcagcatcagtgccgtaagaatcaggcatagaagcttggtcttcgtctgtttcataatttcctcccaatatccttcagggttgcacaaatctgccgatcagcagaaaacaacgtataatcccggcaaaaagcagccgtgcctacctgagacattttttcttatttcttttcgcgccggataaggtttccgtccttgtcggtaaacttaccgcagagaatcttgataaagtcgacaaggtatccgatgccgaacagaccggccgtcagcgtatagagaatgcctgtgccaatcttaccgacatagtagcggtggacaccaagaccgccaaggaagaagcaaagcaagaatgttgtcatccagtccttcgtttcgaccggaacttccggcgcgacatagtcctctactgcctcaccgttcaaaatcttcttcacggtttccgtcacggtgtcaatataggcgccacgctccgttgcaagaccgaccgtcgcaccctttaggcccttgcgcagtgcgctgttcttatcaacgcgcataccgccaaccgacatcttggcctccgtaatgaccggctgaatccggatgtgtgtgccatccttgaggtaaagccagaggccaacgtctacatttggttctttctcaaacgagatgcgctgtccgggaacgccgcctttgatctggaatggcatctggaacgctgctctgcgcgcattgagtttctgcatgatttcttccagtgtggtagaataggaaagatcaaattcacggggactggtagcgaatgcaacgtctttcatgctgcctgtaaggttattcatcgttttttctcctttctaaaaggtcagaggcggatagtattaacggtaagctacacggctattttttcgtaaaggtgccgctgatgccgtagccggaattctcattcatggtaaggctgtttccatctacggagaatgtataagtagatggatcactccatgcctccagtgtcaccgtaagctgatcaccttcgatggtgtacgtaccgtcctgtttcatataagcattttccatggtgcatttgccgcttccgttgaatgtccatgtgatcgtaccgtctgcgccaagttcggcggaccatgttccggctaacgcatccttgctaccacaggcagaaagtgttaaaagcgtaaccacaatcagaagcaatgctacaaactttttcattattttgtccttctttctttaattatcatttgatggatatttatcctcttaccgcgccaccgcaatattcacaacagccgttcacgtccggtgtggtcgttgcgccgcagtagggacaggtgactgccgttttgggtgcggcctcctgttcaatctgctggcgcacatccttgcggacctgcgtcagaacctgccggatttcctcgccgagctttttgcaattgcggtactcaacgttagtttccggattgcatcgggtcgtcatccccggtcgcattgcgggaggcggtgtaatatctacggaatcggaattgatcttgaagcgtatttcgtcaaagtaatcgttgttgacgaatatggtgatgtagaaatcataggagtattcataccgcgggggattgtagctgatctccctaccgtccttatcctcacgcttaagctccgtgcggctctcgtcaatgtcgagattacagccggtcacgtctgcaaaatccaaaacatccgggttggcttccacgagatttctggcacgtgtcaccatgaattttcccgcgtcctcgtcaagaagcaccttggtgtccgcgccgagcgttctggttgtgtggaatgccgcgacctttttctggttttcttccctgtaatcaagctgtgccttgatttcctcaacagtgctgttgcgtcgatcagagaaccaaggggaaagcttttgggcgcagtttttgcagagattgccgttttcaagcttgcggttgccaagtaaccctattttttctccgcaaatatcgcaatattttttatcaaacagtcccatatatgtatcaaactcctttgtgtatgctacttgaattatacggttactgcgtgtctgccttggaattgagtaccgcaccgtagatatacaaggcaggaatagctattcctgtcaggatgcttacgacattaaactcgtcgccgttgaccagactcatcacaatgctcaatacgctgaatacggccacaatcacgccccacacgatgagctttcctgctttttcgctgcgcttactgtgcttaatgcctttgattccggcaatcatctggcaaattcctccgaccagcgtcaggaacagcgctgcccaatatggaaatgtcagaccggattccgcaccgagtcctgccgccaatacacccagtccaccgacaagaacacccgcaatgatggaaaatactgcggcaatgatcatcagaattccggtaaccttcaaaaatttatgtcctttcatggtaaatcctcctgttacaataaatcgtatggtttgtttttattctttcgcagggtgtttggccccacattctgcacaaaatgtacgactgccgtttggcatacctcgcattactccgtttcaaggtttgacgtggcataagcttcttcggcaatacgcagcaccaaggtctccagcgcttctgcatggctgccgctgagcttttgaatctcgttcccgtcatcggtgcgccaaatgacccggatttcgctgtcggtttcgtcctggacatttggagagggctttcggtacgcgggcagatccgactctgccagcatattctgaagttcaaaccattgcacccacgtaagctgccaagggattgggttggaaaacgcgtccgtttcgctttctctcatctcgtcgccggattggtccggaaaccggccggtcagcagaggcatattattctcccggtagaatttcagtgaaaagcagctgtaaaaattcctgtggttctgtcgccactcaaattccaccagatcttttcctgctctgtatgtatccgggttttccatcctacctccatcttgaatccggctatcgacaaaataccgatacagggatacgctcgccagtgcgataaacacaaccgccgacacgatggtcagagcgattatggatgcttttttcacttcaaatccccgtcgtcaaacggatcgccgcattccgggcagaatttgggcgggtgtgtcgggtcagccggctcccagccgcatttgtcgcatttgtactgcggaacaccggccggttttggtttgccgcattcagcgcaaaactttcctttgttcaccgcaccgcagctacacgtccagccgtctgcctgagattccggctttttggtgccgcattccgggcagaattttccgcttgccgtcgcgccgcactgcggacatttccagctttcggcggcaggctttggttcaggctttttactgccacagttcgggcagaattttccggtaataccgctctgtccacacgaacagttccatccttcagcagctgccggagccggagcaggctgcgctgcttgctgctgtgcgcccatctgatagagattctgcgcgttcatgccgcccgcctgacctgccatgttcatgcccataaacgccattgcagggcctgcattctgattcgacgccgcagattgcatcgcggaagcctgtgcaccgacaagataggctgccgctctcgtcggatccataaacgccgcattacgctgcagctccttaatcatctgctcatcctcttcgctcgccttgaccgacgaaacgccaaaggaaacgatctcaagtccacgcaggtagcgccattttccggataaaacttcattcaatgcctcggccagttccattgtatgaccgggtagcgcggaatagcggattcccatgtcggaaatcttcgcaaacgcgggctgaagcgccgtcaaaagctcagttttcagctggccgtccagacggtcgcgggtatagtcttcactgacgttgccgcatacgttcgtgtagaacagaatcgggtcactgattcggtaactgtactcgccgaagcaacgaatggcgatgtcaatgtcaatgcccgcgcgctggtcgacaacgcggaacggcaccggagagggcgtgccgtacttattgccaatgagctctttcgtgttaaaatagtagacacgctgatctttgggcggctcgccgccgaaagtaaagcgtttgccgatattcttgaacgtgtctaagatgctggttcccaactcaccggagaagatcgtcggctccgtcgagctgtcatagacaaactcacccggcacggcgcaaagctccgcaaccttgccctgatcaacaataatcatacactgtccgtccgccaccgcaacgacggaaccgttcgagatgatgttttcgcttccctttgtgttgctgctgcgtccggaaacgcgccgctgtcccttgaccgccataacgttttctggaatcgattcacagtaaaaatactctttccattggtcggccattacgccaccggccgcacccaatgctgctttaatgagtcccattttctgtactccctttctttacttattatgcccacggatcttccgccgcgggaatacggataccgctgagaatactggaatattcccagaggaaccattcaccggttgaagccttctgccgcaatttcatgggacgcggtgaatccgcgccggacgttttaagaaacacgcgcatatagcccggctctatatcctgaggtctggggtctgccagcacgttcagcgtgtatggcacgcacggctgatacccattttccggcgttgcgccttcaaaatatgcaagcggcagataaaccttgccgcgcaatcgatcgcgcagaaactgacagtcatacggtgtcatgggcttaggaccgcgcagaaggttcatcgcggcaacgcctgcatctttgtccctgtcaaacagtgccaatgcacacagaaacagtgcgcagatatgttccggctgccgccctttagcggcaagaatttcaaattcctgcaaattttccggaattttctgaattacaacctgcaacataaccactcctttctaaatgtatatcaatcacacctgtgaaatagatctgtgatcccagcgtgtaatagaattatcaatctgccaatctttcatgaacggtcgctcattggcgggacgcgctgtacaatgagctaacctcttcactatccggaaagaatgtccgttaaacctgtctttttttctttctccaaacgagtagaaaaacgacggcagcaacaatcaaaagcgttggcacaagtgtgaatacaaggattgttcctacggagaagctgcgttctgccgcctgcacattgttcttttcgttcttttggggaacatctttaccgacagtgttcacaccaaatccgttcttttcgcccctatctccattctttccgtcgctatccgctgtccccgaaattgatgcgccgggtgaagccgtaggcgaaatacccggcgaggccgaggcagctgtattaggcgacgccgtgggcgaggttgtggcggatgtgtgtggtgaagccgtaggcgtaaccttcggtgtaggcgtaactttcggtgtagctgtggcggatgtgcgtggtgaagccgtgggcgccggagtcggtgttgtgcgcggagccgcagtcgttcccggcttgagcttgggaattggctttgtgcgtatcgcgctgcacatattgcatatccattgcataacgccctcttggcttgttgtcggttgtgcgaccactttcccggcgtcccaattgtgatccgttttggcggcttctcggcgttctgtcacaccgcagtacgtacattcgcgcgtttgaatgcccttttccatacaggtgggctgcgtcgtagtaaaccatgcgccgaatttgtgatccgtcttggcaatcggttttgtctccgtcacactgcattgcgtacactcccgcttttggatgccggtctccatgcaggtgggctgcgtcgtagtaaaccatgcgccgaatttgtgatccgtcttggcaatcgattttgtctccgttacactgcattgcgtacactcccgcttttggatgccggtctccatacaggtgggctgcgtcgtagtaaaccatgcaccgaatttgtggtccgtcttggcaatcgattttgtctccgtcgcaccgcagcgcgtgcactcacgtttttggatgccgttcgccatgcaggtaggctgtgtcgtagtaaaccatgcgccgaatttgtgacccagcgcagacattgtgacggtgtctccttccgtaccgcagtcatcacagataaaacgggtgtatcctgaagtagtacaggtcgcgaatacgcggttatcaataacccaataatgatccgttggcggcgcgggcatttcataccacttgttgcatgtactgcaatacgctcgcttcgtgccggattgtgtacaggtaggttctttacccggaacaacttcccacggtccaaagctgtgaggcatggcagggtcagtttgataagtgcatctcatcccacagacggtacattccagtacatagtatccgcccctcaggcaggttggcttttcctcatcggtctgtataatgttttcatgatgttccggattactgtcttccggcgagcacgcaagcgcggtaatcgcggacagcgccgccatgagcgcaaataccagaaatattagaatcaatcgcagtagttttttcatttcccacccatcctttcaaagcgtgtcaattacgcccgcgaggtaagtcggcgataccgatgcataaataaagttatcaaccagctgatcctttaccgcctgccgcacttcggaggcaagcagtttatccgcgtcctcatccaccaaaagcagaaccttacacgtccaaccgagttgctttacggcactgcagatcttgagtctctcactcagcttccagattccctgtcggatgacctccatcaccaacacattggcacggcaggtccggcacaacgccagcgtttcttccggctttgaagaacggtagataaggaaatccgggtcgcatcccgaaagtgattgcatgaccgcctccgacagaagtccgcccttcatatccaatacaattcttcgcatttgtgcttttccaccgcctttctcttcctttgaatccttcatctatattttagccgttatcttccatttccgcccccctccaattggataggatttgtaattattttccgttacaaagccaaattttgtcacagttctctgtataaagaggacaaaacgtgttgccttttgtctatccgcatgatatactatccatataaatatactaattttttgggggcatgcggcatgagcaaaacgacgaaaagaagccttttgtacgccttgggcttgctggtgctcattgcgtttgccatgtggctccgatatgcaagtcggtcttattttcattctccggctgtcaactacctgcgaagcgcaatctatttgtttttgttcggcgtgtggtgctactctctttgggcgcgcatcgtacaggtgcaggtgcggcactacatgctggcgatttcggcgctgatggtgctgtggattctgctgcgctcaatcaagttttccatggataacacggatgcagaacgcctgctgtggtatttctattattttccgatgctgtttatccccatgctgtcggtcttcgtttcccagtcgctgggcaagggagaagactttcgtctgccgcgatggacaaaacttctgtatcttccgacattgctgctgcttttgctcgttctgaccaatgatctgcatcagcaggtattttccttcccgtccggcattttatcggaccgggagtatcggtatgagatcggttttttcttcgtgctgggctgggaggctctgtgcgcagggtttgcgtttctttcgatggtgaaaaactgtcgtatcccgcatagcaggagaattcgctggttgccgctggttccgtttgtgctttcgctggcatatgtttatgcgtatgccaaaaatgtctattgggtctgggtgctcgcgggcgatatgaccgtgtcacagtgcctgatttttgcaagcatccttgaatgctgcattcaaagcggactgattcattccaacctcgggtacgatgagctctttgaagcgacgagcctgcctgttcagattaccgatcaagcgttctgctccaaatatgtatctgccgccatgcaggggactttgccgcaaagtaagctaaggcatatacagcaggataccgtctatctggatgacgatacacttttgaaacggcataagttgcgccgcggctgggtattctggaaggaggacatctcagcgctgagtcaggttcaaaagaaactggaattgacacgagatgagttgcatgacaccggcgacgttttggcggcggagaatgcacagcatgcaagatggttgaagctgacggagcaaaaccgcttgtatgatatgatggaggcacagattgatcggcagatcgcgatgctgtgggatctgctggctgaattgcagaaaacggaggaccaaaaccgggccaggcgtttgctcgggcaggtcatcattatcggaacctacatcaaacgcagaagcaacctgatttttgtcggcgcacagcgcggtgcgatcagtgtgcaggagcttcggttatgcctcaatgaatcttccgagaatatctgtgtctatggcgccgactgtaaggcgattgtcaagggggatgaccagcttaccctcgaacaggcgacgcagatctacgacctgttcgaggccgtcgtggaaacggaactggaatcccttcgtgcaatgctaatctccatagatgtcggtgcgcaggtagaagtgtctttttgtgtttcagcggcagagtcgctctgcgggctgcgcgcgcattttcaaggtttggaatgggagcaggatgaggacgggctgcaatatgtgacgcggaagctggaaagatcgagagggtaaaggcgtatggacaggattaaggaaagcttcgacagtctgcccatcgcggcctgctttttcgataaaaacggcgtggtgcggctcatcaaccgccggatgcttgccattacgaactggctgcaaaaaggcggtatacaatcgctggcagagatgcaaagcgccctgcaggcaccgccggcaagtgtgtgctgtctggatccgcacctttggatttaccgctttccggacggaacagcgctgcgctttgcgcaggagcagatcacaacaaaagcaggtgcccgatatacacaaatcactgccgcagacgttacggagctgattcagaaacagaaccagctaaaagcggaaaatgcgaagctggagaaaacaaacaagcggcttaggcggctgcttgcgcagatgccggagatcatccgggaggaagaaacgctggccatgaagctgcgtgtgcacgatgacattggacacagcattctcgcgacgcggcgcgtgctgttccaaaacacagaccagaaggaaattcgtgcaaccgcagcgttgtgggagcagtccatttcagtgctttaccgctccagtcagatgagaacgcaatccgaaccgttggaagccgcaaaagaacgagcggaaaagcttggcgtcagagttctgctggcaggagatgagccgcgaacgcagcgtatgcgcgcactgattgcactggcaatcagcgaatgtgcatcgaactgtgttcgtcacgccgacggaacagagctgtatgtgtgcttttggcaaaagccggactgcatagcggtctccctaaccaacaacggtgcggcaccaaagggaaaaatcacagagggcggaggtctttctatgctgcgtcaacgcatagaagaatccggcggcaaaatggagattcagagcgtccctcgctttaagctgatgctcagtttgcaggaaaaggaggaagcagcatatgaaggtgatgatcgttgaagaccagaccatgattcgcagtctgttggaaagctattttcgcgccgaggacggataccggatcacggcgtccattccaggcgcgaaacaagcagtcgagatgtgcaggacaaattctgtcgatctgattttgatggatgtgcaaacagagaaccgtgagaacgggttgattgctgttcgccagattaaagccatacagccgaagagtaaaattattgttgtgacttcgctgatcgacggcgccgttctagatgaggcaaagaaggccggggccgacagcctgtggtacaaggactcgacgcagaagcgcttgatggatgtcgtccggcaaacactggcgggtgaacatatctttccggacgcacctccgacagttgagatcggtatggcaaaaagcacggaatttacaaagacggaactgaaggttctgcggcatttgctgcggggactgtcttacacgcgcattgcggcagagatgggctgcgagatgtcaacggtcaaatttcatgtgtcaaatatgctgcaaaaaaccgggctggaaaacaagcttcagcttgcgctggccgtcagcgacgtcaagttgattgccgatctggcggaagaatgatgggatttgattttcagcttgtgcagctataggcatttataaagagtattatcagaactcgacggtttaacgaatacccacagtagttcaacgattacccggctgtttaacgattacgacggaacagaacgccacaatcctcgcaaaaaacacgaaaccccgccgcagaattgctctgcagcggggttcgcttatgtgctgaaacggtcgaaaagccttgttttaagcggttttcgggcatagaaaaagtccaccgtaattctatcaaaattacggtggacttttggcggagaagatgggatttgaacccatgcgccggttacccgacctactcccttagcaggggagccccttcaccacttgggtacttctccatggtgaatataaaagaaaaatgtggcggagaggaagagattcgaactcttggtcccttacgagatcactagttttcaagactagctccttaaaccactcggacacctctccatttcagaacaagtggtattataacacacagagcatgctttgtcaagcatgttttttgtgcattttacagagccgacttgactgttattaattatacaaaaaccgagtgggtttgtcaagcccataatgggattttgaccgtttttttccaaaaacaataaaacagccaaagaaaagcgcttgcaatgcgaaaaaaaatgccgtatactgtttatgaaaaacaaaaggagtcgttgtgaaaatgagcaaggttgaatttgattgcggtaaatggctgcaggaagccgaagaatttgcactgccgaattggagcgccctaccctctattcccctttatatggatcaggtgatgatgtttacaggtgaagcgctgtctctttttgaacgcgatgaaaagcagagtttattgacgaacagtatgatcaataattacgtgaaaagcggcgttgtggatcatcccgtgcacaaaaagtacagcaaggagcatctttctaagctgatgatggtgggcttgctgaagcaggtgctttccattcaggatattgccgtgctgttttccggcgatgaagacgcggagcagctttataaagactttgcggcggcgcagagcggcgctttgcacgagacggcagcgggcgtgcacccggaaagtgacgcagcggccttgcgtgcagcggcgttgaagcttgcagcggaagctacggcgcgacaagcggttgcccaacgcattttaatggcgctgtccgacgaaaagaaagccaagaaataatcaaatttgtaacgaacaaaagcctgcatggcgcgtagaatgttctattcgaaaaaaggatgggatatgaggtgcgatttgcaggcttttcctatgcgctccggcggccgattgctataaagtgcagctgttgctctaaaaatacggaatgtcctcctcttccacgcgctgtacttcggcagtgacgtgaaaggtaatttcggcttttgagagcttttctgcgcggctttcccccatttcacgccacacatttggcgcggtgcggaaaatgacttcgctgagacctgcggcatcggctccgtttgcgtttttgagataagcggcgatgcgttcctcagtgcagttggcaagggcagtctcaaagcgcggaaatgcttcgttccctacgtgctttgcggtatttgtgacggcagaaacttcggcgataacatgaattttggcggtaaactcaggctgttctgctgtgcctgtgaagataatgttgctgtttgtactgcgggctttaagcgataccgtgccgaaggcttcgtcttttacgatgaattcgccaccagaaagtgtaccctgcaaggcactaagcccctgtgcttccgccggcgtgagcacggtgcacaggcggtagctttgcagaacggctgtgccgacgggcgtgggcaaatcatcggcgcgcagaacgggcagcgcggcagtggtgtttacgccgtaaagaccgtttacaagctgcagcaaattcacgtctgccgcggccccgctgtattttgcgccgtttgaaagctgcatgaagcgttcggcggtgagatccgtctgtaacaggacgctttcggcggtatcttctgcgaggaaaactttggcggtcgggcgggaatcgtagtggcggataaagaaatccagttgttcggcgataccgctttctgcgcattgcataccgaaaaggatggcggcgttgtgcgaatacagcggcgtgcggccgctttcgagcgcgatttgactgagcgcttcggggacggtatcgccctcaccggaaaaggtgctctgccctccgtcctccgtcgtttcggaagcgagcaccgtcacgcggcagccggttgctgtgcggtctacgccgattgcgctgatgagcaagcgctcgtaaagctccggcgcgcagcccgaagcggtgagcgtcaaaatgagcgaaagtaaaacggatgtgagtgcttttttcatgcggcgcgtctcctcttctttttgatgcagtcgaaaaaccaaagcaaactcggcagcatagcgccggtcaaaacggaaaacggcagcagatacgctgtgcggaacacggccccgacgcgtgcggcggagtctgtgagccatagggacagaactgctgtcagcgcggctatgagtgccgtcagccacgcgcgcgggcgtgtcgggataggtgtcatgcacacggcgatgcagaataatccgcaggcaatacgcacgatgagcgccatcatgctgatgccgatgaaaagcgcgtccagccgctgaatgccggcaatctccgcgatggaagcgagcgtgtatgcggggaaaacttgcagtgcggcgtactcgccgagacacgagacgatgaaaaacagaaacacacccaaaaacacggtgatgccgccgttccaaacgacaaagccgagcacgcggtggcttttaccgctttttgtatccgtatttgtgagaaacggcatcaaaacagcaaactcggcaagcgaagaacagcgcgctgtgaagacgagaaacccctgtacggtttggtctatgccgtcatagaaaagcggcatgagataatgcggcgtgacgttcggcgagacggcgagaaaaatcatccccatgccgagcatgaacagcgtgaaaatgcataccgaggcgcgcgaaatggtttctataccgcgaatggcaccataaagtgcgataccgagcacgacaaggacgatggaaaaacgcgaagcgacggggtctgtagtgttgacgagcagcgtcagaaaaagcgaaagactgaaaatgttcatcactataaaataaagcgcgtaaattgcggacatcggtacagaaacaccgcggccgcagttattctctgcgatttgcagaagcgatgcttccgggtggcttttgtgcagcacgaaaagcggcagagaaaacaccgtaaggtacaaaaacagcccgagcgaagagaaaatactttcaatcaaattgctgccgccgacggtttgcacattgattgtgatgctgacgatgacacgtgaaagaaacagcataaggtaaagctgcaaagcactgatcttggttttcacaggtgcttttccccctttcccgcgccgggcatgtgttgtacggaggcgttatgacgcactaatcgtttccatcccgcgcgtacaagcacatcccgcatggcggaaagccgaaatggtgcgaccggggccaaaaacggcacggaaaagcttgttttgccgcaaagctcgaataataaaaacgtaaagcctgcaagcacgccccacacaccccatataccgcccaccaaaataaaaataagacgcagtacagccatgggctcgtataatttcggaaccgtgtacccggtaatgaccgtgacggcgatgacgacgagcgacggtgcgctgacgagccctgcggaaacggcggtctcgccgatgacaagaccgcccacgatgccgacagagctgccgagcggtttcggtacgcgcagtccggcttcgcgcatcagttcatacataaagtaaagcaaaatcgcttctaacatgacgggaaacggcgtactgcgctctgcctgtgcaatggtaacaagcagtgtttccggcagcagctccgggtcgtgtgcggcgatgccgacatacagccccggcagaaaaatcgcgaggaaaaacgcgatgtatttcagccagcgcgtgaacgtggcgtaaaacggacggtttgcataatcgtcggcggtctgaaagttttcaacgaagagatacggcacgtaaagcgctgtgggcgtgccgtctataagcagcccgatgcgcccctcatgcagtttgccgcataaggtatcggggcgctcggtaaaacctacgcgatcaaaaatcgcgggacgctccaagtaacccgccaaatatcctgctgcgagcacgtcttttagattacatgcggaaagccgctttttgagtgtgttaatgatcttcgggtccgcgatgttttttaaatagcacagcgcagccggtgtttggctctcttcgccaaccgtcaccttttcaaatttgagctcggtcgttttgagacggcgtcgtaaaagcgaaatgtttgtctggtaggtttccacaaagccttcgcgggagccgcgctgcataacttccgtatcgggctcatccaccccgcgcgcagcaaagccctgcgtgccgaacgcgagcgctgtcggacagttatcgagcagcagcaccgcaaagccgttcatcatacgttcgagcacttcactgacggtggaaagctcggcttgctctacggcgcacagaacgttttcttcgataaacaaaagcgtttctttgccgttatccgtcggaattttcgcgcgcatcaacggatttaaaatgctcaaagtaatgtgctgcttgctgacgagcccgtccatggtgagcagcgcggccggtaccgtgccgaccataaattcgcgctcgatataatccatggcgttttcaaataacccatttatatatgttacgttttcctttaagtgttcagataagttttccattagcagtttcctttccgcatggttctcctgtgtagattttacagaaaggctgtattttatacgctcgaagacgcataatagcgacgaagacatacggaaaggaaaacgccatgtttatttcgtttgtgcgcacgatcatcttgtattttacgattattttggctgttcgcgttatgggcaaacggcagatcaaccaactgcaaacgagtgaattggtcgtgacgctgctcatctccgaccttgcggtgatcccgatgcaggacagcggccagccgcttttcagcgggctcatccccattttggtgctcattgcgctcgaggtgctcgtttcggtttttatgcttaaaagcagccgttttcaccgtttggtgtgcggcaagccggtcgtcatcatcaaagatgggcgtatcattcaggaaaacatgcaggagctgcgcatgagcgtagaagacctttttgagcaactgcggcaaaaggatgtttttgtgctttcggatgtgacatatgccattgtagagacgaacggcacgctgagtgtcgttaaaaaagccgccgtcgattacctgcgtccgagcgatatgggcgtgaaagtgaaagacgagggccttgaagtcgttgtggtgagcgacggagacctttctgtgggctctatgcacttgtgcggcaaaaatgaagagtggatacacagcatattaaaaagcgaagccgtaccactttccgaagtgtttattctaacggtaaacacagccggacattatacgctcattcggcgggacggcagcctaaaaaagggagtgaaaaaatgaagcgcatggccttttcaatcgttttggcggtatttgctgtggcggtgtgtatctttggttactgcaacacagcaagatctgcgaatacactgattgtgtccgcggaaaatatcgaccggctgctttccgacggtgaagcggaaaaagccttggaggaaagccgaaaattgcaggcagactgggagaaaatacacgataaactgtgcgttttcctgccgcacgagcatttggagccgctggaaaacatttttgccgtgctgccctattatattgagcaggaggaggtgtccttagcgcgcgccgaatgccagatggtgaaaaacacggcggagcacattcaaaaaacagagcgcatcgcatttgaaaatgtgttttaaagcaaaaaaacagcagccccatatcgcgttgggactgctgctacataatctgaatttatcggttgcgctcggccttgatcttattgagctcgtccatgaacgtattgatgtctttgaattcacggtaaacggaagcaaagcgaacataggcgacttcgtcgaccttcttgagcttatccatggcataagtgccgatgagcgtggacggcacttcgcggtcgagcgagttttgcaggagcgtttcaatctcgtctacgatgcgctccagtgtttcaagcggtaccgggcgtttttcgcaggcgcgcagaaggccgttcaacagcttgttgcggtcaaaagcctcgcgggatttatctttttttacaacgaccaccggcacagtctcaatgacttcataggtcgtaaagcgttttgcgcagtttaagcactcacggcggcggcgaatgcgctccccctcatcggttggcctggaatcgatgaccttactttcactgtatccgcaatagggacatttcatggaaaaccctccaaagttctaacacaccaaatctgtctcttaaagtagtgttattatacaacagttttcggggaaaaatcaagcgaaaccgtatacttttttctattttgaccttaaaatcggaaagaaacgtcaaatccctgcgattttcgcccgcagggcgtgattttgtctcggtttttgcttgatttgaagactatctttcggtataataaaacggaatatgaaccgaggagaacaactatggcaatacttacggtgaacaacataaaaaagatgttcggcaccgatgtgatcattcaggatattacatttgaagtgcagaaaggcgaccgtattggccttgtgggcattaacggctccggaaagacgacgcttttcaaggtactgaacggagaatatacggcggacgaaggcacctttaccccggcgcgcgaaacgtccatcggctacatggagcagcatgtttgccgcgatatggaaaaaccggcgtttgacgaagtgatgacggtgtttgcaccgttgctcaaaatggaagcagagatagaagtgctcacgacgaaaatttcggaaatgccggaaaaccttaacgagcttatcgaaaagcaggcggagctaaacgatcgtttcatcgcagacggcggcctcacctgccgcaaccgtgcaaaaagcacactcatcggcctcggctttgcgccggagcagatctatgctcctatcggtgttttgagcggcggacagaaagcgaaaattcaactcgcaaaaatgctgctcggcgaatcgaatttgctgttgctggacgagccgacgaaccaccttgatattccgtctgttgaatggctggaggattttctgaagaattacaacggctcgtacatcgttatttcgcacgaccgttatttccttgatgctgtgacgaaccgcacatttgagattgaaaacacgcatttgacagaatataagggcaattatacgaaatatttgcagctgaaagaagaaaaccgccttgcgatgcagcgcgtctacgataacacccagcgcgagatcaagcgcattgagggcatcattgagcagcagaagcggttcaatcaggagcgcaactatgtgacgattgcgagcaagcagaagtccattgaccgtttgcaggcgacgcttgaaaagccggaggatgatccggataccataaaatttcagtttaaggcgagccagcgcggcggcaatgatgttctggaagcggaagagcttgccctctcattcggcgaccacaggctctttaaaaatgtgaatctcgatatcaaacgcggcgaaaaggtgttcctcatcggcccgaacggctgcggaaaaacgtctttgctgaaagtgctgttgcacatttataagcaaaccttcggcgatttccgctttggcgcgaatatcgacatcggctactacgatcaggcgcaaggcaacttagatgagagtaagacggtcatcgatgagatctgggatctgcacccctacatgacgcagacgcaggtgcgtagcgcattggcggtgttcctttttaaaggcgaagacgtgtataagcccgtgaaagggctttccggcggcgagcgtgcgcgcgtgctgcttttaaagctgatgctttccaaagcgaaccttttgatcctcgacgaaccgacgaaccacctcgatatcggctcctgcgaggcgcttgaaaacgcacttttgggctacgatggtacgctgttcgtcgtttcgcatgaccgttatcttatcaacaagcttgcggataaaatctactatctcaccccttccggcacaacactgtacctcggcaactacgacgcatatcttgaggcccgtcaaaagcaggaagccgcaaaagccgctgccgaagcggaaaatgaaaacgctgtgccgaaagccaatacagtctataaacaaaagaaagagcgtgcctctgaaattcggaagcgccgtgccgcactttcgaattgcgagcgcgagatcgaagcggcggaagcggaaattgacacgctgaacgagcagctctccaaccccgagacggcgagcgattacgaaaaaatgatggaaatcacgaataggatcacggagcaaaaggcgcttgcggacagcctgatgaacgactggacggagctgacgctttggctggaagaaaacgacgtgtgatgaaaggaaattgaaatatatgatgaaagcaaaggtcatcaccctcggctgcaaggtgaaccagtatgaatcggaagcgatgctctcttcccttttgcagcacggctttgccgcagcggaggacaaggaaacggcggacgtcgtaatcctcaactcctgcacggtcacggccgaaagtgatcgcaaggtgcggcagatttttcgccgcgcgaaaaaagataaccctgatgccgttatggtgctgacgggctgcatggcacaggcgttcccggaggacgcaaggcgactggaggaagccgatattatcctcggcacctcgaaccgcaagcgtctggtgccggatctgttggcgtttctttctgcacgccagcgcatcatcgacattgcgccgcacacgaacgatgaaaaatttgagaatctcaatgtagagaactttacagggcgcacgcgtgcatttgtgaagattgaagacgggtgcaaccgcttttgctcatactgcatcatcccctatgcccgcggccgtgtgcgctcgaagccgcttgaagacctcaaagcggagcttgcggggcttggcgcaaacggctacaaagaagtggtgctgacgggcatcaacctttcggcatacggacaggagttcggtctgcatctgtgtgacgccattgaagcggcctgcgctacgccgggtattgagcgtgtgcgtctcggctccttggagccggagcagctttcggaagacgtgattcggcgcatggcaaagcagaaaaagctgtgcccgcagttccacctctccttgcaaagcggctgtgatgcgactttaaagcgcatgaaccgccactacaccgcagacgaataccgtaccatcgtgcgcaacctgcgcgcagcgtttgaaaatgctgccatcacgacggacatcatggtcggcttcgcgggcgaaacggatgaagaatttgcggaatctttggcgtttgcagaagagatcgcatttgcgaaagtacacgtgtttgcctattcccgccgccccggcacccgtgcctatgacatgggcgatcagctgacaaatgccgtaaaggaagcgcgcagccacgagatgatccgcgtgacgaccgcaacgcagcaggcgttttttaaagcgcaaatcggtcgcacggaggaagtgcttttcgagcgcgagattcaaaaaggcgtttgggagggatactccatgaactatacacctgttgcggtggcaagcggtacgtctcttgcgggcgagatccgctctgtgtgcattgagagctgcaccgatacgcactgcatgggtgtcgtgctgtaaaattcacctcaaaaggagggaattccctctctaccggaattcatcgagaaatacatgtaaacaaaaacgaccgaaagcgcggtgcaaaggcttccggtcgtttttgcatatatttaagtttagaaaatcaaatttacaagcatgccggtcacgacggagcaggcgtacagcgtaccgacgatggcgaggttctcttttacgcggtggtttgtgcggaacagcacgacgaggcccacgcccgcaccggcgcataagcccgccacgcaggagccgaattgcaggctgcccagcgtgaacagctccgttaagatcacagatgccgcacagttcggaatgagtccaatgagcgccgtcaggaacggctgaaagacgctgccgtttaaaagtaagccggaaatgcggtcttccccgataaaataaatggcatagccgagcacgaggtttacgacgaggataaagagaaaaatgctgattgtgtggtgcaaggcggagtgcaacaggctgtggtggtcgcagtcgcagtccgcgcacagctcctcaaacggcttctcttttttagggtggaaaaagcgctgtaaaatgaggtcggccagaaagccgaacacgatgccggaggcgactttgatgagcagcatcggcaaaatgtactgcatctgctccgggtgtgagaacagaatcggcagggcttcatcgcttgtggaaaggaacacggcgagcagtgtgccgactgtgatgatgcgtccggcgtagaaatttgctgccgccacggagaagccgcactgcggcacaacgccgaggagcgcgccgccgatggggccgaatttgccgagcttttgcagaccgcgttccattttgctgcttgcacggtgctctaaatactcaatgagaaagtacgcggcaaacagaaacggcaatgtttttaacgaatcgatgagtgcgtcgagaaagacatccagcataaataaatcctttcaaggtagaggtagcccgtcgaaacgacgggattgcgatgcccgaaaacacaaaaagtggtatacaggcttcgagccagtataccacaattttgccggattgacaagtaaaaatcagagccgatttttaccagatttctgcgttttttgcgcaatgttggcgcacttttgctgcccgtacctctacaaagcagccgcacagcgcacacatgccgttgactaagtggtcgcatgatgtgcatttttgtaaacggtctttgtaaagtgcatccggggttttctgctccgggggaatgttttcgatatattcgtagatcgagtgaaaataatctgtgtcgctgaggtctttcagcaaacaccgcctgcagggaatgcgttccatcaggagaccgtgatttccatgacggcacacgccggaatatcgaagtgcaggttgttgttttcaagcgtcagcgcgtcgaaatccgtaatcttgacgtcttcgggatggtcgaagtcgttgtatgcgccgatggagtttgtcaaaatgcgtgcagatgccgtattgtacttcttgccggtcagcgcacagtcgatcgggtacgcggtgtcggcggaaatgttcgcgagcgtgatatgcacgacgccgttttcgtcttccgaggcggaaaccgtgaggttcggtacgccgtcgtagaccccctccgtttcgaggtggctattcaaaagcgttgcatcgtgatggtgcttataaagatcgaatacatgatatgtcggcgtaagcaccattttttctccctcggtgaggatgacggactgcaaaacgtttacaagctgtgcgatgtttgccatgacgacgcggtcactgtgtgcattgaaaatgttcagcgttacagcggcgacaatggcgtcgcgcatggtattctgctgatacaggaagcccgggttcgtgcccggttccacatcgtaccatgtaccccactcgtctacgaccaggccgactttgtgctcgggatcgtaacggctcataatctccgtgtggcgcgtgataagctcatccatgtacagtgccctgcgaatagtctcgtaatacgtgttggtatcaaagcctgttgcagctgtttttttctcaaatgtgcccggcacggtgtaatagtgcaggctgaggccgttcatgtagttgcccgcaatgcgcatgacctcttctgtccagttgtaatcgtcggcgatgcccgggccgcaggcaatgcggaacacgtggttgtcgccgtaatcgcggacataggtctggaagcggcggtagaggtcggcataataggacgggcgcatattgccgccgcagccccagttttcattgccgacaccgaagtatttcactttccacggctcggcatgaccgtttttggcgcgcaggtccgccatgggcgaaatgccatcaaacgtcatgtactccatccactcgctcatttcctgcacggtgccggagcccacgttgccgttgatgtacggctcgcagccgacctgacggcagaactctaagaattcgtgcgtgccgaaggtgttatcctccacaacaccgccccagtgcgtgttgaccatctttttgcgtgtctccttggggccgatgccgtctttccagtggtattcatccgcaaaacagccgcccggccagcgcagcaccggcagcttaatagctttcagcgcttccacaatatcggttcgcatgccgtttacgtttggaatgtcgctgttttcgccaacataaatgccgttataaatgcagcggccgaggtgctcggaaaaattaccgtagatattgcggctgatcttgcttttcttttcgtcagtatgaatggaaagttttgccattttaaaaattcctccacttaaaatcggcgataagcatcgccgtgtgtatgttcaatatagcatacaagagtacgaatgtcaagagttgtacgtacaaatatttatcggcgcgcgtcgaccgtccaatgctctgtgatgacatggttttccgcgacgagtacttcgctgtacaacgccgttgttgggcagatgtgcgtcgggatcacgtagaaaacgtcaccgatcttcggacgctcgttttcaaagccgggcttcatgcgccatgtccagtgctcttcgctttgaaacatcggctcggcgttttcaaggccgacaactttgccgcgcacaccgggcgggtcgcttgcgatgcctttgcagccgaggtcaaatgtgaacacgccgggcgccgggtgactgatgacacgcgtgcaaacagctgcggcggggatgtacggcaggtcaggataattttctttgtagctgctgtcccacaaaaacacggtaccgggcgacaaaaagatatccgggtttgcggcgtgacatgggaacgacggactgccgcccgcgatgatcatcggcacctcaatgccgtcttcgctgagtgcatcgagcacatcggcaatgctttccaccaagtccgtcacttcggcttcgcgatccatgaggtcggtggtgtgcacgtggccgtcatagcaatgcaggccgctgaatggaacattttcggacggattttcgagtgctgctttgatgaattcgtaaagatgcgctgtttccacgccggtacggttcatacccatgttgacatccgcaaaccagccgagcacagcattttgcttttcggcttcggcttgaagcgcatgcaggcagcttaaatcatcttccagcgcgtagaaatgcgttttggggaattcttttacgagcgagataaacgctttgatattcggcccgacaagcgggtaggcgagcaaaatgtgctctgccccgcattcggcaaccattttgacttccgccaaagtcgcgcatttgaagtgatgaatgcccatagccttctgcatttcgatcatttttttcattttgtgcgacttcacgtgcggccacagtcgctctgccccgccggcgatttcgatcgttttgcgggtattttcgaaaatttcgtctttatagtagatcaaagcgggcgttaaaatgttctctacgccttgtatcgtatagagctcagtctgcatttgtgcagtcctcctcaatttttttattatattcagtatacgctggtaaaattgccctgtcaagccttgataagttctgcatgcagctgtaaaattatgcagatttcctatgattgggaagtatgcgttatgattttgtttcgtcatgcgtagatttatgacggcacgggccaaaagccgtttttaggcgatgttttgagctgtgcgaataattaaaaatcatataaaaagcaccgcgcaaagagctttacggttctttgcgcggtgcttttatgttctatcaaagaaaaaacgggtctgcacacaaagaagctgacccgtttttctgtacgaaatagggcttaaacctgcacatctgccggttcgggcacatcgtcgttgatgatggacttcttcttccaacggcccatgcggaacgcgatggaggtaagcacggcacccatgacccagcttatgagcagggagatgaacagcgcatctgcagagtgcatcagtgctgcgaggccgtatgcgatcggcacacggataacgatggtcatgatgagggagatccacattggggtcatcgtatcgcccgcgccgcgcataacgccggaaaggatctgcgtgacggccattgcaatgtaaccgatggcgagaatgcgcatcatgtgcatgccggtatcaatgacttccggcgtgctcgtaaacatttccatgagataacggccgaagaacaggatcagcgcaacaagtaccacggaaacggaaaggccgagctttaagccgtcctttgtgcccttttccacgcgatccaaacgacctgcgccgatgttctggccggtgaaggtcgtcgttgccgtgccgaaggtgaagttcggcatcatggcaaagccgtccacgcgcataacaacggtggaaaccgcgatgatcgtggtaccgaagctgtttgtaagggactgcacgaccagcatggcgagcgagaacaccgcctgtgtgagaccgctgggcagacccaaacggatgagctggaacaaaagcgcttttgtcggccacagggtgcgccacgtgatgtgcaatacgtcacgcattaagagcagacgcacaagacacaggatgccggagactgcctgcgagatgatggttgcccacgcagcgcccgcaacgcccattttaaagcccgcgacaaaccagatatccagaccaatgttcatgccgcatgccacgagcaggaaaatgagcggcatgacggaatcgccgaggccgcgcagaatgccggaaataatgttgtaatatgcgctgccgagaataccgaggaaattgatgatgagataatcacacgacatagtgtaaatatcctgcggtgtttgcagtgcagacatgatcgggtgtgtaatgagcgggcccacgaccatgacgaagatggaaaccgcaaaggttgccgtgatcgccgtgcctacagaatgcgaaagtcgctttttgtctttcgcaccgaaatactgcgacgccatgatgctggcaccgaccgatacgcccatgaacagtacgagcagcaggttgatgatcgggccgctggcaccgatggcggccaacgcgctgtcacccacataattgccgaccacgatggagtccaccgtgctgtacagctgctgcgccaagttgccgatgagaagcggtgtggaaaaccgaatgagatttgtcgccgggttgcccaccgtcatatcctgcgttccgaaaaatgcagagagctttcctgccataataaagaatatcctcctcgccctgagatatactcgaaatttggtgattttgcaagcatataaccttacaaaatcacttgtgttttattgcttccgaatattctccaaaagatttaacgcttaacagtatatcaaaaaaggcgaaagaggtcaattaaatacaaagaagataattaaattttggtattttgccgaatttaatggttgatttatagcgaaattagcagacaatttcgtcagagattcataacgcggaacggtgtgtgaaaatgcgcttctcccttattttgcggcgaatgtattggcttttttgcagaacggtcattaccgttctgcgccagatgtcgaaaagaacgcggcgggcatcacaatccagcgcagagccgagcacggtaaacagcaaaaagctgaatatgcaaaatacggcggctgataggagcaacgcgggatatgagttgtgtggaagcggcaaagcttttgcagaaaaccacagcaaaacaaacaacgctccgctacataagaattttcggtaagtacgccgtgcgggtgcatgcagcagcttgtgggatgcgtagaggatcatatcgttcgtgcgatataaaagcgctgcaattgtcccgatgagcacgccgtacatgccaagcggcaccacaagcaaaagcgatatgagaagattgatgacggattcgatgacggaacggttctgcgttttttgaaaatgcccggcgtattcgatgacgcgctgcgcggctgcacgtccgtttgagagcaggtacgtgcagacaaaaagatgcggcaaaacgggatcgagatacgaaatatccgtcacaccggcggtgtagagcttcaaaaacggcagaatgaacacatccgccgtgagatacagcgcaaatgtgagcgccatattgtatgtttcaaatgcgcggtaaagccgcaaaaaatgcgcgcggtcggtgtgataggtttgccccaggacgaacgacacgctgccgtttatggcggagaccgccgtgccgaccatgccgaaaagcatcacgtacatggagtagacgctcgttgttttcagtccgcagacgacagagagcagtaaaacatcggtgttttgaaagatgagcccggagatctggtgtacgagcacggcacggtgctgcgcggtggcggttgtatcgggctgcacggcgcggttaagccagctatactgttttttggcgtagagtgtgagcagtgcggtttgcagtaagccacacaaaaagcagagcagctgtacggcgatgagcgaaagtccgcaaattagcagtatgattttgccgatgctgatggaaacagttaaaagcaggttggcgttgatgagcacgtatcctctgccctctgcctgcaaaagcacgcggtattttgcctgaaacagaaagcgcacggcttgtcccatgccgccgagcaaaaccgtgagcaatacggtaaaaaacggcagttcggttttgatgaaaaacggaaacagcacggaaagcccgcaaacgagtgcggcgtaagcgatgccgactttggcatattcccggcgaatcgcattgaagataccgctgacggcggctctgtcctgttcggcggcgggtttataaagtgcctgcagcgctgccgtgccgataccgctttcaagcaggtcaagatacacaagcgcctgctgtgtagcggagagcaggccgttggcttcggaaccgagctgtacgagcacgagccgcggaataataacgccgagtgcgatggaaacaaactggctgaaaagcccggaaaaggcattgaaaaagctccttttggcacgcatggctactttacaaacacgtcgcaaagcgtgcggatgatgcgctgatcccgccagcgcagatagcggcagcccgcgtgccagatggtgcgcaaagcgggtaagatgacgctgccgtcctccggcaggtccttgagcagctgcggcgaaacggcggcgtttgcctcgagtaatagtgcgagcagctccgggtcttccgttttcaaaaagcgctgggcgtaaaaatctgcctcacgcatcaggcggtcgcagcacagcgtgtgaatttccggcaagtcttttttccttgagagcttcagctcagcgatgagcccgcgcagataatccttggtgcaggcgagcgtgatacgtttattggaatgcgtgccgttgtagcggtaaaccacgtcgggcacggcgtagtattctttggcttttaaaagcgtgcagagaagaaaaatgggatcttcatagacacgcagcggcggaaattgcagcttgttttcaagcaaaaaattgcgattataaataaagcgggcgaaaaaacggtcgagcggctcatcgcaggcgttatgaaagccatcctccgtgaaaacaaacatggggtgcacatcgttccccttggctttttcaatagagccgccgcagaccatggcaccgcttttttcggcggcagtcaaaagcgtttcgagcgcatacgggcccggatagagatcatcggcatcgagaaatgcaatgtactccccttttgcctccgctatacccttattgcgcgccatgcctgcgccggcgttttcctgcgtaaggcaccgcacgcggccgtctctgcgctgggcgctcgttagaacgtctgcggaatggtctgtagagccgtcgttgatgcagagaatttctatatctgtgagcgtctgcatgaaaacgctgctaagtgccgtttcaagggtgtcttccgcgttataaacgggcacgatcaccgaaattttgcacatagttcttccctccttcataaaacttaaagcacagcttgtgcagcacagtgcggtttcgtcgatatagctttttaatatcgcgcgtgacggcaccgtactttttcaaaatggcatattgttcctgcaaaagcactttgttacgaaaatcgattgccgtgtaaaagcgctgcaaggcgtatcgcttttcgatctcgtctaagcacttttggtactcggcttccggcattttgatctgcttagcggtttgaagcaagatcgtctcgtgctctgcgatgcggcgcagcttgtcggtttcggtcacatctcccgcagacatgccgttttgatattttacatagccgtaaagcggttcgtctaaaaaagcgtgcggaaatttgtaacacaccggcagcatgagctgataattctgcccccgccgcgcggggtagatcatgcggttcggcacggcttcatcaaaacagcgcatgcggatcatgtggcagccggcgcataccatgccttcgccgcgcagaagataccaaaactgcatgagttcaaaacggcgcgaaaaccgcgcagcctcgtggtagagcggcattttgaggtcgctctcgtcaaaaacgaaggcgtcactgctcaccgcgccgtacgccgggtgctgcagcagatacgtagcgcgtttttcaacagagcccggtaataaaaaatcatccggatctgcccaacagagaaaatcaccgtgcgcgtggagtagccccgtctgtatcgcgccgccaagccctatgttttcctgcgtcagcacagtatactgcacgccgctttcttttaaaatcgtctcgaagtttttcagcagctttgccgtatcgtctgtcgaaccgtcatcaatgcagatgagctccaacgggcggtaagattcgcttattacggagcgcatgaagcggtcaagtgttttttcacagttatagcacggcagaagcagcgttacgagcggtttttccatcttttccctcctgcaaagtgcggcgaaacgcttttaaagcgtcttcatatgcggccgttttggcacgcagcgtttcggtgatctccggcgcgtggatgcgtaggcgtatccacctgtgcgtgacggcagtttcattcgcaatgttttcaatgggcagcacatagggcgtatcgacaccgaaaatgtcttctgcaaggcctttggcttttacagaatacccgagtgcgagcgtgggtacgccggaagaatacgccgcgatgacagcatgtgtgcgcgcgccgatgaacgacgaacacagcgcaataatcgatttaagctgcgacgcgctttggtctttgatgaggcatacgcggccgctgtcttgaaaggcagcgtataattctttaagcggatcgcggtcatcattgccgttttgcacggcgtgcgggatgagcgccacggcactgtctgttgtgcgcaggattgtgtcaatcagcgcgatgaggttacccaaaataagctttgcgtttcgtgcacggcgcagtaaaagcgggcttacattgatgccgacggtgttgtgcggctgaaacacttccggaatctccgcaccgcgcggctccagcaagaaagcagaatccgggcaaaaggagacgtttcgcagcccggcgctttgcagcgcgtgcagcgtttgtgtctcgcgcgctgtgatgcggtcaaatgcggtgaggtcacgtagcagagccttactgcgaagaagcttcggttcaatcgaacagccgagcagtaagctgccgcctgcatagcgccgtgcgaggttgtgcagccgaatgtgcttttgcatatcttcgtagcagtacacatcgccgccgatagagacgagaatatcgtcgcgcgtgagcgtttgcagcgcggcacggtacggcaagacatcgagcggtgtgtaatcgtttaaaagctttaagcgcagataggcgctccaaaatgcgggcgagcttttgcggatcacatcgcttcgcgcggggcgcacatcctgcacaacgagcgggcgtgctacgccgtatctggcatcttcctccggcgcttcggaaagcagcaccgtgcggccggggcctaaaagcttagaaacggtgcgcacaagcgcttcgcacccgtggtttgcgctgccgatgtggtcatgcagaatgtaacgcacgcgtattctcccctttcaaaatcgattttgcgtgttttgcggcgcggtatgcgg

SEQ ID NO: 801 - DNA, 5631 bp, Unknown
  16S sequences of unknown bacteria
cgtttcggtgcgttttgatattaatgtacagccggcgtcaagccggctttgacaggttttctgtcagtgttttgttgatttttgaagaaataccggatgagatgattcatttcaataccatacatacggaggtaattcagtgggtaatgtagtatttcatgcgacgaccatcgtcgcggtaaaacgcggcgatgaagtatgcatcggcggtgacggacaggttaccatgggcgaaagcacgattatgaaggcttccgccaaaaaagtgagaaagatatttaagaacaccgtcgttacgggatttgcgggatctgtagccgacgccttttctctgacggaaatgtttgaaaaaaaactggaagaacattccggaaatctcaagcgggcggctgtgtcgctggcacagcgctggcgttcggacaagggcatgagaaatctcgaggctcttatgatcgtggcaaataaagaagaaattctggtcatttccggaaacggcgaggttatcgtacccgatgaggatttcgtagcgatcggttccggcggaaattatgcatatgcggcggctaacgcgctgtatcatcatacggatctgtctgcggaggaaatcgtccgcgaggctctgggaatcgcatcttcgatctgcgtatatacgaattccaatatctcagtggaaaaattataggaggtgcggtatgggtgaattttataatcttacgccgagagaaatcgtggcggaactcgacaaatatatcgtaggtcaggacggcgcaaaaaaatcggtggcgatcgctctgcgaaacagacacagacggaatcagctttccgacgagatgcgcgaggaagtcacgccgaaaaatatcctgatgatgggtcctaccggctgcggtaagaccgaaatcgccagacggctggcgaagatcatggaagcgccttttgtcaaggtggaggcgacgaaatttacggaagtgggctatgtgggaagagacgtggattctatcatcagagatctggtagaagcttctattcggctgacgaagcagcagaagatggaggaaaagtataaggaagcggatctcgtcacggaggaaaaaatcgtggcggcgatcattcctgacaagaaagcggcgaaaaatagcaatgcaaatcagacagccggcggccagagcgataatcctttcgcgtttttatccaatcttccgggaatgcagcagtatttcccgtctcagccgcagacgccgctgtacgaggagaatgcggaagccgacaagacggccaacgagctggaattagcgagagaacaggtgagacagcagctccgtcagggtcttctcgaagatcagatgatcgatatcgatgtaatcgataataaagcgaataccatcgacatcggcggaaacgaaaatatgagcatcagtatcggcagcattttcggcgatatggtgcctcagaagatgaagaaaaagaaattgaaagtaaaagatgccagaaaaattctgagagagcaggaggctcagaacctcttggatatggacgcggttaccgcagaggcggtggaaaacgcggagcagaacggtatcgtttttatcgacgaaatcgacaagattgccgacagctccgaatacggccgcgggccgggagtttccagagagggtgtgcagagggatattcttccgatcgtggagggcagcgtcgtcaatacgaaatacggtccggtcaagacagatcatatgctgtttatcggcgccggagcgttccacgtttcgaaaccgaccgatctgattccggaacttcagggccgtttcccgattcgggtggaactggaaaacctgacgaaggatgctctgagacagattctcaccgtaccgaaaaacgctctgatcactcagcataaattaatgctggaccgaaggcatcaagatcgattttaccgacgacgcggtggatgaaattgcggaaatcgcatttatgacaaacgaacagaatgaaaacatcggagccagaagacttcacacggtcatggaaaaacttctcgaagatatttcctttgatctgccgaatcctgacgtcacggagattgtggtggataaggcgtacgtgatagaaaaattcgcagataagctcagcgaagacgatctcgacagatatattctgtaagtttgccccgatcggtaacaacagacccccgttctgcataatatgacagaccgggggttttgattgccatgaaacgataccataacgcaagacgaggcacaaaaaagaaaaaacggaggatcaagtccttgctcatggtggtgagtctgctgatcttatgcatctgcgggtttatttttatcgaaaatacgatgaaacatactctcagcaccacggctgagctgaaatcaaaagagatgattgaacagatcgtcaacagcgccgtctatgatctgacgcacaacgaggacggatcggagctggaaattatttatacgaatgcggaccaggcaggagatttgcagatggtgactctcaatacgccgctgctcaacaaaataggaacagagatagccaaaagggtcaataatgatatatactataacgaaaaagagcagattcgtctgtctctgggaagtctgataggaagcaaactgctgtctcagaccggtccgtatttcaatttcgatatcgtaccggttgcagtcatcaatgtcggctacaatacagagtttgagagcgcggggatcaatcagagcaaatacaaggtataccttaatgtaaaaacggaaacccgccttctggttccctttatgtcggagaaattcaggacagagaacaccgttctcatcgctgaagcggtgattgtcggagacgtgccgcagacctatacgaacataccgaaagaggaagtatctgaattggtgccgggctgatgtttcttttcctctaaggaatccgaaacgtcgcgcccgatgttctttccgcaggttgatcggggttttcgtcttcgacggaaatgtggagttgcgcgtgttcgccggcgctgtatcgaaatcgtccggggttctgatcgggagaagcggtcagagcggcgtttcgatttaatacaaaaagaaaaagccgtgttcgccggcgcatacgaactgcgccggcgggatacgacggaaagaaacacggcggaaaggaaaagaaatccctatgtttgaaataaacgaaaacaacgaagtcgtgtgcggtcagacgacgagagctattctcgtgggcatcagttttgaagaagataccgcagcttctatgaaagaactggaaggtctggcagaagcggcgggagcacaggttttaggacagatggttcagtccagggagcggccggacaaggctacttatctggggaaggggaaagtggaagaattagcggaaatgtgcggcaatatggaagcgaataccgtcatctttaataatgagctctccggcgcgcagatccgaaatctggaaaatgcggtaggagtgacggttctcgaccgcacgattctcattttagacatctttgcggagagagcttcttctgcagaaggacggcttcaggtagaacttgcgcaactgcagtaccggcttccgagacttgccggattcggcaaatctctgtccagaacagggggcggaatcgggacgagaggtcccggcgagaaaaagctggagatcgaccggcgtcacattcagtcccgcatggatgagattcgaaaagagattcgggaagtacagaaatcgagggaagtacagcgcagccggcgggagaaatccgagataccggtggtggccctcgtaggttataccaatgcggggaaatctgcgatgatgaacgctctgctgcgaaagacagaaaaagaagagaagtccgtgatggaaaaaaatatgctttttgccactctggatgtctctcagagaaagattcgcctggacaccaacagagagtttattctcatcgatacggtaggatttgtcagccggctgcctcattctctggtagaggcctttaaaggcactctggaggaagttttgtatgctgatctgctggtggaggtcgtagacgcctcgtccgaggactgcgagttcaatatgagcgttacagagactgtcctgagggagatcggcgcgggggatattccccacatcgtcgcttttaataaaatggatctggtggagagcgaagacaagcttccgattgttcctcagaaaacgttctgtgtctctgcgaaagaggacagcggtatcgacgaattgatcgaagctgtcggcagcgtaatctatgcggatctgcggacagcggaactgctcatcccttacgcacagggacagatttcttcttatctctgtgaaaaatgtacggttcaccgaatggattaccgggacgaaggcacttatttcagcgtagatctgaatactgcggattacaatcggctgacgccgtattttatctgaatctatcctctatcggaagaggaatttgagattttttcggatgcagtttctatattccggaattccggaaagactgcggagaaaagaagacgggtatcgcggaaaaagcgatccggttaaaccgatctgcggaagcggattttgattcggaagaaatccgcttccgcatcgttgaaaagagaaaaacagggagaacaggatggcagaacgaatggtttattataagacggcggcaaaatacggcgaagtggaacagacgatcgagaaatcccgttttatcggatatatcaagccggtgcagaaccgggaagaagccgaagcctttatcgccgaaataagggctctgcacaggagcgcgactcataatgttcctgcttatgtgatcggagaaaaatccgagatgcagtgggccagcgacgacaaggaaccgtccggaacggccggagctccgattcttcatcttttgaacggagaggggatcaccaatgtggcagtcgtagtgacccgttatttcggcgggatcaaactgggaaccggcggtctggcgcgggcttacggcggaacagcccgtctggctctggatgcggcgggagtcgctgaagtcaaagaaatggatcttctgactttcggtatcgactacacttattacggaaaaatacagaatagtgaaaaagacggcggctatatcatagaggatgccgcttttgaagaaaaggtaaaacttacgcttcaatgcgaaccgtcggagacagaaaggataaaacacatgctttcggagcttacgggaggtatgtgtacgggagataaaatacagataaagaaaactttaaaaaaagtggaaatttaatgttgacattcataattgcgtatcgtataatgaacaagctgaaaggttgcaggacgttctgcaggcaggaaatgcagtgtttttaaggctttgaggcagatatctttcaaaataaagcattaaaaagtgtttgacaaaactcaggaaatgagttattatagaaaggtacgaaacgcgctggcgtggctcaacggtagagcagctgatttgtaatcagcaggttgggagttcgattctcttcgccagctccattttatttttagaatacatcatggagggattcccgagtggccaaagggggcggactgtaaatccgttagctgagcttt

SEQ ID NO: 802 - DNA, 15415 bp, Unknown
  16S sequences of unknown bacteria
agaaatgacggcgtgtacgtcatttctggcattttttgcagagcaaacgcttgcgaaaaggtgaaggcccgaagggctgaaggcgcgaggacacgcccaaagggcgtccgcagcgccggaacaccgcgcaagcgaagcgcagggcggtgcgaaacgtaaaaatgcattcccgccccgaccgctggccgcaaatcgtcagatttgcaagcggtcgggcagattcgttggcaaaccagaggtttgtcaacgatcagagtcagcttcgctgacagctccccttacacaggggagcctttgaggacgctgaagacgaggacgcgggcgaaacaggcgagggcggtgcgaagaaaattagctgatttcccgataggcgatcacgggcttttcccggcccggcaggtggacgatatcgcactccacgtcgtacacgtcgcgcatcatttgcggcgtgatgacgtcgcagggcttgccctcgccatactttttgccgtctttgatgaccacgatccagtcgctcacttccatcgcgtggctgaggtcgtgcaagaccatcaccacgccgatgccgctttcgcggttgagccgcttgatcaggcgcatcatttccatctggtgggcgatgtccagatacgtggtcggttcatccagaaagaggatttccggctgctgcgtgagcaccgtggcgatccacacgcgctgggattcgccgccggagcattcgttgatggatttgtcgcgcagcggccacacgcccgtggcctgcatggcccaatcgatgatcttttcgtcctcctcgctgtggcgcgcgtaccacttttggtgcggcacgcggccatagcccaccagatcgcgcacctggaaatccggcggcgcgctgtgcacctggggcaaaacgccaatgtggcgcgctagctccttggccgtgaattccttcagaccgcgcccatcgagatacaccgcgccgcgccggtaatccagcaggcgggtgagccccttgagcacggtggatttgcccgagccgttcggcccgatgatcgaagtgatttttcccttttgcacgcggatatccatatcctttaccgcggtgtaatcgccataggcgatttccagcttttccgcccgaatttccataaacgcgatcccttctttctagacccttgccataaaactgcggcgcgtcaatgcccgcgtacgctgccctttttgcgcagcatgtacaggaagaacggcccgcccgtgacggacatgacgatgcccacggggatttccatgccgggcacgatggtgcggccgatggtgtcggccacgagcagcaccactgcgcccagcagcacgctggtgggcaacatggccttgtaatccgaaccgaccaggatgcgtgcgatgtgcggcaccaccaggcccacgaagccgatcatgcccgccacggacaccgtggccgccgccaggaaggcggacacggccgagaggcacacgcggctgaggctgaccttcacgcccaggctcttggccatttcatcgcccagctgcagcgtgttggcgctcttgatgcaggcgaaggccagcaccaggcccacgctcgcgtaggcggccaggatttgcacctgctgccaggagcggccggaaaggctgccgttcatgaaggcgagcacgccttccaggctatcggaattgagcatttgcaacagcgagttgtacgcgcccagcaccgaattgatggccacgccggagaggatgatgcgcacgggatccacgccgcccttccaggccagcgaatagatgagcgcgcaggcgagcgccgcgcccgcgaaggcgaaaatgggcaccgagttggtgagatgggggaagatgagcaaaatggtggtcgccgccgtgcccgcgccagcggatacgccgatggtgccggggtcggccagggggttgcgcatcacggattgcagcagcgcgcccgaggcggagagcgaggcgccgatcagcagcgccagcagcaggcgcggcaggcgcaggttatagaggatgaccttgacggtgttctcctcgccgctaagcagggcgcgcaggatctccggaatggagtatcccgcgctgcccaccgaaagagcgaccaaggacaagaccgccatcgccacgatcaaaaacagccagatgctgcccacctttagggcgttgatgccgcgcttttgcgatgtcttgttcatggacggcctcattgcgcaaagtggttcaacacgatgtccgccagcgcgttgatgttgtccaccacgttgatgcccgcgctggaaatgtagctcaccggcaggtagatcacgtcgccggcggcaatggccgggatgctgttccagtaatcgggattgttggcaaagtcctcttccatcagcgcccggtgctcttcgcccgttttgctcatgcccacgcagagcacgaggtccggatcgtaagaaagggcggtttcataatcgagttgcgccatggaggacgcgtcgttttcatacacgttggtcaggccgagcatttccgccatggagccgagcgtgccgccgttggtctggatgtagtgggaaggcggagcggattgcagcaccatcacggttttgcccgccagctgcgcgcgcgcctcttccaagcgcgcttccaggtcggcaaagcgctgcaggatgtccgcgcccacttccgtatccgcgccaaaggcgtccaccagcgcctgggtttgcgccaggatggaatcgtaggaaaccgtgtggcccgcgtccacgtagtacacggggatgcccgcgccttccagcaccgcgccataggtctcctgcgaggtgtagcccaggatcaccagatccggttccagcgccaccacggtttcgatatcaaagttggtgttgtgcgaaagctgcaattgctgcgcgcaggccgcgaggtcttccggccaatccaccacgctgctggccgggatggccaccatgggcacgcccatttcgtgcagggccaataccggcgtggaggacatgcataccacgcgctgcggcgcgctcgttagcgtcaaaggttcggtgtagcccttttcctgcatgttggcggggtattcgagggtgatggcggcggtttgcgcggtttgcgccgtttccgcggcgggcaccgcgccttccagcatgtccatcagttcattgaagctatccaccacctgcagccccttggtggtgacgaattccttggagaggtacacgacattgccgttcttcaccgcgtcgatctgctgccatgcggggttcgcggcaaagtcctcctcgaaaatcgcgcgcaaatcctcgcccgtggcggcggtgggggaaatggcgaagatgatttccgggttgagcgtgatggccgtttccgcatccatgggcacagtgccgcccgccgggtcggtcacggtgtcggaaaggttgtcgaacgggagcatggccagcatgctgcccagatagcccgacgaagtctgctggtaggcgcccggctcgctgaagaagatcatcatgcgcatgcgctggtggctggcggtgaactgggccgcgcgctcttccaccgcggcaaattccgcctcgatttccgccgccatttccgccgtgccaaaggagcgggccagggcgatggcggtttgtttggtttgctcatagttgatggacgggccttcgctggtgtagtacacggggatgcccgcgtccgcaaactgctggccgtaggtttccttctgatagctgcccacgatcaccagatccggctcgtaggcgaagatggtttcgatgtccatgccgtttacgcctacggtcacggtgggcagttcatacacccactccgggaattccgccgaggcggacagggaggtgatcaccaccggcgtgatgccgcagcgcaccagcacttgcaaagcggcgttggacaggcaggcgatgcgctgcggttcctgctccagcaccagggtttcgccctcgctttcggccatgaaatcgggataatacaacactttttcgccggacgcctcctcggcaaaggcggcggccaggagcgacgcgcacagcacggcgctcagcatcagggacaagaattttttcaacataccaaagctcctttcgcattttcctccgggttttcttcccgcgtgagttgcagcacgcgctcggccaagtcctcatagaccgcgcgcatgggggattccgcgaggcactcgaacaccgtgccgcccccggcctcggcgcgctggatatcgccgctgcggggaatgtaggccaccacttcggtgccgatttcccgcgccgcccgcgcgacgatgtcccgttcgccctcgatgttgcgggcgttcagcacgatgccgcacagccgggcatagccgcgcttgccaaagccgcgaatggcctgggcgatgttgctggccgcgtacagcgccatcatctccccggaagaaacgatgaacacctcccgcgcgtatccctcgcggatgggcatggcgaacccgccgcagaccacatcccccagcacgtcgtaaatcaccacatcgggctggtacacctcaaaggcgcgcagctcggccagcttttcgaacgcggagatgattccccgccccgcgcagccgaccccgggcgtgggcccgcccgattccacgcacagcaccccgccatagccctcgaacacaatgtcctccaggcgcagttcatcgcccttttgccgcagctgctccagcacggtgggaatccgcttcccgcccatcagccccttggtggaatccgccttggggtcgcagcccacctgcatcacgcgatagcctttttccgccagcgcggcggagaggttcgaggtggtggtggatttgcctatgccgcccttgccgtatatcgcgattttccgcatcgctctctcctttccggcgcatttctttcacacgcccgcgcttgacaaagccttcggcgggcgctagaatgaatgcgcaaggttagtgtatgctaaccaacggccaagagtatatcacgccgggcgaagtttgtgatctcaaattctccggcaaaaccttaaaaatcttctgttttccaaggagggttgttgcgtggaatgcttggaccagcgccccatttccagcgaagaatgggaattgctctacaaccatatgcccatttgcgaagcgctcgtgcgcgaaggggtggacgcggcggccgccctgtttcgccgccgcgtggaaatcctggctgggcagacgagcgggccgcccggccaggagacggcctttgtgctgctcacctcgctcaaccgcagcctgtacgattttcttttgctggaattcggcgtgtcgctggcccaatgctgctatcgccaccgcgcgcacgcctgcgacatccacagcgcgtgcgccatcctgcgcgcggcgcgggcgatgctggaagactacgccgccggactgcgccacagccgcgccaaccgcccgcacatcgaaaaggcctgcgcctacatccgcgcgcacttggcggaggacctttcgctggagcgcgtgtgcgccgccgtgtttctcagcaagagttacctgtgccagattttcaaaagcctgctgggctgcacctttggcgaatacgtgaaacagcagcgcattctgcgcgcgcgcacgctgctcgcctccacagggcaaagcattgaggaaatcgccgccgcttgcggctttgcttcgcccacgtactttgccaccgtgttcaaaagcgccgtgggcatgacgccgtccgctttccgccagagcctgcgctgacaaacccgcggctggccggcgcgcccctctatcacggctccttttgcgcgccgggcgtttgaaacacccactttttgcacagatggtagttggcaaagaacagcagcgtatcgaccacggccttgagcgccgttttgacggcctccggctgaaaactgccgccgcccagccaatggaacaggtacacgccgccgtataccgccgcggcggaaacagcgatggtgcaaagggataaaatggcatagcgcaaagccgagccagcggcccggctgcgaaacacgaagcggcggttgagcagaaaattggccgccgcggaggcgacgcgcgccagcaccgtggcgcagccgatttccagcagggattccccgcggaacaaaaacgcgctcagcagatagaaaaccaggaagtccacccctgtgcacagaaaggatgcgatggcgtatttggcgatggacaaaaggcgcgctccccaggcgcgcgccttggcccgcaacagatcgcgcgtcatcgcaggaagagcaacacgcccagcgcgcacgcggccaccggccccagaaacgccagcaggcgcaatcccacgggccactgtttcgcgcctaggaacgcggagcagccgcccaccacgccgcccagcagcgcgcaaagccccatctgccacagaaccgcgttgatttcgccgcccacccgttccggcagcgaaaccaggcacggcgcgtaatagcccaaatgcagcgcgatggaggtgatcagcgcggcgatgtgctccagcgcgacgccaaccgccacgccgatggccgcccgctttgccagttttttgcccatggatttgcctcctagaaccagatcatatcggaaaccgagcgctcatccccgccggacggctggttgatgatttcgccgcagagccacatttccgtggaaccgccgccatccaggttgaaggccgtttgcgcgccatagaacataaacacctgttgcaactcctgcagggtcatccccttggaatagccgtcctgccgcccatccgccaccacgatgatgtagtgcagcgggcccaactggccaatggccgtgcgcggttcgcgccgcgtatcccgggtggaaatcacggtgaaatccacggggaactccaccagcgcgccgtcccgcaccagctcggggccaaactcaaaggtttgcaacgcgccctcttccaccagttgcgcgcccaactcctggggattttcgccctcgcgctcgctgcgcacgcgcaaatcgccgttcgcgtccacaattagcaggtgccgcgtggtggtggccgtgcggtacagcgcgccgttgcgcagaatcacgccgtattcgtgcgcgccatagttgtccgcgttgatggcgaacaccgcgcccagcttggttgccatgctggagatgtgctccttgccgccgccgtattccccgccgccaaaggcggtttggaactgggaagcgctcgcgagctgcacatccgccacgaaatatacgatgccgttttcttccatgcggtcgatgtggatggagtgcgtttcgtccacatattcatagtcggattccgccacgcagggttgcgcccaggcgctttccgcccgcgccgccatggagggcgcgatttgcccttggggcagcaacatagcgatggccagcgccgccgcgagcgcggcgacggtatagtttagccgtttctttccttgcgattccttctcttgcatgaacaaaaccttctttattttcgcgtagtttcaaaccgcttttttcgcaggtattcgccatttttcccgcgtttcctttgattcggcggcgttatccgcaaaaattacacacgttcaaagtttgcgcgatttgcatcacgatatggttaacttcgaagggacagccgagcgcgggtttgcgtgcgatcgagcaattctaacatttttcgggttgacaggcggcggcgggaatgctataataacgccaaccattgcgaaaagcgcggaaagccgcgcgggcgcaatcgcgggaggataccagaatgcatcgttcgttctcgtttgcgggcttttttacctttaccggctttttcggtaagggcaatttgcgttcgcgcgagaaggaaggcaggtaacctcgtcaaatgaggtgggcacaggctccgcggcgaacgccgtggggcctttttcatggggaaacgcccgcccgcaagggatttggagggaaaaatatggtcgtattgctgaaggagcacccggacgagcggcaactgaactatctgaagaactggctggccagcatgaacattgaggcgcgcgaaacccagggcgagcaccagaccattctcggcctggtgggggacacttcgcgcatcgatatggacttgatccgcgcgctggaaatcgtggaggacgtgcgccgcatccaggaaccctataagagcgcaaaccgcaaattccatccgctggacaccgtggtttcggcgggcggcgcgcagattggcggcgggcatttcgccatcatcgccgggccctgctcggtggaaagcgaagcgcagattgtggaagtggcccggcgcgtgaaggccgcgggcgcgacgctgctgcgcggcggcgcgttcaagccgcgcacctcgccctacgccttccagggcctgcacgaagaggggctgcggctgctatccatcgccaagaaggaaaccggcctgcccatcgtgaccgaaatcatggacgcggcgcacattccgctcttcgaggacgtggacgtgatccaggtcggcgcgcggaacatgcaaaacttcgaactgctcaaggaactcggctcgctgaaaaagcccatcctgctcaaacgcggcctggcgaacaccatccaggaactgctgatgagcgcggaatacatcatgtccggcgggaacgagcaggtaatcctctgcgagcgcggcatccgcacctttgaaaccagcacgcgcaatacgctggacatttccgcggtgcccgtgctcaagagcctcacgcacctgcctgtgatcgtggatcccagccacgcctccggcacttcgcgcctggtgaagcccctctccatggccagcgtggccgcgggcgcggacggcctgatcatcgaagtacacaacgacccgccgcacgccctgtgcgacggcgcgcaatccctcacgcccgaagcgttcgacgatgtggcccggtgcgtgttcaacctgcgcacggcgctgaaggcggggtgagcgcggtgcggacgattcgggtggaagcttccacgccatacgacgtgcgctttgaacgacgcggctcgctgttgcaagtgggcgaagctgtgcaggcgctgggcgtgcgcgaagccgtggtggtgacggacgataccgtgcgcgcgctctatgggcaaacggtggcggacagccttgggcgcgcgggtgtgcgcgcgcaatgcttttcctttgcgcccggcgaggacagcaagagcctggccacctacggcgcgctgatggagttcctggcggaaagccagctcacgcgcgcgggcgcggtggtggccgtgggcggcggcgtggtgggcgatttggccgggttcgcggcggccacgtacctgcgcggcgtgcgctttgtgcaggtgcccaccacgctgctggccgtggtggattcctccgtgggcggcaaaaccgcggtgaacctggcggcgggcaagaacctggcgggcgcgttctaccagccctccctggtggtggtggacatgggcacgctgcataccctgccgccggaagaagtggccaacgggctttccgaaatggtgaagtacggcgcgattgccgatgaaaccttattcgcgcaaatggcttccggcggatacgacgaagcgcgcgcggcccgttgcgtggaaatcaaagcagactttgtgcggcaagacgagcacgatggcggcgcgcggcaggcgctcaacttcggccacaccatcgggcacgccatcgagcgcgcctcgaatttcctgatttcgcacggccgggcggtggccattggcatggccttggtcgcgcgcgcctcggcccaaatgggctggtgcagcgtggacacggccaacgccattgtggacgcgctgcgggccaactatctaccgaccgcctgcctgtaccgggcggaagagctggcggaatacgccttgcatgacaagaagcgccggggcgattccctcacgctggtcacggtgccgcgcatcggcgcgtacgagctgcgcgccctgccggtggcccaactggcggatttcatccggatgggagatgagcgcgcgtggacgtaaaggtctatccctcccgcctggcgggcgagatccgcgcggtggattccaagtccgccgcgcaccgggcgattttcgccgctgcgctgtgccagcggccgcccgaactgacgatccgcgattcttccgacgacatccgcgccagcctgggcgcggcgcgggccatccgcgaggggcgcggcgaaatcgattgcgccgagtgcggcgcgacgctgcgcttcgccctgcccgtggccgcggccctggggcggacggcgcgctttacgggacggggccggctgcccgagcgccccattgcgcccctggtgcgcgcgctggcggcgcacggctgcgcgttttccgcggagcgcctgcccttcgagttgcgcggccaactcgcgagcggcgtctttgaactgccgggcaacatttccagccagttcgtctccgggctgctgctggccctgcccgcgctgccgggcgggggcgaaatccgcctcacctcgccgctggaatcggcgggctatgtggatctcacgcgcgctgtgctggcggatttcggcatcgccgtggaggagatgagcgcgggctaccgggtgcccggcgggcaaacgttcgccccgccgccaacctacgcgccggagggcgattggtccagcgccgcattctttctggccgccaacgcgctgggcggcagcgtgcgcgtgaccgggctgcggcaggactcccttcagcccgaccggcaaatcgccgcgctgatggcttcgctcgcggatctggacgctgccaaagcgccggaccttgcgcccatcatggcggtggtgtacgcggccacgccggggcattggcgcattcgaaacggcgcgcgcctgcgcgccaaggagagcgaccggctcaccgcgctggcctgcctcaaggaaatcggcgcggacgcgcgcgtggaaggcgacgagatggcgattcgcggccaggcccgcctgcccggcggcacggcggacgcgcgcggcgaccaccggctggccatggcgctggccatcgcggcctgcgcggcggaaaatcccatcaccatcctgggcgcgcaggcggtgaacaaatcgtaccccgggttctttgacgattaccggcgattgggagggaaagcggatgtcctctagctatggcaaccacttgcgcgtatcgatctttggccaatcgcattcggaggcgattggcgcggtggtggacggcctgcccgccggggaagccatcgatctggaggaagtgcggcgcttcatgcggcgccgcgcgcccgggcaaaacgcccattccaccgcccgcaaggaggcggacgagccgcgtgtggtcagcggcctggcgggcggcttcacctgcggcgcgccgctgtgcgcgctgatcgagaacaccaacgcgcgctccggcgattacgacagcctgaaaaaccggccgcggccctcgcacgcggattacacggcctttgtgaaataccagggctttgcggacgcgcgcggcggcgggcacttttccggccggctcaccgcgccgctgtgctttgccggggcggtggctttgcaaatcctcgcgcggcgcggcgtgaccgtgggcgcgcgcatcgcggaaatcgccggagtgtgcgacggcccggcggaggaagaggcccggttcctctccgcgcgcgaaaaggagtttcctgtggcggacgacgccagaggcgcgcaaatgcgcgaggccatcgcggcggccaagcgcgagggcgattccgtgggcggcgtggtggaagcgcgcgcttacggcctgcccgccgggctgggcgagcccatgttcggcggcatggagaacgagttggcgcactggctgtttgccatccccgccgtgcgcggcgtggaattcggcgcgggcttcgcggcggcgcgcatgcgcggcagcgagcacaacgaccccttctatttcgatgaagaaggccgcgtgcgcacccgcgccaaccggcacggcggcgtgctgggcggcatcaccagcggcatgccgctactcgtgcgcgcggccttcaagcccacgccctccatcgcccgcgagcaggaaaccgtgaatttgcaaacgggccaggccgaaacgctggtggtgggcgggcggcacgatccctgcatcgtgccccgcgccgtgccctgcgtggaggcggccgtggccctggcgattctggacgccatgctgtaacgtttgatcgagaaattgcgaccgctaaggaaggagaagcccctatggaactgaaggattaccgcgcgaagatcgacgagatcgacgcgcaaatcgcccatttgttcgccgaacgcatgcaggccgcggaggccatcgcggattacaaggcgcaaaatcacctgcccatctaccatccggcgcgcgagcgcgaagtgctcctgagcgcctcgcaggccgccgcgccctattcgcgcgaggcgcgcgtggtgttcggcgccatgatggatgtgagccgttcgcgccaggcggccaggctggcgggcgaatcgccgctcacgcaagcgatttcccgcgccgtcgccgaaacgcccgccaccttcccgcaaaacgccacggtcgcctgccagggcatcgagggcgcgtacagccaccaggcggcgaaccgcctgttcgcgctgccgcagattctgttcttccagcggttcgacggcgtgttccaggccgtggaaaagggcctgtgccgctatggcgtgctgccgattgaaaacagctccgccggttcggtcaccgaggtgtacgacctgatgaagggccgcgatttctccatcgtgcgcggcacgcggctgcacatcgtgcacgcgctgctcacgcgcggcgcgaagctcgggcagatccgcgaagtcatttcccacgagcaggccgtgcgccagtgcgcgcccttcctgaaggcgcatccggagatccgcgtcaccctgtgcgcgaacaccgccgtggccgcgcaaaccgtggccaacagcggccgcgacgacctggctgccatcgcttcccccgcctgcgcggagctctacgggctgaccgcattgccggattccatccaggccagcgacaacaaccacacccgcttcatcgtgatctccaaaaagccggaaatctatcccggcgcgaaccgcatcagcctgatgctcacgctgccgcacgtggccggttcgctctatcgcatgatcgcgcgcttctccgcgctggaaatgaacctgctcaaaatcgaaagccgccccatcccgggccgggatttcgagttcatgttctattttgatgtggaggcctcctgcgccaatcccgaagtgctttccctgctggcggaactggagagcacggtgagccagtttgccttcctgggcaattacgcggaagtataagggtatgaagtacggattgattggcgaaaagctcgggcacagctattcctgccaggtgcaccgggcgctgggcaacccggattacgtgctgaaagaaatcgcgccggacgcgctgggcgatttcctgcgcgcgcgcgatttcgccgggctgaatgtgaccatcccctataagcaggccgtgattccctatgtggacgcgctcacggacaccgcgcgcgaggtgggcgcggtgaacacgctgtatttcgacgcgtccggcgcgctctggggcgacaacacggacgtttacggcttttgtaccatgctggaaggcatcgatgtgcggggcaaaaaggcgctggtgctcggctccggcggcaccagccacaccgcctgctacgcgctgcgcgccctgggcgcgggcgactgcatcgtggtttcgcgcaggggcgcggtgaattatgaaaacgtgtattccctgcacgcggacgccgaggtgatcgtgaacgccacgcccgtgggcatgttccccaacaacggcgcgcggcccatcgacatccggcgctttccgcgcctgtgcgccgtggcggacgtgatctacaatcccgcgcgcaccgcgctcttgcaggacgcggacgctttgggcatcccccgcgcgggcgggctgagcatgctggtggcgcaggccgcgcgcagcgtggagcggttctcgggccgcgcgctgggcgaggaagcgtggcggggcgcgcttcgccaggtggcggcgagcctgcgcggcgtggcgctcgtaggcatgcccggctgcggcaagagcaccatcgcccaggccgtggcgcaggaattggggcgcgcctgcgtggatttggacgcggaaattgagcgcgaggcgggaaaaagcatcccggagatcttcgcgcaggacggcgaggaagccttccgcgcggcggaaacgcgcgcggccaggcaattctcccgggaaaacgcggtgctggccacgggcggcggctgcgtgctgcgcgcagaaaacgcgcaggcgctgcgcgcgaatagcctggtggtttggctcaagcgggcaatcgaccagcttccccgcgagggacggccgctttccgtgggcaacctctatgaaatggagcaaaagcgcgcgccgtattaccttgcggccagcgatgtgcaaatcgaaaaccaaggaagcgtggaggaggtcgcggcggcggtggtcgccgccctccgggaaggagcggtgcatctatgaaaattttggtgctcaatgggccgaatctcaatttgctgggcgtgcgggagccgggcatttatggcacggaaaactacgcggcgctggtcgcgcgcgtaaaaagcgccgctgcgcggctgggcgtggaagtggaaatccgccaatccaaccacgaaggcgcgttggtggactggatccaggaagcgcgcggcgcgtttgatggcatcgtcatcaacccggcggcctacacgcacaccagcgtggcgattctcgacgcgctcaaggccgttgctcttccggcggtggaggtgcacatttccgatgtgaaggagcgggaaccgttccgccagatctcctacgcgggcatggcctgcgaaaagaccatcatgggcaaaggcctggcgggatacgaagaagcgctggaatatctcgcaaaccggctggcaaacgcttaaagcctcaaatgcggcaatccggggctgtgaaaaaacttttattgttcttacacagcctcagactgtcaaaaaccccaagggagagcgcgagagggacggagcttcgccgccgccagtggcggaaacaggcgaagcggaagtccaatgagggcgaaagaggcggcgcagccggtggctgcaatagccgccgatgagcccagtgaagcagggagcaccgcgagtgagcttgcgaacgatgcggagcgaccatgctgaactgagaggtaggagtcttgcaagcggtagcgcagtaaggcgactattgcgaattgtggaaccgaagccctttcgcgttttaatcgtccccggcggc

SEQ ID NO: 803 - DNA, 5051 bp, Unknown
  16S sequences of unknown bacteria
atatcggggcggcccgcctgcagtgcatacaatcggtttttacttggcgccgttgacagtgtccttcaaggctttgccgggcttgaaagcgggcacttttgcggccttgattttaatggcttcgccggtttggggattcttgccggtacgggcggctcttttgcgggtctcataagtgccgaagccaaccagggtgactttgtcgccttttttcagagcttcggtgatcacgtcagtataggcgttcaaggctgcttctgcatcctttttgctcaggcttgccgtgttggccatggcttcaatcagttcagacttattcataagttatatcccctttacgataaaattcgagatatgctatcagcattatagcataaaatccatagaattccagcgtttttcaacggtttttgaaaaaaggagtctgaaaaacgggaaaacgctcgctttttagccttttatacaaagaatagggtgttattttaggcattagggagagaaaatttgattcaaattggccacaactgcttgcagcgcatgattttgtgcagcgcagaccagacgaatgccgggcaaggaacggacttctgccgccgcattttccggggcgaaagcatagcgtgcggcgcgcagcatgggcagatcattctgatggtcacccacggcgcataagccggatgctttcaggcccagccggcctgctaggaacaggagcgctgtgcccttatctgcgccccgggcagtcagctccagcatgtggggagcggcaaaaatagcctcacaggcctgacctaacgctgtggtacgcagggcggagcacagcgccaacagctgctccggcggcgcttcaaacagcgctttgtgcagcggaaagaccacctgatccagggatgtgaccgggcacatgcgggaatgtgttgtgcgtcggtgctcttcggaccatgcgttaggatggagcacccagacggtttcgtctgcgtgatacagctccagtgcggcgccggggaaacgctccgcaagcacactcagatctgcggcggcgcaagggagcagatgcgtcatcatacagtagcggccggtggaataatcataaagcgctccgccgcccgagaccacagcgggagcgttcagcggcagctgcgcagcatagggagcaaacgtggcggcgctgcggcctgtggaaatggtaaagcggccgccgttttccgtaaaataagtcagagctgcgcagttttctggagacgtgccctgaacaggaagcccctgtgcgcgcagcgcagaggtgggaaccagagtgtcgtcaaaatcactggccagcagcacaccggaaaatttgcccatttgaaactcctttccgaggaaaaaatccgcaaaggcacgatgtctccgcggatctaaaacgtttcctgcatcaaataccagcttccggcgcaataagctgtgtaagcgcttttgcgcacagaagcatcggcgttttcagcggtgatgtgcacggtgtagtccacttgcagcagcaggatggcccgggcggagagcagatattcgcgttccagcgcgcgaagataatcttcttttgcgctgccgcgaatccagcgcacatggcgcagcgcaggttctgcggtgaaagcggcgccgtagacagcctgccagtcgcgcaattgcgccgaccaggatccgtccggacggaagtatcccagatcttccagtgtgcggcaaaggtccggatacaacgcggcctgcagcgcggcgggagaaccctgggaaaggcttttataggcggcttctatgggagtaaaagcggcctgctccacggtttgatgcacaaacaacgcgcctaccagagccgagagcaccgcagccgcaaccagaagggagatcaggcgaattttccagcgctgcttgggcggtgtaatcggatcaatataatcctcagacgcactttcctcaaacgccatatgccgcagcttgcgggcaatgcgtttttcgcgccgcgatagagcaggcggagacgcggccgggggcgatatgcattcgtccgtttcttccagacaggcagtgccgggtttgagaacgaaaacggttgcttcctcctgcatcgccggaatggggcggccgcagacagggcagaaacggctgccgtcgtccatggcggcgccgcagtgcggacaggaggtggacatggtttctcggctccttctgtaaaaaatcaacggcggctttctcgtttgccgcggggggctgtgcgctcatactccgctgctggccgcggcaccaggctaatgcgctggccgtggaacagctgccagagaacacggaaaatttcccagcttccaacgccaatcaggaacagcagcagcaggctggagggaacaaaacgcgcaatggaaaagaaggtattgaaagcgaagtagcccaggaagaacaggaatgtcatggagccgaacagtacaacgcgcaccggtgtccaggggtggcagacgtaatacaggaggatcagaatcgcaccgccggtcagcaggacgcaaagggcttcgacttgattctgatccagagagaaggcctgtccacagacgacggccatcagaaccgccagagcgatggtgataccgcagggagcagcggtggtgagtacattttttaggaaatgcccctgcacccggtcgtggttgggctgcagacccagcacgacagagggaacgccggtggtggtaaagccgatcagcgtcaaatggatcggctcaaaaggataaggcgccgtgataaacaaaaaggcgatggacagcagcgaggcgtacaccgttttcacaaggaacagagaggcggagcgctgaatattgttaatggcgcggcggccttcggcgacgactttgggcagggcttcaaaattggatttgagcagtaccagctgggccacgttgcgggctgcgtcggcgcccccggcaatggcaatgccgcagtcggcctctttgagagccatcacatcattgacgccgtcgccggtcatggccactgtgtggcctttcttttgcagagctttcaccaacagttttttctgctctggggtcacgcggccgaatacggtgtatttttctgcggcttcggcaatctcctttttggatacctgggacatatccacagccttgtcccagttttcgacaccggcccggcaggcgatgccggaaacggtttccacgctgtcgccggaaatcaccttgcagacgacgccctgctctttgaagtaacgaagcgtagcgggggcagccttgcggatattatcctgcagcaggatcagcgctacgggatgcagaccggagggcagcccttcggcgcccagcggcatgtcactgtgggccagaagcagtacccggttgtcgcggctgtactcatacaaggcctcttgcagatatggatcccgtgcaggcatcacaaattccgctgcgccgagaatgtaagtgccctggtcttcgaaagtggcgccggaccacttggtacggctggaaaagggggctgttttttcggcgcgccaaggtgcgggattggtaaacttcgcggcaatagcggtgaaagtggcgttgtgatcctccagtgcggcggtaagggaggcgagagcctttggaacctgtgcttcaaacagctcgtccagcacaacagtttctttgcagtccatagtgccttcggtaatggtgccggtcttatccagacatagtacatccacccgggccagcgtttcaatgcaatatagctcctgaaccatgacatgctgctgtgtcaggcgcactacagaggccgccagcacggtgctggtcagcagcatcagaccctcgggaaccatggcaatcagggctgcggtagtgttgagcacagcggagtgaatggtggcatccgccagcgccagctgattgcggaacaggataatggaaatcgggattaaagcaatggagatcacagccacaatggcttgcatggtgcgcatgatttcggaattgacctgctttttcacggttttggctgaggtggaaattttggaaatataattgtcggcgctgacccgttctgcccgggcgtgtacgctgccgctgacgataaaactgccggccagcagcatatcattgccgtttttggaaatagcatcactttcgcccgtaagaaaactctcatcagcttcacagaaaccactggccacaatgcagtcggtaggtacctggtcgccggcagaaaggattatgatatcgtccagaacgatctcgtcaatgggaatctcggacgattccccgtctcgtagcactttggctttggcagcggtgagaaagctcagggagtcgatagagcgcttggcccggatctcctgaatgatgccgatggcggtattggctgcgacaatggccataaacaacgtatcttttacagagccaacagccaagatggcgacaaagaaaataatattgaccagattgaacagtgtgcagatgttgcgaaggatgatttgcttttctgtgcgggttgccggcgtggaatcaaaattctgctgtcctgcgtcgatacgctcctgaacctgttgggcggtgaggccatgggcggagtccggatgcagacgttcgacagggcgtttttccggccgcggcacgctgggttctgtctgtttctgtaggagtggctttttcatatgtcgctgtcctttctccgatcggagtgtcgaaaatgaatatttaatatacagtataacacaatttgtgcaggattgcgcatgccaaggcaaaaatttttggcgtattggctggcgtgtatgcgggcaggcagtgttgcctgtgcggcagcatagattttctatttttttccaccaactgtctaccatgtctaccggatgtctaccaaagtgggaaaggaaaacagctgggggacaagagatagaagaaaagcaacgacagcgcctgccggcgaaatgtctaccaaattgaaagaccatacgttttgcaatccccggaaaggccgctgtggtgcggctttccggggattttgctttgcggtcaaagaggtgctatgcggtatttata

SEQ ID NO: 804 - DNA, 4371 bp, Unknown
  16S sequences of unknown bacteria
ggggcgcacgaagcgcgcgcgctgtgcgcgaagcagcgcgaagtaagcccaatgaacaagggagagccgcaagcgaacttgtgagcgcagcggaacgaccattgtgaattgtggaacgctgccggcgctagccggctgaggggtgtcaatccctccgtcacggcttgcgccgtgccacctccctttaaatccctccgccacggcttgcgccgtgccacctcccgatccctccgtcacggcttgcgccgtgccacctcccttttcccttcgggaaaaaggaggcttttggtagggctacttcattcggtggtaccacttcccaaaaggctcccctgtgtaaggggagctgtcagcgaagctgactcagagtattgacaaagtatcggaagaacgaggctctaatcagaaatgacggcgtgtacgtcatttctggcattttttgcagagcaaacgcttgcgtttgcggtaaaaatgcattcccgtcccgaccgctggccgcaaatcgttagatttgcaagcggtcgggcagattcgttggcaaaccagaggtttgtcaacgatcagagtcagcttcgctgacagctccctttggccccaaagggaggtggcgcggcgcagccgcgacggagggattgacacccctcagtcagcttcgctgacagcattcctcaattcagcatggtcgtacccctgcgctcacaagctcgcttgcggcactccctgcttcattggggtcttcgtaccagcctgcgcttcgctggcccggtattccggggctgcggacgccctttgggcgtgtcctcgcccctccaccccttcggggcttcgacaggcttacttcggcctgtttcgcgcactgcgcgcggccttcgtgcgccccctttgggaaaggggagccttttgggcgcagctgcgacggaaggattgtcccattccttcgggctttgtcaagctagaacagcttttccaccgccatcagcgggacatccccctgcgaaatggcctcgatgctttcctccaggctggaatcctccgccaggaacagcggatacgccgtggcggtgatggtgtcctcccccgtttgcataaaagccacgcccacctgcgcgccatcgaaccggagaatgagcgcgcactgctcaaaatcttccggcatgctgtaggtgcgcgtataggcgagcatcgtggaagctgccacggcttccgcgctcacataagcgttccactggttcaaaattgcggaaggcattttgctgttcagggattcccggccggtttgcgacatttcatccaaggttcccatcagagaaatcatgccttctcctatccttatccgccaggcgccggtcacgctggcaaaatccgcctcctgcaagggcgcgaggatatcaaaaggattgctggtcatcatctgcatgtacgcctcgtcgcccgccagttcgcccacgcaccgcgccaattcgctggcggtttccagataccagtcgtcttcctgtgtttcttcctgcgcaaaggccaggcccgtgcagaaaagcgccaacgccacagccgcagcaaacatccgcttcatcttcatgaaatcttcccccttaactctccagtcaatctacgccttgcgcactttcggccccttgggcgtgtcctccacgacatagcccatctgctcgatctgggcgcggagcgcgtccgcctgcgcgaaatccctggcctttttcgccgcctgccgctcttccaccagcgccttcacgtcttccggcacgagatcggcttcccggcggagcaggccgagcacgcctgccatttcgttcagcgcgttcacgcccttttccacggcggcgcggctggaatgctcattgagcgaggcgttcatatcgcgcacgtattcaaaaatcacgcccagcgcgtccgcggtgttgaggtcgtcgtccatcgctgcgttgaaagcggaaatcgcctgatccgcgcgcgccgcgaaggcttcctcctccgccgtcatcgggcaatcgggcgcgctttcccgcaaaaacagcgcgttatcgcgcgcggtatacagccgggcgagcgcgttttgcgcctgctcgattaaatcgcggctgaaattgatggggctgcggtagtgcgcgctgagcatgaacaggcgcacggcctcgggatcgaattccttcacgatgtcgcgcacggtgaagaaattgcccgccgacttgctcatcttgtggttgtccacgttgatgtgcccgttgtgcatccagtagcgcgcgaagggctgcccgttcgcgccctcggactgggcgatttcgttttcgtggtgcgggaagatcaggtccacgccgccgcagtggatatcgaacgtttgccccagatacttgcaggacatggccgagcactcgatgtgccagcccgggcggcccatgccccaggggctcttccaggcgggttcgccgggcttttgctttttccagagggcgaaatccatggggtgctttttgtcctcatccacctcaatgcgcgcgcccatttcgcggtcttccagattttgcccggacagcttgccatagcccgggaaggcgtgcgtatcgtaatacacatcgccgtccacctcataggccagccctttggcctccagctttttgatcatgccgatgatctcgccgatgtgtttggtggcgcggggatgcacggtggcgcgcttcacgcctagcgcgtccgcgtcgcggaaatattcctcgatgaagcggtcgcccagttccgccacggtgacgccttcctcgttggcgcggcggatcatcttatcgtccacatcggtgaaattctgcacgaacgtcacctcatagcccatgtgctccaggtggcggcgcagcgtatcgaagatgatgaagggccgcgcgttgccaatgtggaaatagttgtacaccgtggggccgcagctgtaaatgcccactttgccctcgtgcagcggcacgaattcttcttttttgcgcgtcatggtgttgtaaatcttcattgtgaatcccccttcaaaatacactgtggatctgtgcaggtatcgcacgccgcctggcccgtggagaggcgctccaattcggagatccggcggttcatgcggtcgatcacgtctttcaccgggtcgggcaggtggatgtgatccagcgtttgcaggcgcgcgcccgcctggcgcaccacgcgcccggggttgcccaccaccgtgctatccggcggcacttccttgagcaccaccgcgcccgcgcccaccttgctgttgtcccccacggtgaacggccccagcaccttcgcgcccgcgccgatcaccacgttgttgcccagcgtgggatgccgcttgcccgcgtgcttgcccgtgccgcccagcgtcacaccctggtacaacgtaacgttatcgccaatctggcaggtttcgccaatcaccacgcccatgccgtggtcgatgaaaaagccgcggccaatctgcgcgccggggtggatatcgatgcccgtgatgcggcgcgtgcgcgcggagatgcgccttgcccacaatttccgaccatgcagccagtgccagtgcgcacggcggtgcctgcgaatcgcccggaagcccggataacacaaaaccacttccagcgcgttgcgcgccgccgggtcgcgctccagcaccgcatgcaaatcggatttgaatgaatcgaacatgtctgtttccgccactccttcccgcccgggcaacaaaaaacgcgcccccatacagaggcgcgtgtgcgcggttccactctgcttgcgggccaaggcccgccgctcaaagcgcataacggcgctacccgccgcggcattgcctccgcggtgctcccgggcgcatttcccccgccctgcgcgcaggcggctttcagccggtgaccgcccctctctttcgcgcccgatgccgggtacttctcccattctcagcaccaccattatatgcgccccgcgcgtttccgtcaagttaactttatcgctacccgcgaactgcgccagcgcattccaggggcatacgcctttcgccgccgggccaggcacatatccggcgtttccctcatagtatgacatggcggcgtatgacgccgcgcagcactctagcgaatttcggaggtttttccatggacaattccttcaacggaaggcagaccaacgtcttcccacccctgcccgattcgggttgcgacccgtgccacggcgaatgctgctcgaccaccggacccactggccccaccgggccgcaagggtttctcggcccgcgcggctttcctggcgcaaccgggccaacggggccgaccgggccttccggcttagcgggcgcgaccgggcccattggccccaccggcgcgacgggccccgcaggccccgcgggcg

SEQ ID NO: 805 - DNA, 31267 bp, Unknown
  16S sequences of unknown bacteria
cggatccgtccgccccttttctgtattcaaggagataaaaatattatgagaaaacccattattgcaggcaactggaaaatgaacaacaccgcctccgagggcgtcgcgctcgtcaaggcgattgcgcctctcgtcagggaagcggcttgcgacgtcgtggtatgcgtacccgccatcgacattcccgccgtcggcgaagcgctcaaaggcacgaatatcaaactcggcgccgaaaacgtgcattacgccgaaaaaggcgctttcacgggcgaaatttccgccgcgatgctgaaagaatacggcgtcgaatacgtcatcgtcggccacagcgaacgccgtcagtatttcggggaaacggacgaaacggtcaacaagagaactctcgccgccattgccgcgggacttacccccatcgtctgcatcggcgaatccctcgaagaaagggaaacgggcaagacggaagaagtgctggaaaagcagatccgcgaagggcttaaaggaatcgaggacatcgagaaaatcgtcgtcgcttacgaacccgtatgggcaatcggtacgggcaggaccgctaccgccgcgcaggcgaacgaaaccatcggctttatccgcaaaacgatcggggagatgttctgcgaaaagtgcgcggcaaaactccgcatccaatacggcggcagcatgaacgccggcaactgcaaggagctcatggcgatggaagagatcgacggcggactgatcggcggcgcttctttgaaagcgcccgacttcgcggcaatcgtaaatttcgacaaataaaaatcgatcattcggggggggcggaacgggcggattttacattcgccgcatacctgccccctgctttttgaatttcagaaaaggagaatacgcaatgaaaacgccttacgccatcatcatcatggacggatacggaatcaacgaggatcataacggcaacgccgtctatgcggacggcagtaaaaatattacggcgatggaaaagatctaccccacttcccgactgggcgccagcggtatgtccgtgggactgcccgacggccaaatgggcaattccgaggtcgggcacctcaatatcggcgcgggcagaatcgtctatcaggatctgacgaaaatcaccaaggacatccgcgacggggcgttctttaaaaacgcggaactgctccgcgcgatgaacgccgcgaaagcaaacggcaaaaagctgcacttttacggccttgtttccacgggcggcgtacacagccatatcgaacatctttacgcgctcgtcgaaatggcgaaagcgcagggactggataacgtgtatatccacgctttcaccgacggaagggacgtcgcccccacttcgggcgccggatttttaaaagatttgcaggacaagctcgacgagcttcaattcggcaaaatcgcgtccgtgtcgggcagatattacgccatggaccgcgacaacaattgggaccgagagcaaaaggcgtacgatatgctcacgctcggcgagggcgtgcgcttcgagggcagcgccgagggcgcggcgaaggcgtcctacgaaaacggcgtcacagacgagtttatccttcccaccaatctcaccgaaaacggcgcgccgatcgctttgatcgagaagggcgacagcatcgtctgcttcaatttccgtcccgacagggcgaggcagattacccgtatgttctcccaaaaggaatttcccttccgggacgcaaagacgggcgccgcgctcggattcgagcgcaacacgggctttctcgcccccgtgtacgtcggctttgcggtgtacgattcctccttcgaaaacgtcggcgtggctttcccgcccgacgagatcgacaataccctgcctcagtatatttcctctttgggcatgaagcagctgcacattgcggaaacggaaaagtatgcgcacgtcaccttctttttcaacgccaagctggaagcgcccgtcgaaggcgaaacccgcatcgtcatcccctctcccaaagtcgccacttacgaccttcaacctgaaatgagcgcgtatctcgtcacggacaaagttctcgaagaactcgacaagggcgtttacgacgtgctgatcctcaatttcgcaaactgcgacatggtgggacatacgggcgtaatggaagcggcggtcaaggcggtgcatacggtggacgaatgcgtgaaaaaagtgacggacaagatcttgtcgatgggcggcagcgcgctcgtcacggccgatcacggcaacgcggatcagatgatcgcggaggacggaaccactcccttcacccagcacacgacgaaccccgtgcccgtgattctcgtttccgagaaatacaagaacgccaaactgcgttcgggcggcgttctcgcggacctcgcccctaccctcctcgatctgatgcaaattcctcagcccgaggaaatgacgggaaaatccctgttagtgaaataagggaaaagcggaagcgaaaaaattgcggcgacgcgaaaatcgggctttccctttctttcccgaatcccgggaagggaatttttccgaattttttaagaaaaccgcggaaaaacagttgcgatatttaaaagagtatggtataatttacgggtatcttgaaacagcggtttgttccgtcaaaagaaaaagcaaaaaggatgaaacggaaatgttggattttgtgaatttgttgcttcctacaaagagtgacgctttatataacttatatatgggtttgagcgttacgatgatcgcactcatgtgcctcgctgccattgccgcgattattctcgtattattgcagcccggcaactcgacgggcatcgacgctctcggcggatccagcgaaaccttcttcggcaagaacaagggcaaatccatcgaatcgagaatgaaaaagtggacggttatatgtctggtcgtactggtcattttctccatctgcttttacatcttgcagctcgaatccatctgggcataaacgggaatcttaaatcggcggcttttcaagggaaagccgccttttttattgtttgctcccccgctattgtttgcccgctcggcggcgcccctttttccggctttcttacataaaatacattttggaggctccctttgagcgcaaaagaatcactgatcgaatatttcgaaaacggcaccctttcgggaaaaacttttaccgaaatcgctaaatttttaaaaatttcccacaaggaaaaaaagaatcttctcgccctgctcgactccctctgcgacgagggcgcgctgtacgtcacgggcggcggaaagtacggcatgcccgaacagctcggactcatcaagggcactctttcgggcaacgaacgcggcttcgcgttcctcattcccgccgataaaagcaggtacgcgaacgactttttcgttccccacaaaaatctcaacggcgccctgcacggcgacaccgtatacgccgagcgggtatacggcaggagcgacgacgaagcggaaatcgtcagtatcctctcccgcggctatacggaaattgtcggtaccttttggaaagacaaccgcgcaggctatcttcatcccgacgaaaaaaaatatttcgaggatatttatatcccctattcccaatgttttcggattccgaacggcgtgaaggcagtggctaaaatcaccgaatatcccgtcggaaaagcgcccggcggggaaattatcgaagtcttgggcgagggcgacgactttttcgcggaagagttatccattatccgctcctataaactgcgcgaggaatttccggaaggcgtggaaaaggaagcggaaaaacaggcgcaaaggaaaatttccccttccgacatcgaaaatcgtcgggatctgagggaaaaactgatcgtgacgatagacggcgaggacacgcgggacatcgacgacgcggtttccctggaaaaatcgggagaaaactacctcctgggcgtgcatatcgccgacgtttctcactacgtcagatatcgttccccgctcgacaaagaggcgttcgcgcgcggcacttccgtctattttcccgaccgagtcctccccatgttgccaaaagcgctctccaacggcatctgttcgctcaacgagggcgaggacagactcgcgctctcctgcctgatgaaagtggataaaaaaggcgccgtgaaggatcgggagatcgtcggatcggtcattcgctctgcgcacagaatgacgtataccgaggtgcagaagatcctcgacggcgacggagaaaccgccgaaaaatacgcggacgtcaaagacatggtattcctcttcgcagagctgacgggcattttaaagaccatgcgcgaaaagcgcggcagcatcgagctcgacgtcaaggaagcgaaaatcatgctggataaaaacggcgatatcgtcattcccgactacgaacgcgccctctcccatcagatcatcgaacagttcatggtgctcgccaacgaaacggtggcggaatatatgaactccatcgaaatgcccttcgtctatcgtatccacgaaaagccgaacgaggaaaaagcgggaatgttccgggaattcgcgcagaatctgggtctgaaagcaaaattcgattcggacgacgtcaagccctacgactatcagaaacttctgaaatccgccgaggagctgcccgtgttccccgtcatcaaccgcgtgatgctgcgctccatgcaaaaggcgcgctattcccccgtcaacgtcgggcacttcgggcttgcgagcgattgctactgtcacttcacttcccccatccgccgctatcccgacctctgtattcaccgcatcatcaaagaagtgctggacgggaaatacgccgagggcgcggaaacgtacaacggattcgtcagcgaagcgtccgttcaatcttcggaatgcgagcgccgcgccgcggaagcggaacgggaggtggacgccctttacgaaacgatgtatatgagcgagcatctcggagaggaatacgacgccgttatttcgggcgtgacttccttcggtctgttcgcggagcttcccaatacgatcgagggctttattcccctcgaaacgttggaaggcaacttcgaatatatccccgaacggttccttttgaaaggctcaaaagaaagctattcgatcggtgaaaaaataaggatcgaggtcacggacgtcgatttcgggcagcgccgcacccgttttgcgctgctcgaaaagcgggaagattaaaacgggcatagcaggtatgcgtttatcctttcgacaattcaaaaaacaaggtaaaaagccatgaaaatcatcgcagtcaacaaaacggcgtctttcgagtatttcatcgaggagaagtacgaggcgggcatcgtactcgaaggaaacgagatcaaatctttaagacagggagccgtcaacatgaacgacagcttctgtttcgtgcgcggcagcgccgtatccgtgaaaaatatgcacatcgccctctacgacaagtcggatgcgttcagcacaaaggaaacgaggcgggaccgccgcctgctgctgcacaagggcgaaattgccaaaatcgcgggaaaaatcaaccgccaagggtatacgctggtgccgctcaaactgtatttcaaggattccctcgtcaagatggaagtggcgctgtgccggggcaaacacacttacgacaaaaaacaatcgatcgccgaacgggacttaaaacgcgcgaccgaccgcgccgtgaaaaacgcgggtttttgactttgtccgctcagacaatcacttcgatttctccgccgagagaacgggacgttcccatttttgttttagcggaaacggcgcggcagtttggttttattccccgaacgcacaattgacggcttcgcggaggtttggttttatccgccctcgccttccctgccgtggcggcaggcaggaaattttaattttgtttcggaaaaatacggttttgcgtcttcccgtcgcaaaacatacgcgcggaatttggattttggcggttaaaaatatcccctttccttcgctccgctttcccttccaaagaatttcggttttattcggggagcatcgtataaaatcccgttcctatccgctgcgcttatagcttccgcggacaaaaaagtccctaagctttattttcgccgcaacgccctattttacagagaaactttcgacgacgaaaagagattttgaacgcgcggcgccgacgcttttcttccgatactttccgacgagttgattttgcgcggatttataaaatacatcacaaaggagatcacgacaatggacgaacgagaaaagacctaccgaaaagacaccttatgcgtacaggcgggctatcatcccgaaacgggcgagagccgcattccccccatctatcagagcaccacctttttctacggcgacactcagacgatggcggacttgttcgacctgaaaggaatcggatatttttattcccggctcgccaatcccaccgtggcggcgttagaaaacaaaatcgcggcgctcgaagggggcgtcgcgggaatcggctgttcttcgggtatgtccgccacccttttgacgacggtcactttgtgcgaagcgggggacaacatcgtctgcgcgcaggcggtgtacgggggcacgttcaatctcttcggcactacgctgcccaaactgggcatcgagtgcagattcttcgatcccgacgcttcggaagaggagatcgacaaactcgtagacgaaaagaccaaactcatctttgcggaaacggtggcgaaccccgccatcatcgtactcgatttcgacaaaatcgcgcggatcgccaagcgtcacggggtcgtttttgccgtggacaacacactggcgacgcccgtactttgcaaccctttccgatacggcgcggacgtcgtcatccattccacgacaaaatatctcgacggccacgcggcggctttggggggcatgatcgtcgataaaggcaattttccctttctccatagtccccgctatcccgctttcaacgagcctgacgaaagctatcacggactcgtgtacgcttccctgcccgccgcattcgccacgaaatgccgcgcgcagatgatgcgggacatgggggcgatgatgtccccgcaaaacgcttttctgacctggctcggctgcgatacgctggcgctgagaatggaaaaacactgttccaatgcagcggccgcggcggcgtttttgaacgcgcatcccaaagtcgaatgggtgaaacatccctctttgaagagcgataaatatcacgcgctcgcggagaaatatatgcctgcgggcacgggcggcatgatgagcttcggcatcaagggggacgccaagcgctgcgccgcatttatggaggcgctttctctcatcacgcaggaaacgcacgtggcggacgtgaggagctgcgtcctgcatcccgcttccaccacccatcgacagctgtccaaagccgacctcgaaaaggcgggcgtgcccgaaaatctcgttcggctttccgtcggcatcgaaaaccccgaggacattctcaccgatttaagccgggcgctcgacaagatctaacgggagggattttatgcctatcgtcatcgacggcgctctgcccgcctataaaattctaagcggcgaaaagatattcgtcatggataagacgcgcgccgtttcgcaggacatccgccccatcgaaatcgccgttctcaacctcatgcccaccaaggaggaaacggaaacgcagtttatgcggctcttgtcaaactcccccttgcaggtcaacgtcacgctgctgagtacggagagctatcattcgacgcatacggcggaagggtacctggggaaattttacaaatctttccgcgacgtggaaaaaaagcacttcgacggcatgatcgtcacgggcgcgcccgtcgaacagatggaattttcctccgtcgcctattgggacgaattaaagcgcattttcgcctacacgaaaaccaacgtcacctctaccattttcatctgctggggggcgatggcggcgctccattatttttacggcttaaaaaagtatcccttgaaaaaaaagctgttcggggtatttacgcaccataaggtcctttacgaacaacccgagcctttaatgcgcggtatttcggacgaatttcatatgcctcattcccgccactcgacggtgaaggtgagcgacgtgcggaagatcccggaactgaaaatcctggcgacctccgcgcgcgcgggcgcttccgtcatcgcctccaaagacgaccggcgcgtgtttgtgttcgggcatatggaatacgacagggacaccttgaaaagggaatacgaacgggacgtcggcaagggactgcccattcaaaagccctactcctatttcgcggacaaggagtgcacgaaagtaaaaatgaactggacgtcgaccgccaatcttttttacaacaattggctaaactattgcgtctatcaggtcacgccctatcgtttcgaggattgatcttcattcagcgcaaccctgccccgcccgttttcgttttttacgctaatataaaggaagctattttatgaatttttcccctttgatcaccgagcgtctttcgcttaggcactttaaagaaacagacgcggaggctttgttttctattttgaaggacgaagaaacgaccgcgtttttgcccctgtttcccctgacctctctcgacgaagcgaaagagcatttaaaaaagcgttatctcgacgcctatgagaaaggcgacgtctatcgctttgcagtctgtctgaaagaggacgatattccgatcggagagatacacgcgagccaagacgagagccgcgatttgggcttcgtattgaaaaaggagttttggcgccgcggcatcatgacggaggcggtaaacgcggtcatcgagcggctcatgcgggataaagttccgtatatcacggcgactcacgatatccataatccgagaagcggcgccgtcatgaaaaaagcgggaatgcgttactgctattcctacgaggaagattggcagccgaaaaatatccgcgtcacttttcggatgtatcagcggaatctggacggaaaggacgagaggatttatagaggctattggaacaaatatccttcgcactttgtggaaagggagctttgattttctctttccgctttcaggcgcagagttgtcttctatcgtgtgtcaacatagataaaaacaggcatattttggagatcattattcgtatgacaaggcgcgaggacggcgcgaataccgcgacgtattccataggctatcaacgatatattgcgaaaaagcaatcaaaaatggatattcacagtttgtgcgaatacacctaatatcgcagggcggcgtttattccgcccctttattttgcctacaaaagtaaaaattccgctttctttcctttaaaaaaacgccatctcgccgctccgctcctttttcttcgagaaatgcacattcccgtttttcgattccgcccttttgcaaaatgaaacgcccctttcccgccttaaagcgcaaagaattttttacggcaaaacggcgtttcccgacaaaggaacgcctctcgcgtatcgtctataaaagggagcggtgccccctcctttcgattttttccgaaaagatcgccgtttgtcgtcaaaatggcgacaagcaaaaaagaaagttcctatccgattttcaaagtattcgtcgtaggtccttcgtcgcaatttttttcagaaaaacgcgcaaaagcctgaacgagcttttgactcggtcctaaaaatcctttttgggcgccttataaaatccgcgccgccgcgtttctatcaaatgatattcctgtttcttatcgaaagaaaactcaacgggactgtcgggcgaggaaaacatagtcgcgcccgaaatgtccgcaatctggctgtacccgatcccgcacaggcacatgggcacgccgtaggaaaacgcgcccgcgcggagaagcacagtttccgtataatcggatacgataccgaaagggcagagaatcatatcgctgccgcagacggaaagggtgcggaggatctcgggaaaatacaaatcctcggccacggcgatgccgagccgccccgctttcgtttcgtagacgcgcaatcccgcgccgcttttaaattccccgtccaccgcgttcagcatatcggaaacgcccaaaatgcgcccgttttccgccaccacggcggacttgcgctttattccccgcgtatcggtgacgcagccgcagacgacgatgttatggctctctttggagagaatcgccacgtcctcaaaacagttcgtttcccccttcaattccttctcgtagctgacttctccgagtccctgaaagccgaaaaaaagaacgtccgcatcgctgccgctgtaattgtcccaaaatgtgttcaacgaacctctgctaacaaaacaaatccgcataaccgccgcctcccctttcagtatatcgccgaaggcggttttttgttcctgtttttgcccttccgtttcgccgttttgcggttttttgtatcgcgcgggagccgcctatgcctccccgctccgtcttttcggcaggaaaaaagacggagcatttgccccgtcccgcgatttggattcttttttatttttcgggctctccccgttccgcccctgccaatcctttttcaaaaggaatatcttgccgcgtcatattttccgtttgccgaaacgaattgtacgacggctaaaacgacgcccgccgccggcaagatcagaagcacgccccaaatccatgcgcgggaagcgattgcgatcaggaaaaagtagcggatttgcaaagaaaacgccgaaaaaatgccgaccgagccgagcgtcacaaaaaacgaggaggttttcatcgtttcctttttttcggtatattccgtcaccagcgacgcgacggaggacaccaccagcgaagtaccggtgagtatcatcgtaaagacactcaacagaagataattcaacaaaggattttccgcagaagaggaaccgattcctacgcctacaccgatcccgcccacgcaaagaatcatcaggaaaaaacttatggaaaacgcgctccctcccaaaataaaagagagcaagtctatcgccgttctgacgactctttttattcctccgccgcttttacgacgacgaggcgcctgctcgtttttttccgtctttttcatcggttttcctcccttttttcagacaataaatgcctgtatttcaatttttatcggcgtccgccgctttgtttagtcttcttgcttccccacaaaaactccgtccgagaaatgcgcatttttttcgggcgtttcttcctcgcgatagacgcagacgcgatttttacctccgttttttgccgtatacagcgctttgtcggcacgaatgaggcagcgatcctcggacgtatcggcgtcgggcacgacgcaataaagtcccatgctgacggtcagcgcgagctttttttcggtaaagcgcgtgagagaaaccgtcttgcgtagcttttccgccaaggcgatgcagtcgttcctgccctcctcggcgacgacgacgaattcctccccgccgtaccggaaaacgcggttctctcccgccgcctgcacaaagatattcgcagcctgctttaaagtttcgtcccctgccttgtgcccgaaagtatcgttgatgcgcttaaaatcgtcgagatcggacatgatgacgcagagcgcccgcttcttttctcggcaatccgacagtttttttaaaaggtattcatgcaaggcgttcctgttgccgattcccgtcagcgcgtccgtcaccgacattttccgcagctttttattcgcctcgttcagttcttccacagccgccttcaatttcagcgcgttgctttctaactgaacggctttttccgtttcgttgatcagacttttgtttttcgtcagggaaataaacagaagcgtgatgccgaaaatcgtataattcaccaaaaatcccagatcgaacggctgattgccgatcgtaagctccatgacgtaattgaagagaatcgtcaggggaaagagcaggaaagattcccttttgtgcagatttactccgcccgcgcatatcgtcacaatcgtaaagaagacaatctcgctcctgccgcttaaaagttccaggtaattcagtccgattccccaagccagaatgagcacgctgtaaacgaccgtccatttatagaaaaaacggcaacttttttccgcattccgaccgcattttcggcagaggaaaaaatccgtcgttaccacggcggccaaatatacgtatccgcaaagatacaggatattgatccgctccttcatatcgcggaacaaaaacagataaacgatcagggagatttccaagagaaagaacaggatatcgatgacaaaccgaaagggaagtccctgtacgacttccgtcttttttaatttcaacgctttttcaatatcccgatttttcataaaacctcctccgcgttccccgtttcccctcgggacttcttaaaacgcgggtgcgcttttttcccgactccgtttatcccgcgtatgtccgttaagttttgccgtcctgtccctttttttcctttatcgcaaaaattgattttttcgaatctttcctgccttcaagttcccgccccaatcgttttttaaattccgcctgtttccggagccgcccctaagcgaccgcctgttttgcaaaaatgaccgagcgttcctcatgcccggtcatttttttcgcaatcgaacagggttgcagcgggtagtatcctgcgaccgttctccttgctctttattttttactttttcgccttttccaaaagctcgtcgacggctctttgcagcttttccagctcggcgtttgccgccgcctcgtcctttgcgcgcagagaatagtaaattttcaatttaggctcggtgcccgacggacgaacgcagacaaaggaaccgcccgcaagttcgtaatagacgcaattgcatttgggaatatccagcgtttccgtcgtcccgtccgcatacgatacgcgtttcgcagcgctgtaatcgcggaacgcttccacggccatccccccgagatccgtcacttttctctttttgagtccgtccacgaccgcgttcatttccttcatggcgttaagccccgaatactgcacggaaacgttcttatccaatacgtagccgtatttgagatagatctcctgcaaacggcggtacaccgtctttcccacataggtataataacacaccatctccgcgcacagcatggaagcgaccaccgcgtccttatccctcgcgtgcgttccccgaagatacccgcaggattcctcgaagccgaatacgtaagtgtattttccgtccttttcccactgtttgatcttttcgccgataaacttaaagcctaccggggtttcaaaaagggtgacgccgaaatcgtcgcagatcgctttcgccatccccgtcgtcacgaaagattttacgacggcggcgttcgtgggcatcgcgttctcctcttccagacgggtcaggatatagtcgagcagcaaaattcccacctggttgcccgagagcgccgtaaactcgcccttgtcgtccttgacggcgacgcctaaacggtcggaatcgggatcggtgccgaacaccacgtccgcgtgtattttgttcgcaagcgcgatgcccatggacagcgtttctttaaattcggggttcggcactttgacggtggaaaattcgggatccttcgtcgtctgttcctcgacgacggtgacgttgatgcccagctttttgagtatggtcgtgacgggcacgtagccgctgccgtgtacgggcgtatagacgagtttcagattcgcgccgcactttttcaccgcttcgggcgacaggcgcaggcgggacaacgcctcgatatagtcttcgtcgagcttttcgggtacgggaagaatgagcggactgttttcctccccgcttgcggaaaggtaatcgtcgatcttcgaaatgtatccgacgactttttcggtatcctcgggcgacatctgcgcgccgtcggcgccgtataccttatagccgttgtattccttgggattgtggctcgccgtgatcatgatgcccgccacggtgcgcaggtatctcaccgcataggagagcatgggaacgggatgcacgtcgtcgaagagatacgccttgacgccgttctttgccagcactcccgccgccgcccgcgcgaattcctcggatttgcgccgcgtgtcgtaggaaatgacgacgccgcttttgacggcgtcctccccgagttccttaataaactcggcaagcccctgcgtggcgcgcatgacggtgtagacgttcatcatgttcatgccgtagccgatgatgccgcgcatccccgcggtgccaaattccagctcgccgccaaagcggtattccttcgccttttcgtcgcccgcgatttcctttaattcatttctgccctcgtccgaaagccgagggtcggaaagccacttctcataatttgcctgataattcatatatttgtcctcaaatgcctgaaatttttttgcttttccgcgccccgaatcattcggcgcaccttaccattatattctcttgcggcaggatctattccccgccgcggcgaaaagggcttcccgcccttatgcccgtcttttttccctccgggccgaccttcggctccgcctcgcttgggcaggaacgccttatttctcttccttcccggggccgggcttcctctcgcccgctccgcccgcttcaagatctcctttctcttccgcaggcaccgcatcggcgttttctctattttccgcctcggagatcctctcctccgtgcgattcgtttcctccgaatgcgcgtcggcggggacgattccgtccgcttgcccttcccgcgcaggcacgccgtcgtttttcaagcggcgcgcgatctcctcttttttattgcgtttattcgcggcggatttcttttccgcctttttttccgcgttcaaatccgctttcgatttcagcgcctcttccagctgtctgtccgccgcttggagttgctcttccagatccgccgcgattctttccgcattttcgagatcgctcggcgccgaaccttcccccgtatattccccttcgggaagaatggaaaagtcgtcgggatcttctaccgtttcgaagaaatgctcgctgtcgccgcggtcgcggttgatggcgattctgtcataggtgatgaaatatcgcttgccctgcaccgtgtaatagttgacgaactgctcgcagataaagagcataaaggaagcgggcacggtcaacagcaacgcgctgccaaacgtgcagacggcgccgatcacgttgatgataatgatgatatagatggtggcgacgtaggtggaaaacacctttttccactgttttttctgttgtttatccccgaagcgcatcgcctgaccgatgctcatattatccgccgccatcgcgggcagccacatggacgtaatcgtcagtttcagcgcctgacagagcacgatgaacgtcatggagaagaacagagaggcgaggacgttgaacgccaggagatagaaaaagagaaaatagcagagccctatcgtcatcacgtcgaataaaaataccacggggacgtatacgatgctgtaaatgctcgctttgccgagatttttgatatatgcggcggcaaacggcgtttccgcataggtcgccattctgtcgttgagaatgctgccgatcgagaaatagcacagcgtatcgaggaaacgttccaagagataaacgacgccgcagccgaccaccgaccagacgattttcgacattctcgaatccagtaatttcaacagtgcggtgcccatggtcttgaactgttcctgaaagcccgcgaggaattgactgtcgcccgtgacgagcgcgcggaaaaagtccttgacgatgtcgatgaggttagtgacttccgcgctgtggacgatgtcccaaaggttcggaagcagcagcgcgcaggagagcgcgattgccaccaccgcgatagccagtttgtaaagcaatattttataaacgtttttaaaattctcaatcagtaatctcgtactgttccgaaaccgcataatccttctccttgcccgttttcaggcagttctttttatccgtttcaacccgcgggagtttgcaaaaatccgtccgcgcaaaatcccggcgagcgatcgtccaaaggctttcgtccgaccgcctaaaatttttaaaaatgataatagcgtttgagatccgccctttccagctgcgcgcggtcgaaatagaccacctgcatacgcacgcagaatatcgcggtcatcagcgcgtacgaaaccgtcgccaaagcaaagcccgccactcttccggggacaaagagggaacaaagtcccaataatacttccgccagcgtcacgctgatccactgcccgaagacgatattcttctttacgggcgacaccagctgataggaatagcgcagcgcttcaaaggcgcggaagccggtgatttggaggcaggggagccacagataaaaaatggaaacgatgtataaaaggacgaaatgcatcccgaaaaacacgatgacggaaagcacatagacgactccgacggtttccggtatcatcaccaaaaacaaaagcgcggaggtaatcagcgcccagacctcgtaaaggagcacgtaaagcagacaaatcccgcacgtggagatcagattgtcgttgagtttggagaaaattccgctgaacgtgcgcttgccgatgcgcatatgtttttcgacgaaagcaaaaatgagcgccgtgcataagaccatcagaacgatccccgcgagccccgcaaaaaacgccttcaacgagcggaaattgaaaacggaaacagcgcggaaaatgtcgggaaaagaagcgctgggttctcccgtaaaatacgacgtcagcacccgactgatcgcgtccttatcgagcgaaaaggacaggaacagagccgggagcagcgccaacggaaatatgtagaaaaaatttttaaagacgtatttaatggattgaatcgtatatctcatagaaagctttttccttttcttctattataacgcaactgacgttatattgaaatggggcaaaataccgctcaacgcttcgcgcttttgtattttcgcttctattatacaacataaactctttcctgtaaagtattttttgcgaaaaaagcgggaagaagtcccgtttgactccttcccgccccgtttttttcctttgcctcgttctttcggcttccgtcggcaaaaaacgcaaaaggaattttcttgcgaagataggcttttctctgtcggcgatttttcttaaatctgctcttttctccccctcgaacttccttttccccgcagcctccccgctttttcaagaagcaaatacgccttatgccgtcatcatcgacggataaaatccccgctctttccgaccatcgatttcccctatttttccgtatctttccctttttttattttccttctctatttttcctgcgcctattttttgcctttccgcgcgtttcccaaaaacgcattctctccctcagatttgttttgcccttgcccttgcccttgcccttcgataatttccgactcgccgcaaaaaaactatgcgccttccgcctgctgtgcgtatagctcgtagaggggcgcataccgctctccgagataattcaccgcaaccttgtctgcctgaaacgcctcgaatttcagtttagcgtccgtataagcgccgtcgtaatatgtcctgacgacgttcatccgctgctcgtaggtgaacgaataatcgacggtgtaaggcgcctccgcgcccgcgtccggtttagacgcaaagcgaagataaaacagcagcccgtcccgtagattctccacctcctgttcatagctctcctccaatgcggcgcagattttttcccagacgggggaacggaatatccccgctttcagcagtcggaatttttccgttctcttttcctcccccagttttttcgtgagccgattttttttcagctgtacgctttccacttcgagtatctgttcctcggtcatcgccgcaaattgctcgtccgtatacgaaataatgtctatcgtcatctccgtgtttcctccttttccgctcctgcccgccgccttttcgaaaaaatgatttttcaaaacgctccggctcgcgatctcgcccttttccctttttccccgccgccgcgttccccgtctgtccgcctcgccgcattctgcggcatttcgcgctttgccccggcaaaaaacgccttccgatccgaaaaattctgtttatgccgacgaactctcgccccctcagccgatgaggacgaattccatctccgcgcccgaaacgaaagaattttcccctaaaatcattttcaaagaaaagttttctccttttaaaaacggctcggctctcgcttcgccccgttcgaaagttacctcgaacgccttagtttccgattcgttttccgtttcgataagacagcttccccgtcccttcaagcgcagcgttttccacagcttccgcccgccgacgccgaaatcggtgttttccgcgcaaaacgaacagacttctcccgcaggcagactcccgtttaccgcaaacatacgcaatttttgatcggaaaaacagagcaagcctttttccgtttcggagatcccctgagcggaagcgaaggcaaaatacgctttttccgtcgcctcgtcttgaatcagcaattttgtttctccgtccgcgtcggggtatcggaggaaatatctgcccgcaaaagagccgtgttcaatcccctgcccccctgcaatcgggcgaacggacagttcggtacaactcctccgcgcctcgctgccgtcgaacgcataaacgccgtcctcggcgagaaagaggatattttttccgcattttccgattgatcgcccgaagatttttccgccgccgtaactgagcgtttcgtgcgaaaaatcccgcgccgcgcccttggcgttcagcttttcgattcccctttcccgaaagatataaatcgactccttccattcctccaatcccacgatctctccgcccgtcgaggggagccggatatacccgccttcgtccgcgctgtccgcgaacatcgaggcgtcgaggggagccgaatatcgcagggtaaacggcttttcggcgaaaaacaatctctcgtggaagacgcacgccgcgtccgatccccgggcgtatacggacgaaaactttgaatccccgtcaaagagcagaatgccctccgacgagcagaacgcgagtttcgccccgccgtcggcggcgtatacgggcaaaatcttcggcgtggaatcgaacacgcgcatggcgtattcgaattcctgtcgggtatcgttgtagagatacgccagtccccttttggaaacgaacgcgacgcgctccgtcctctccccgttttcgtccgtaccgggcaggagtgcgaagaccgcgggcggatcgtgcggattgggaatggagggattgccgcccgagggaagaaggtaatcggtcagcccgacgcagggcgcaatctttccgcccgaacaatcgcagttgccgcctcccgtcccgcaaagaacgccgcggccgctcgcgtccccgactgcgaatttttcgaattttactcttttcaccgccgttttcacgtcgggaaattcttttttcgtaaacattttacgcccaccttctcgaacgcatgaccttcgacggcctcgatcggtacgccgcagccaacgcgtccttatactttttgtcccacgcgccgccttcttcgtataagccgcaggcgaaacagtattcgctcgccatgccgtaggcgaacaggcggggcgacgcctgtaaaatataatcggagctttcctccgccgtcttttccttgggcgtatacgtgtaaacgatttttattttcccgggctgcgttttcagatactcgggaaacaatttgaaggggacggcatttccccattcgtccgtcacgcgcaatatgcgcacggcgggcctcgtcagttcggcataacgcacggcgcccgtttccgcaaagacctcctcctccgcatagaggggcagataatcgagcgctaattcgttctccacgatgttaaaacaccgcaaaagcgtttccgtttccttctttcccgtttccgcgttgttctcgaaataggctcgcacccgttcccccacgccgatctcgtctgcggccaataggatcgcttctttgactgtcattcctttttcctccttctctctttgagatttaccgactccccggcgcggcgaaggaatttttttcgttcgccgcgcgctcggagtccccttgtcgttcaggcagcgccgcacaaataccctatgtcgcgggaattgacaaattttacgccccgaggcgttgaattttctaatggcggcgccgcctatcgccccgccttttcatagataaaatttctttcaattcccgctcgattgcattgtgcgattgccttaaaaagttcggagcggagggaaagcgagcgccgacgcctccttccgccccgacggtcttttacatttcttcgacgcccgtcagcattccctgtccgaagggacggctgcaaacgagctccgcgtacttcaccagggtcgcggtgtatacgggtttgcccgcgatctgtttaagaatttttccgtcttcgttttccagccactgccaatcgcagagctgatgcagacagaaatcgtccgtgttgagcatatacagcgttcccgcggggcagaatctgtccgcgacgacggggattccgttgaaactgagcgccttgtatccgcccttgatctccatcgtcggcgcatacgtcttgtattgattgtagtaggcgaccagcgcacgtttgacgccccaggaacagacgatgaaattgaccttgctccccgaattttcctcgatcgtgtcgatggcggtttgcaggatgttctcgtccagcattcccgcctcggtcttgacatacggcttcatccagggatgcgccgcgcggtctacgccgtacagagtgtcggaatcggaaaagagcgctccgagtcccgtaatttcgcagtcatgcgaatgctgcaaaaccacttttgaccccacgggcacgatcgtcgtgttcaaagcggtgccgtccacgacgatgattttttcggcacgatccacggagaggacggtccttcccatggcgccgctgatcatcgcccccgaagtggtgtaaaaatcgacgatcatcccttccgcgatacccgccacgccgtccacggtgatcttgttgcctgtatccaccgcgcttaccgcgcacagttttcccgagccgtcgccatagagcattctgccgaaattgaaggcggaacttctcaccaacgactgcatttcgtcgtttaagagattgacgaaagcgccctcgttgtttgcggacgcgcgcatcgccttgtcggaaatttcgatagtgccgtaaagatttttcagcgacgcgacgaactgcacgtaattgtttccgcccgcggcgggcaaagtccccgtttcggtgcccgcgccgataccgccgttgacgccgtatcgcacgagtttccgcacgtcctttccccatacgtccgcggtagactgcctgatctgcgccagaagcggattgacgtttaaattcaacgcttcgctgacggcatccagataaaaagatttcaacgcattgtctgcggtttccattgtaaccataaataaattttctccttgtaataaaatcgtttcgttttttatagggaaacaaataaccctttttcggcgattgtcggaactctttatatagttaagtaaagcccgcgcccccgtcgaaagtttctctcccccttgcgagctctcacattttctcgacgaagtcttcctgctttttgcgagttttcactttatcccaaaaccaagttctccccattctttgcgagtttttactttgtccaaaaaaccaagttctccccatcctttacgagtttttactttgtccaaaaaacaagtttctcccaccctttgcaggttgccgcgccctttcccaaggaaacttctccgttttccttttgtaatcccctttttcccctgtaaactttcccgtttccccgtttttcgttcgtccctccctttttaaactctaaattcttcgctctttgaaaacgtgcgccgcccttttttctgttttgtccctccgactttcgcctcttttacaaatttttcctacttgtccttcttgaaatagcaaagcgccatcgttcccgcctccgcgatcgatttcgccttgacgggcggagcggtaaagaccgccgtccccccgcgcatcagaggcgcgtcggcgctcctgagcgaagcgagatagtccccgataatcctcaatctcaccgcttccgaatggcaggcggcccgatagagttcctcttcggacgctctttcttccgcgcctttgttcgcctgcgctttaaaaggctcagtttcccgctctttcgcgggaggcgtttgaggcacagcgggttttcccccttccgtatccggaacgggcgcggcgactgttttttcgtcggaaagagaagaaacctccgaattttcctttcccttcccgcaattcgcggacggcgtttcaaaaatttccttttctttgccgtccggggctcgcaaaaacttttcctccccgccgacttcttttttctgcggcttttccgccgctgtcaaagaatcggcggaaagcgccgagtgaaaattatccgcttgtttttccagctctttcaggcgttgactgcgacgggtaaactccgcctccaaagcgccgtatgcctccgcgagggcatctacggaacggaattttcccaaaaccgccgagccttttcccctttccgcctccgcggcgcgctccgtttcgggaaccgcgttttcgcaaacgttatcctcttttctcatattgagatcctcctttttattttactgttatgttttttgttttttcgcgccctgcatctacgataaattgttcgggcgcgacccttcgtttcgttgtaatatttcgcgttcgacgcatacctgccccgtctttatcctcgggagctttcctcctccccgctttgcgttttccgttcggcgtttttcgccagcctcctgtgcgcttcgatgtgctcggaacagcgttttttcaaggacgcgtccgagagccttctgaattcttcggagaggagaaacctaacgtgccgcgcgatatgcagctcgtgatcgtcgtaatcgtcaggctccacggcgcccgatttcatcgttagattttcctcgtccgccttggcgatatgcagagcggaaacgtttttcgcgttctcgtaggagccgaatccgaacgcttccagaatacggttcttgttttcttcggacagttttccgtcctcgtccgtcaacagtcccgcttcaaaaagcttcatcaaagtttcccgtttctgttcgggcgtcacggcgtcctccgattcgaaaacgatatcgtttgcggacaattccgcggcattgaaataatatacctgcgttttcttgttttcgcccgtcagcgtcagcagcctcgcgctgcccgcgaattgtttgtacagccgcagtatctgccttcccgtttctttcacggcgcgggaaatgttgtccgtcgtcgcggccagcctcgaatcgtcctgcgacaagagcagctgtaatcccgaagcgctcgtcactctcgcgggcgtggaattttgcgacagatcgctgacgccgctgatcagcacgaactctttttccagcctcgtttcctcttcctcgaactgagcgggcacgtcgccgcagtccagcatttcgggcggtttgcccccctgtcgatacaccagcacttttccgggcgacaatccctcctcggtcagctcgtctatgtccacagacccgtcctccaccgtcagaacgcccatggaaagccgattgagaaactcatgttttcggtttctcacggcgttgtacgcccgctgaacgggaatgagtctgtcgatgatgctgcttgcgaaaaacgcgcccggcagccgtatacagtcctgcttgacaaacgggaagccccgttctccccgctctccgctcaaatagggcaggacgcccagatacaaaagttttccgcccgcgacgatctctaaacgcccgtctttttcctccgcgttcgggcgcgtatatcgctcgatgagaatctctccgttttccgtcggcagacagctgccgcccgcttgcagtgcgggatttttagcgcccgacggctcgctgtaccccgccgccacgggtccgataatttccctgccctttaaaaccacgccgaacttttccgcaatgtactccacgggtacgacccgcgcgtgaatcaggctcttcacttccgcgaggctctccgcgcccaaagaatcggggaaaatctcgaacggcgacaccgccgccacgtccgcctccccctcgtacacgggcagcccctgcgcgtcgacggcgacctgcctcccgcccctctcgtcccagacgaccttgtaaaacgcgctgccgcacgtttccgaccaaagcgtggcattggcgacgacctcgtccagtccgatgcgcctgcccacgtaatcgagaacgcccgaagcgagtttcgccgctttaacgtccccttcctcatcggaaaaggcgcgcacgtgcagagcgggacgcattttcgtcaacttggcgatccgcgtgtcgatcgtaggcgcgatgtgattgaacactctgcgcgactgccaataaaatctcttgtcctcctccgcgattccgccctgcggcgatacgtcgcaatattgattgccgctcaaaaagttcatgttgagcagccacccgctttcgatcgaacgcctttcctcccgccttctctcgaaatcggcggtgacttccgcggcgattttcgcgcgcgccttttcctcccgaagtttcttttcttcttccgtttcgttattttcaaacgccatttgatgtcctccctttcgcacgatctttttttcggcgccttgcggacgtctgcccgcttcgtgctcttgccgcgccgctcatcgactttcgtccgtctttttcctcacgactctctgctttgccgggcttttccttttcggcgcttcgccgtcgcccgcctttttttgagagcgcccgaagcgcccgcagacgcagacaagccgcattttttacccctcttccgattctccgttttttcgtcctttgcgctttctttctccccgctctttgcgtgcgcgctctctccgttcttttccccaagtttcgcgttctcttcctctacgttctccgtgcacgccttttccccaagtttcgggttttctttctctccgttctttgcgccttccctgttcccgccctttacgattccttcttcttcgcactctgtgcgctctttatccccgttcatcgcgctctttttctcttcgttctccgcgcatacctttttgccgcgactcgcgctctcgttctccccgctctttgcgccttcttttttcaaaatcgaagcgcgcgccttttttctgccgttttcgtcctctttttcttctttcagaagctttaagagcctgtttttttccgcttccagctcctcgtcggacaaatcggaataggatggttccgtttccccgagcaatagctgcaccgctttcaggtcgggcggaatgtcctttttcgtctttcttcgctttgtcagtttcagcgcgccgtccacgtcggcgtattcctccgtcacttcctccacgcggcagccgagcgccactttcagcaaggcgtccccgatcttttcgcggctcccttttttctccattttttcctccttgttcttgcgtttatttctctcgtcccatacctgcccccgtcgtctttaaaattttttcaaaaaacgctcttttcggcgttcagtcgagggagccacgccttttttccgcgatttttcgccaccgcttttccttgtctttttgaacgggcgtcttttccgtttcgggcggcagttttttcggtcgggacatcagataatagcgcagctcgtccagcgcgtgatcgtcgctctttctcggcacgtccccgctcccccagtaataccctttgagttcgcggataagattcacgcaattgtcgaaaatatagagattcggcagcccgtttttcgcgttcagatagctctttacccgcgcgatgcccgtaaagagatccttatcgacgtcgggattgacgagaatatcccgctcgtagaaaagctcgcagacgctcttcacgcccgacagggtatgctgctttgccgcgctgtcgatgagcgcccgcagccgtcccctgccgtccgtatgccagccgagcatagcggagatgcgcttgatctcctcggcgtgataatcgatgtccctgcccgcggcgaaatgctcgtacaccgcgtatacgttgtcgtcgtaatcgaccgcataccaatgcgcggagagcgggttgttgagcccggggtctatggaaatggtatcttgccactcccggggcagggggaaaggcggaatgacgtggatcctttcgtcgaattcgggatagacgagtccggaagaggaagcgaaccgcccgtaccgcctcgattgcagctgtttttcgtccagacagctctctaaaagggagatctcctcgcgggagagatagggattgtcgctccattccataaactcgtaccacgcctcgccgtcgcccatccgattgagaaaaatatcctcgtagacgaaggtcagccccttcaagggcgtcatggtgccgaaaatgtccccccgacgatcgatgacgcgcatacggcactcctcgtaaatttccttgggcggttcctcgtcgaaccagacgaaatccagcgaagcgccctgaaacttttcccgcccctgatcgcagcttttgaagccgatgacggaactccccccgaacacgtttctgatgcggatgaaatcgatgaccccgttttcgggggaatctttgcgcccgctctgcatgacgatttcttcgatccagtccctgcgcagatagtaaaggatctttttctgcgccacgtcccgctgcacctgtgcggacaaagacaccacccaaccgcagacgttttggcgatttttccgatagggatgtattccccgcgccatatatacgcattccacggcgccgcactccgtctttcccgagcggttgccgccgaatacccagcgattgcgctttgcgcacttatgaaaagccaactgcttttcgtgttttttttctcccgcgttgtaggaggcaagcctgtcctcccgtcgccgtttttcctgctcccgctctatttcgcggagcctttctacaatttctctcatatttcccgccaatcggtcaaaaaggactatccttgtatttttataatagaaagcatgaaaaagtttattttgtcggcagtgctgccgctattatatttcatcggggtcggattttccccatcggggtattttccggccaaagcggaggacgcgggctatgcctgtatccgttcggaggatgtatatttatactccgaagaaaacgacaagagcgggcttttcgtcctgccttatacttattacgtgcgggtgctgtccacgggcgtgagatactcctatgtggaatatctctccgacggtccccatacccagaagatcacgggatattgcaagactgccgatctgacttttgtcgactatacgcccgaccgcccctatctctactatacgtttgacgtcacctattacatagaagacgcgtcgccgtccctcaaagacgacagctttctttccagcattacggtcacttgttcctattacggagaatatagggtcggttcgaaaacgtattgttacgtgctgcgggaaggaacgttcggatatatccccaagccctcggatctgtcttacgaactcaacgaagaatacgacaaccacacgtccgaggaatcggcgacggacgtcggaaacttcggggataaggaaacgatgccgcccgcgcagatagccattttagtgctgctgtgcattctcgtccccgtcatcgccgccctcatcctccgccctcccaaaaaaccgccctacgaatcggaagaataaacgtttcctctcttctcacctcttccgacgctcgcctccgctttgtataaggcgggaacgacgtactttctcccttttaccaagcggaaacatccatactctttcttaacgaatctttatacggctttctctaagacagaaacgcctgtttttctcccgtttacaaaataaagacattccggctctttttgcgctttgtgtcctttcccgaaaaagcgaaaaaataaacgcccccgctccttgaaaatcgagaagctaagcggtttcgattttctcccccttcttgtttcgccccgcttttctccgatctgctccatactttctttttccgcgagcctctcttctttctcccgctcttttttatttctcaaaacagcacaacgccctgacacaagtccgctattctccgcccgacaaatctttcgaaaacgagaaaatccttttatttttaaattccccgtactttttcacgaagcgccgcgcggcgctttttttgcgtccctttactttatttgtcgctcgatctataagcgcttcttatggcttcttcgcgcgtttcctctcttcctgcctgacattttcctccgtttccggctttccgatttttcccagccattcgccgacctgccgcggcatagtttcgccgccgagaaaacggaagagcgatttttcccgagcggacgccgcatccgctttgccctcgtcgatatatcggcaaaccgacgtcagccagccgaagcaggcatattccctcaaaaagtattcttccgtcaatccgcccagtttcagaagggcagagattttccccaaagtccgattttgcctccgatagtaattgcgctcgctgcccatactcttgcggacgcacttttcacagtattccgccagcgccttcttccttccgaaatagcgaagttccaacaggaacttttcctccgtcgagagtttttccaaagcgcgctccacccttcccttcaaatccccgatgagattttttcgaatgatctcccccgcgatatattccgtcagaacttctgtcgccgagcgatagtcgtaggataaaaacgccttgtttttgatatgctcctcgtaatccttctctattttttccagccgcggatatacgtataaaaccgcctttacgtaagtatccaatttccgtttcctcccttttctatatcccgctcctcaggacgccattattatcgcataatttttccgtttgtccagcttcttctgccaatttttttaaaaattacaaacatttgtttacatttaaatgcgatataccccattaaacttgacatatatttacttattttaaagaataatgaacatttattagatttatatttgccctgaggaggcgaaaaagtctgaaactcggaaaaatcttcctcccgccgtcctctcggtcgccctgttctctaaactacttctttcctcttaaattttccccgaccttctccctttccccgacctttattctttttattatcgttaaaacgttcgccgttcgcacataatatccgcgaacggctctattttccgcaacgaacagccgggataaggaaagctctgccgacgcggaaaatagtttctcaatctgttgcgttttttgtcgtattatggtataatttgaatatgaaacgtttgctgacggtaattttatgcgcaagtatgctccttgcttccccctttggcggtcgggaagcgggttttgcgcgcgccgaaacggagaatacgggaaataccgaaagggaaaccgcgcagacgctttccgacgggaaagcggaggattcgttgctcctgccctcttcttacgaagaatacctgccgcttagcgcgccctcggacatcgcggtgacaaaggagtacgccgcggttgcggacggaagttttatttatgtatacgatcgcaaagcggatgcatacagccgctatgaacatacggcgaacgccgaccccgcgaacaatacgatagcgaaactgcaattttccgaagaggggaccttgtactttctcgacgcgtccacctgcctttatgccttcgatcccgcccttctcaaagcggaaaagacggatttggtatgcagttcctttacgattttttcggatacgatttattttaccaacgtttccgccacgcctacccccattttcaagacgacgctgaacagactcgacaacgcgcaggcgacgcaggcgaccgattccaccgtcacctccaagccggcgatcacgcacgacaacggcgttcttttctacaccgattcgggaaaatatctgcataaatcggagaaacgggaaacggatttccacttatcgcccacgctgacctccacggaaacggtggtttccatcgcggtatacagcggcatcctctattacacggatacggcgaacagtttgtatatttacgatttaagcactttcggcgtattggaatcctttgcgggggacttctccgcaatctccgtttacgacggctttatttacgtcgtggacggcgaccgcatccgccgctattctcccgaagaggaggcgtttaccgattatcagatctgcgcctcctccccggcaaaaaaccgcctttcgggcgcgcggaaaaccgtgcttgcggaggatctgctcctctttgccgataacggcaacgaccgcctttccgttttggacacgaaaacgggcagctatcggacgattccctgcgggattgcgcccacccttctcgcctcggacggcaaaacggcgctggcggcaaacggcacggaggccgttctttacgatctgacggacggggaaacgttcggaactaaattgcaggaattcggcggcttcaacagcagcctcgtcggcgtttcgggcatatacgacaactattatttcgtcacggacaacaattatttttatcgggcgggcaaaggcgcggacggcgtttggaagctcgattccacccccaagccctccgtatcgcacaccgcgcgtctgttgacccaggacgtttacggacagctttacgtcgcgtattcggacggcaaagtattccgcttcaccgaggaaacgttcatgaatcccgccgacacgggagaagaggcg

SEQ ID NO: 806 - DNA, 10051 bp, Unknown
  16S sequences of unknown bacteria
atatcatcgtgtccagtttttgcacccctgtgtccagttttagtttaccacttcaaatcatactattttggaaatgttcatacaatattgcacgaccccgctctttgtatgcgtttttgatcacatgcaaaaaactgatcctccatattcctgccccgcttccgcaatatccgctcctatgagctgttaggaatcagaacgcacaagggctgtcccaagaagacttatcaacagaaacagcaaagaaagataaacgagcttcgttatcgtatgcgtctgatcaacgctttcctcgtgatcctttaacagaataactgtttttccggcgtaaggatccaatttttatgccataataaaaagccatgtcagaaagacatgacttgagcttatcgtttccaatgcagatagcgtgtcgtggaggcaaagctgccgaccaggccgacgatcccgccgcaggccgcaagcgctgccgcgacatagagcgtgaacgggataacgggctgcagggcaaacagattggtaaacagtctgccgccgatctcgtcatacagccagctgtatccgaaataagtcaggatgcaggggaggacagcgccgatcaggccgatcagcaccccttcgatcatgaagggcaccttgatgaaatgattgcttgcgccgacattgcgcatgatggcgatctccttgctgcgcgcgtagatggtcgtgcggatcgtgctggagatcagataggccgtcaacaggaacaacaggatcacgaagacgagcccgccctgctgcacgagatcgaggatgtggatgagctgcgatacgctggcgccgccatagaccgcgtcattcacaaaatcgagctgactgatcgcttcgcatgtctgcgcgatctgatccgcgtcgaccacggtgatgaagaacgcgttgttcagcgggttctcttccccgcggtacatcgcgaacgcctctcccttttccttgatcatgagctccagctcttcatccttggtggacagtgtcgccgccgcgacattgtccatctccttcaggacattgcctgcttcctccagctcctcttccgtatcgatatccggatccagggtagcgtggatctgcagcccgccctcgatgttgctggcaaacagcgatacattgccggccgcgcacaggaagatggccagcagaagcagcgtgatgatcaccgccacgattgcggacagggtcatgcccagatggcggaacatccccttgaacgcctgccggatatgataagggatcatccggatctccttaatcataagtcagataaccgcctttcatcatatccgcaacgatatatccttcttctagtgagatggtgcgcttcttgaacgcatccaccaggttcttgtcatgggtgaccatgagcacggtcgtcttttccttttcgttgatcttttccagcagctcgatgacttcctttgacatttccggatccaggttgccggtcggttcatccgcgatcagcaccttgggatgattggcgatcgcgcggccgatggtggcacgctgctgctgtccgccgctgagctgattggggaatgccttggccttctcgctcagcgagacgagctccagcacctcacgcacccgctgacggatctgctggcggtccatgccgatgacctccagcgcgaatgagatgttctcaaagatcgtgaggtgcggcagcaggcggaaatcctggaagacgacgccgatgctgcgccggtaaaacggcaccttgctgtgtctgagctttcccacatccacatcgttgaccagcacgcggccctgatccgggatctcttccccatccagcagcttgatcagcgtggactttcccgatccggtcgggccgatgatatagacaaactctccgtcctcaatcgtcagattgatgtcgcgaagggcatgaactccattgttgtaagacttagaaacattttccagtcgtatcatagctgttctccttcctatccgatcagtgtttccggacgttcacggcaaggcgtggacccctttgaatcacagcccgtggatggggagctccatccgcatccccaggcaaaatcggcggtcgacgcgaactgcgaagctgcctcggaaatagacatgcttcccagattgatgatctcgatgtgacagtgcgcgccgctcgagttgcccgaattgccggtcagcccgatcacatcgccctgcgacacgctgtcgccggcggacaccgtcatgccgtactgcgccatgtgcgagaatgagacaaaatatgtcgtgtcattgacccgcacgagcatggcgatattgttgccggccccataaggatagcctgcccagttgcccagatatccgccgttggtatccgccggattggccgcccagacgatcagcccgtcagccggcgcatggatgggcgtccctactgagaccgcgcggtccacgcccagatgcaggccgccgccaggataataccaggtcccggccgaggtcggtccctcgatcgggttcagccagccatcgctgctcgatccctgataatccccggccgtatccatatcgatcagatgatcgccgatgcgctcgatgtcgacctgcgcgctgcgcatctcttcctgcagctgcgcttcctgctgacgatacagcgtgatcagctcttcatttgcttccagcagttcctcctgctggcggcgctgcgcctgcagctgttcccgctgtgtctcttctgtctcctgcaggcggtcctgttcgctacgctgctgctgcagcgcggtcttttcctcctccagcgattcgatctgctcgctgtcgctctccgtgatgcgctgcaagccttccagcgtccgcatcatctcttccagcgagccggaatccatgatcatgtccacgacctgattggtgccaaggctcgcctgttcgctgagcatgcgcgccttgatctgcgcatcccagcgcgcgatctcctcctcacgagcctggatgtccttctccagctgcgtgatcgtttcctggatcgcttcgatggatgcatccttctcttcgatatcggcttccagctcctcgagcagggcatgctgctcctgcacggtctcttccagctggctcatgtcatcctgcagagcgtcaagatctgcctggaatgccgagacctgctcttccagctcttcctgctgctgcgtgtaatattcccggaacgcctcgcacgcctgcgaatccgcggatgaatcctggacggcggaacaacgcgcgatccattcctcttcatcagaaaagtcataggcgcgcactgtctgcgccccaggcatcgcgctgatgagcaaggccgctgccaagaagcctctgcacagacgccgcatcatcgcttccacctcagatacttgccgacggccagaaagctgccggccatgccgacgaggatgccgcccagcagcaggatgaggcataccccgaagatgaagggccacatcggcttcatcacgaacatggaagacagcaatacgccgtcaaacgcctgatacagcgcataatagccgcaagatatcaggacgatggggatgatcgaccccagtaccccgatatacattccctccaggatgaagggaccgcggatgtaccagttgctcgcaccgacgctgcgcatgatggcaatttcggtgttgcgcgcctggatcgtcatgcggatggtattctggatgaacagcagcgccaggatggcaagaaagaccacgaacaccgcgccgccgctgcgcagcgcctcgaacacgctgaccatcacggtgatctcatcgccgccgtatgtcgcttcgacgatcccatccatctgattgagcgcttcgctcacggcatcgatctgccggttgtcatccagttcgatgcggaagacgtcatacagcgggttgcggtcctccccttcataataacggaacatctctccgttttcggcgatgagctcctgcagctcgtcctctttgctggaaaaggtgcaggactccacatgatcgagctgctcgatctgcgcctgcagctctgcaatttctttatcctcactaaatccgggactgatcgtcgcctggatctgaaaatcactctcaatgttatcggtaaaatcgctgatgttgccggcgatgaccacaagcacgcccacgatcagcagcgttacggtgacggcaatcacggatgacacggtcagcgagatatgccggatcagattccgccatgcatcagccagatgcgccagcagattctgcattcgtttcttcattcagtgaaccaccaacctctctttcacaccttctgtgtctttttagattataacatagaatcatttccccgttattgaaagtcacctgaaattttttacatggacatccgtgcgggaacggtgccgctgagaaaaggtgaagcctgcgccctgtacctcatccgcatcgctgacgacgaagaaggcctccggatcgatgcgggcgatcagcttctgcaagctggcatactggttctgcttgacgaccgtcatcaccatcatcttctgttcgttggaaaagccgcccagcgaagggatgagcgtcacgccccggtcgatctgatcgctgatcgcgcggcggatctcctcccagtgttcagaaacgatgaacaaggtcttgctggcctgcgcaccgagggtgagcacccgcttgatgacctgtccgctgacgaataccgacaacaggccgatcatcgatgcctcgatgccatagaccacggcgcccaggatgacggtcgcgccgtccacgcacatcaccagcgccgacagcggcagcccggtgtatttgtggatgaccagcgggatgtccatgccgccggtgctgccgtctacccggtacaccagcccgatgcccagtccgatgcagacgcccgcatagaccgaagacaggatcggatcggccgtcggggagagatcgcccaccgcccagctgagcagcgagatgaacagcggatagacgatggtgctgagcaccgtcttcaggaagaacgcctttcccaggcagagcgagccgatgatgaacaagccgatcgtcagcgcattgatgatcagctgcggcggcagatgaagcaatggctgcagcgccacagcgatgccggccgtcccgccggtcaggatattggaaggcaagacaaaaaacgtgacgccgcaggcaacgatgagattgcccaggacgacattgatcagttcatggatccattcacgtcttgattggttacgcatttcaaacatctccttttttcgcacggcatctattatagcccatgttcctgtccgcaacaaccagctttaccggagcggacgaaagaaaacgcaggccttgtcttccaaggcacaaaaaagggcggtcccggaaatcttccgtaacctgccccatgatcgctcttagtggatctgcatcttcaaataagcgaagatgaaatcatccaggtcgccatccatgacgccctgtacattgctcgtctcgtacccgctgcggtgatccttcaccagtgaatacggatgcatgacatatgaacggatctgtgatccccattcattggcttgctgctcgcctctgatctcggccagcttggcctcctgttcctcgatcatctgctgatacagtcggctcttcaggatccgcagcgcctcctcacggttctcatgctgggagcgtccattctgacacgtcgccaccaaaccggtaggcttatgcaccatgcgcaccgcagagtcggtcttgttgatgtgctgaccgcccgcgccgctggcgcgcttggtctccacgatcagatcttccggacggatctcgatctcgatctcatcgttgaactgcggcatgacatcgagcgaggcaaaagaagtgtgccgtcttccgccagagtcgaaaggcgagatgcgcaccagacggtgcacgcccttctccgctttcagatagccgtatgccttgtctccctccaccagcatggtgacagacttgatgccggcttcttctcccggcagataatccagcacggtgaccttgaagcccttcttttcggcataacgggaatacatgcggtacagcatgctgcaccagtcgcatgactcggttcccccggcgcccggatgcagctccaggatggcattggactgatcatattcatgagagagcagcacaccgatctcaaagcgctcaaaatccttttccatctgggtgtattcttcttcgcaaagcgtgaagatatcttcatccatatcttctttaagcaattcgccgctttcttccaaattggccaatgaagcttccagcttctcataattctccacgacttcccggatgccgttcagccggcggatcaccgtctgcgcctgctgcggatcattccagaaatcttcctgcatggtctgtgccgtcagctcttcgatcttcagctttttctgagcgaggtcaaagtgactcaccaagcgccttcaggcgttcctgatgagtgctcaccccctgtctgatctcatacagttccattattcatctgctccattctcagctgtctcttcggcaggtgcttccgccggtgcagctgtttccttctcatcctgtgcttctgcctcagcttcaggcgctgcctgtgcagcagcctcctgtgcggcagcctgtgcctgtgctctcgctgcctgctcagccgcgatctgctcctcgctcttgcgctcgatgcgcaccttgagcaggaagaagacgatctcgcgggcgatgcgttccgtcatctcctcaaacatctcgtagccttcgctgacataagcctgcagcgggttgttctgcgcataagaacgcagatggatgccgtcgcgcagcttgctcatcatatcgatgtgctcgatccagttgcggtccatgttgcgcagcaccaccgtcttctcaaacggcatgaactgctggcgcaccggctcgatctccttctcataaccgccgaagatcttgtctacgcagtacttgacggtcgcttcacggtccttgcccttgatctcgtcagccgtcacgcggttttcctcacgcatgcccagcatgtcgagaccttcgcatacgccggtatagttgatctgtgaatcgcggtgtgcgctgtcggtattggatccgacgatatcgctgaccacgcggtcgaacatgcccttgacgatatcatgcacatcgtcattctccagcacatagttgcgctgctcgtacatgatctcacgctgcttgcgcaggacatcatcatactccagcagctgcttacgcatatcgaagttgtatccttctacgcgcttctgcgcctgggtgatggacttcgtcaccatcttggactcgatctgctgatcgcccagctgattgaacagcccgttgagcttttcgccgccgaaacgcaccatcagcgagtcttccagcgacacatagaaacgggagaagcccggatcgccctgacgaccgcttcgtccgcgcagctgattatcgattcgtctggactcatggcgctcgctgcccagcacggccaatccgcccagggcacgggattcctcgctcagcttgatgtcggtaccacggccggccatgttggtcgcgatggtcacggcgccgacctgtccggccttggcgatgatctccgcctcacgcgcatggttctttgcgttcagcacttcatgcgggatgtgcatctttctgagcatgccgctgaccagctcactggtctcgaccgcgatcgtgccgaccagcaccggctgccctttctcatgcagttccttgacctcgtttgccaatgcctggaacttcagcttcttggtcgcaaagatcgcgtccggatagtcgattcgagcgatcggacggttggtcgggatctcgatgacacgcatgttatatgtagaaaggaattcttcctcctcggtcttcgccgtaccggtcatgccggccagcttcgtgtacagacggaagaagttctggtaagtgatggtcgccagcgtcgtcgtctcttccttgatcggaacgccttccttggcctcgatggcctgatgcagtccatcggaatacgcacggcccttcatcagacggccggtgaactggtcgacgatgacgatctcctgatcctcgctgaccacgtactctacttcgttcttcatgatatagtttgcgcgcaatgcctgcgtgatatgatggacgagttgcgtgtgctctacatcatacaggttcttgacgcggaagaaacgctccgcggcgcgcacgccgtcttcgctgagcatgacctgacgggtcttctcatcgatctcatatccgccgctgatgagcttcttctctccggtgcgctcatccacctcatactgcggcgccttcagccgcttgacgaactgatcagcctggatgtacaggttggcagtcttcttctttccgccggaaatgatcagcggcgtacgggattcatcgatcaggatggagtcgacctcatcgacgaccgccatccacagcgggcgctgcgtgcggtccttgacatccgtcaccatgttgtcgcgcagatagtcgaagcccagctccgagttcgtcgtataggtgatgtcgcagttgtatgcggcgcgcttgctggcagcgaccagctcgcgcttgttcacgccgacggtcaggccgaggtaacggtatacctcgcccatccaggtggcgtcacgctctgccagatattcgttgaccgtgaccacatgcacgcctttctgcgccagcgcgttcagatatacgcacatcgtcgccgtcagcgtcttaccttcaccggtcttcatctcggcgatatcgccctggtgcatcacgatggcacccatgatctgcaccttatacggatactcgttgagcaccctgcgcgccgcttcgcgcgccattgcgaacgcttccggcaacaggctgtctaacgactcgccgttgttgtagcgctccttgaattcgttggtcttcgcaatcatctcttcctggctgagcttctccacttctccagccagggccatgacctcttccgcctttttctcgatctttgccagcgtacgcttatcggcattcaccaggcgttccagaaaatttgccatgctttgtcctccattccagcttgatatctttcattcagatacagtttcagcgatctgactttcctcagaataaaacactatcgggtctattgtatcactagaccgcccgtcaaatcaacatcatactattttgagtttcggttaattgcattgaggtttacacaagatgcgcatacagttcaccaggtatcttgacagcataggaaaatgaatgtattataacagtgttatattacagtgtcatgtggagagaaatatggaagaaaagataagcgccactttggagagcatacagcaggctgccatgcaggaatttcttgacaaaggatttcagggggcatccctgcggcagatcgtgaagaacgccggggtgaccaccggggccttttacggctacttctccagcaaggaggccctgttcaacgccctggtggagccccatgccgctgcccttatgggcaagttcatggaggcccagacctcctttgccgagctgcccgaggagcagcagccatcccacatgggggtggaatccaggacctatttggactggatggtggactacatctgtcagcaccgggaaccggtaaagctgctcctcacccgttcagagggcaccagctacgagcacttcgtccacaatatggtggaggtggaggtagaatacaccctccaatacatggaggttctccgccgcctgggaaaggacattcccgagctggacaaatccctatgtcacatcatcgccagcgggatgatgagtggtatcttcgagattgtggtccacgatatgccccgggagcaggccttgcgggatgttgatcaactccgcgatttctacactgccggatggctgaaattgatggggacttgacccctatcttttttggatattggttagtccatgctaactattttgataaggagggatcactttgaaacaaaagaaaccaagcagcctgactcgcatcttgggct

SEQ ID NO: 807 - DNA, 18297 bp, Unknown
  16S sequences of unknown bacteria
caagtgtgcggaatttttacttattacctcttcactcttcacttttcactaaattggagtgtacggaattttaagtaatatgtaagaggtaatagtgaagaagttaggttgatttgctttgcaaatcttcattttattaagttgcatttttgtactacgagcacatacaagaataatacgaaccaagacggcaagtcgaggttcgtattattttttgcctgcgatttcttcggaattattgtccgattgaagtagcccctccgaatttgctttttcgggaggcttagttttgcataggtcttcgcagacgtcaacggccgcaaaatcgtcgcttaaaacaccaatataaacgaattgagagccgagtaaggtgcgttccttgctcggctcttttgctgtctatgacgcgtttcccgacctgtacgcaacgattttggctttgttccgttgacttccgcaggctcgctatttagtgtactgatatttaccgtcctatgcaccttcgcctcttgccgaaaaaggcaaatcaattcggaggtgtaactcaaaatggaaatgttggtaacaaagttctcaaacggaaaatatcgtaacgaaggcgaattattcgccgaacctatctctgccgaaaacgttaagcttatgggtgagatgatcgccctgcaggcgctccgcaccgtaaagaagtacgatatgaaagtggcagacagattgtatatcggtctcatcaaagacctgcaccatatgagcgagatagattataccgtttcggacggctatgacgtggcacagacagctatctgctttctgtatcagtacgccggcagaaaggcgtccgagatttgcggtaaagacaaacgcggaaaggaaataaccatcaaactcgcttgctatcgtgaggtggacagattcatcgatagcttgcgcaaccgctccgacagacacggcgcaatcgaatacatagattttacggattacaaggctctgcccatggatcccgtgaattgctttgaacaagaacagaccgattacagcaaatatgatgaactcgtaagtgcattgcagttatccgcgctggaaactgccatactgaactgctatatgaacggtatgaggcaagccgaagtctgcgccgaactcggaataggccgcgggacaataaatcaccgcaaagcaagtatacgacagagatattattcgctttttggcgcatattaacatgatttacttagtttagaaaaacataaggcagtcaaaacgactgccttatgttttagtcgagatatacataaccgcttgccgatataacttcaacactgcaagtagtataagtgaaatagccatacacctcaaatgttccattcgccctgtaaccggaagacttatttaaagttatatttttgtaccagagcgacctccgcttgttcctcctgaaaactcatcgtttttcaggcgtttttttgatttaatttataacaattctttatggattgttgtttatgcatgaggaatttctttttaatcttcggatacgattgatgtgtctttcaaattctccgttagagatcaattcgctgataaggtactgttcatacgtcggtatagtgcaggaataaacctaaataatattttgtcaagtttatttgctaaaacagctgaaaaattcgattttttatgcatattttttatttgtaacaattttttccttgtggtataatgataaataattcttctgtcaaataaaggagaaaccatgataatcgtaaaagactggaaaatggaaatcgacggcaaaacatattcttgctcgcccccttgttccatgtattcggtattgatcgaaaacaacgttatccaaaatccatattacggccttaatgaagacgccgcaaaagagtattcggaaaaggactgtacttttttcgcgcagttcgatgtaaccgaaaatatgcttaatcgcaaatttttgcgtcttaaattcaacgggttggatacgctttgcgacgtgtatgtaaacggtaaatggtttttgtccgctaaaaactttcaccgtttttacgacctggatgccgcgggagtaataaaaaaaggcagaaacaccattgaaatcagatttcattccccaacgcgctttatccgcgaggcgcaggaaaaatattatctttgggactgcgggtgcgaagacggtaaacacggttcgctttacggcatcggacatatccgcaaacccaattattccttcggctgggactggggaatttgtcttcccgatatgggaatctggaaaagcgtcgagcttaatgctttcgacgacgaaatccgcgacttttacgtgcggcaggttcacttggggaacaaagtcgttcttaaaatatttgccgaaacggcttcagggaaagacgcggccgtaactcttgtttcgcccgatgggaaaactttggctgaaacggtgacgcagaacggcagagcggaaatcgaaatacttaatccggaactgtggtggcccaacggatacgggtcacagcctctttataccgttacggcggaaatcgaagacaataaagacagccgtgccgcaaaaagcctgaaaatcggattgcgcacgttgaccttttctcaacagcccgacaagtggggcagggaattctgtgccgtagtgaacggcgtcaagatttttgccatgggcgctaatatcatacctacgcgcacgatattgccgcacaggacaaaggagcaccttaccgagcttattaaaatgtgcgccgaagataactttaatatgctgcgcgtatggggcggcgggctttacggcagcgacgagttttacgacctttgcgacagactgggtattttagtgtggcaggactttatgtttgcctgcactcaggtctctttttcggaagagttccgcgaaaattgccgcgacgaatttatacaaaacgtcgtaagactgcgttcccacgcgtcgctcgcccttttttcgggcaacaacgaaatggagccgtgggtctacgaccatgcggagagagatttgtatcccggagcaaaactcagacgtcaggagtatcttgaattgtacgagcgttatattcccgcgatagtggaaaagtacgcgccggacgtcttttattggccaagttcgcccagcagcggcggcggttttttccgctccgaagacgagaattacggggacagccattattgggacacgtggcagaacggaggaccttttgaaaattaccgcaatcattatttcaggtttttgtcggaattcggctttcaggcgcttccgccgcttaaaaccgttttgcagtttgcggacgaaaaagaccttaatccttcgtcggcagtaatggacagtcatcagcgcaaccccggcggcaccaaaaaattgctgggatatcttacggacaagtttcctttgccttccgacttcggcaattacgtttacgcgacgcagattattcaggcaaacgccataaagtacggcgtcgagcatttccgtgcaaaccgcggcaggtgcatgggcactcttttctggcaggttaacgactgctggcccgtgatttcgtggtcaagcgtggattgggaaaacaacaaaaaagcgcttcagtattacgcaaaaagattttttgcgcccgcaattgtcatggtggaggaaaaaggctttgttgccgacgtttatgttacttcggaaagaacggaggatttcgacgccgtagttaaagtttccgttaagggaaacgacaattcgacggttttcggaaaagattatcccgttaacgttaaagcgttaagcgcgcagaaaatagattcgctcgatttaagcgacgttctcaaaggcttcaaagaaaaaaggtatttgtcggtacagctttgcgaaaacggaaagcccctttcggaaactttctgtatttttacgtctcccaaagctttcaagtttctcaaacccgatatttcggtcaaagtttcggggaagggcgacttgcgcactttgacggtttcatcaaacgtgtttactccgtatgtaatgctggatacgctttcggacctaaaatttggcgacaacttcgtcgaccttacagggaaacccaaaactattaccgtcggaaactgcaaaaacatgagcgatgaaaagcttatttctctcattaccgtgcgcagcgtatatgaccttacggaagttaaacaggcggttaagttgcgttaattcttgacaaaacgcggcggaaattatataatgtaaaagttgttatacacggcttttaatttaacgacggtgcatatgcgcacaattaatcaaaggaagaaacgtatgattgtaaaagaagtgcttaccgaaaaagacaggaacgcttttttcgagtttcctttaaagctttataagggaaataaatatgtcgttccctcgcttatttccgacgaaaaggacgaattcaatccgcttgtcaacgacgcatattcttacgcggaaagcaagatgtttattgcgcttgacgaaaaaggcaaagttatcgggcgcattgcgggcatacttaaccgcgcttacaataaaaagcagaacgtcagacagttgcgcttttcgcgcttcgacgtcattgacgacttcaacgtcaccaaagcgctgttcgataaaatttttgcctgggcaaaagagcttggcatggacgagattgtaggccccataggcttttccgatctcgacaaacagggtatgcttatagaggggttcgatcagcccgatatgtatcttaccatttataactatccttattacgtcaagcatatggaaaaacttggcatgaccaaagccgtcgactgggtggagtaccgtattaccgtgcccgaaaaagccgacgaaagacttttgcgccttgccgaaaaagtacaacagcgttacggctacgaatacgtgcccataaaaaactacaaaagcgtggagggcaccatcaaaaccgcgcttaagcacgtcatgaacgaggtatttgcccatctgtacggcgtcgtcgaaatcaccgaccgccagattgaacgcgagtctaaaatgcttaagcaggtgtgggtcaacgatttcgtaagcgccgtccgcaccaaggagggggaaataataggttacgggtttatggctccgtccgtttccaaatccatgcgggtgatgaacggcagactcaatcttttcggaattttcagcctgattcacgagcttaatcatcccgaggtagtagacctttacagcataggcgtttccaagaaataccagaacaccggcgtaaacgtcatgataatggcgcgcagtcttaaaaaccttatcaaacacaaggtaaaatatctcgaaacggggccggaactcgaaaccaacgtgcagattcaggcgcagtggaaggattttgaaaaagtttgccacaagcgccgccgctgctggagccttaagctggaagaaacgccctctcagtcctgaaaagcggataaaatcggaaagtaagtctgacgttttgttaaaactcaaatccgaggaagccgcaatttgccgatcaggcgaaataaattaaataaaacaaactgtttttaaaaagttgccttacccgtattgttaggcgacttttgttttatgtttaaaaataaaaccttttcgtgctttttcgtaaatacgttctatcggcgcggtcaatcaaataaaataacgaaaggagaatataatcatgaaaaagttactttcgttaattgtatgcgctttgtgtcttgtgcttatcgcgtgcgatacgcctattgaaaaacgtcagcccaatctgtcggaactgcgcgacgtcgtaatgaccgcgcaaagcgaccgcatgaaaatctcgcttatgagcggcgtaagggaaaatcctttcgtgatagacggcgtcccgggcgaaaaaacgccttttaccgtggttaccgtcacgccgtcggggtttgacgaaagtaccgtattttcgtactcgatttatttgggagaggaaaaagcggaaggtacgttttccaaacatccttttaaaaacacatggtctttcgaaataccgaaacaagccttggataacgtcgcgcttaccgtcacggcagagggttacgcggaaaatttcgaactttcttcagtaaaaacagctgacatgataggtgccgaggaagctttggaaatcgcggagataaggcttaaggaccgcattaaagaacatacttccggcggaaccctgaacgccgaaatttacatacgttttttggaaaatcccataagctcggaaggggggtattactggtacgtcgcttttgttccggataaatacgaagtgtacgcagtgcttatagacccgattacgcgcgaaattgccgccgtaagagaataggcatacaaaacaatttataaggaaacgggtaagaaaacgaaaagataaaaaattttaccgaatacttgaaaatttacgtttttataaaaaattgtcaaaaaaaggctcttaggaaggggcctttttctttgttgactgtaaaaagcaaaaaatatcgaaaaaacgcgttaaaattattttaatttttccgaaattatgttataatgacagaaatagcgaggaatcatgacgcaattggacgagcaaaacgacaaaaaaataagcgatgcggacgtaattgtcgcaactgcggcaaaaacgcttttttggctggttgtttgggtcgcgcttttttttacgcttttccgctttgtttttcctgtcgccgcaatgaatttatatgatgacatgggcaacgttccgcgtgcctacgactgcgcgaaaaccgctttggcgacgtcgaaaggcgacgataaagtaaatgcccgtcttgcatgcgtaaattattccgttaagctgtttgcgcttaatcccgaggattacgctgaagagcttaaaaaaaacagcgaggaatttcttgcggattccgattgcgtaaagcgtatcgcgcttatcgacgagtataacgaaaacgccgcgcccaaaagcattcgtcccaatctttacagctatgccgattatcttcattgcgaaaacaccagggcaaactgttattcaggcaacgacaaactcttgttcgaaggcgcttatcttaaagccgacgacgttttggccgaatgcgcttcacgcgcggacctttcggttaccgcagtggtgctgggacagatttccgtaatgctcgaggagtacgccgcgtcgggcaggggcataaacggcgcgtttgacgcaggtcttctttgcactgtggcgcgcgactacataatgaaagttttaagcggaataaacgatactccgactttaaacgacctttaccttgtcaaggcttatgaaaaactcgtcaccaggatgacggcgggtaattttgcggaaccggacgtgataaccttgcttaaaaacgtcgaatacgacggggcaaattacaccgtggacaatctttattacaaggtacttttaccgcaatactgcaaataaactttcaggagaaaaatatgaataaaatcgtaaaagaaggacttacattcgacgacgtattgcttatcccgggcgaatcgcacgttgtacctaaagacgtggatctttcgactcgtctgtcggacaccataaaacttaatataccgcttttgtcggcagccatggacaccgttacggaatcccgccttgccatcgccattgcgcgcgagggcggcatgggtatcgtccacaaaaacatgacgattgacgctcaggcggaaaatatagacaaggtaaagcgcagcgaacacggcgttatcaccgacccgttcttcctgggtcccgactgcttgctgaaagacgcgcttgcgcttatgaacaaatatcgcataagcggcgtgcccatcaccgttgacggaaaactcgtgggcatacttaccaaccgtgatttaagattcgagacaaatttcgatcagcccattaaaaacattatgaccaaggataaccttgtgaccgcgcctgtcggaaccacgctttccgaggcacagaaaattctgggcaaacaccgcatcgaaaaacttcccatagtcgacaaggacttcaagcttaagggacttattacgattaaagacatcgaaaaagccattcagtaccccaattcagcaaaagacaaaaacggacgtcttttggtgggcgcggcagtaggcgcgggtaatgattgtctcgacagggcaaaagccctcgtggacgcaagggcggactgcatagtcgtcgataccgctcacggccacaacattaacgtgttgcaggcggtcgaaaaagtcaagaacgcttgcccgaacgttactcttatcgcgggcaacgttgccaccgccgaagctaccgaagcgctttataaacgcggcgccgacgtggtcaaagtgggtatcggacccggctccatctgcacgacccgtatcgttgcgggtatcggcgtaccccagattaccgctatcatggattgcggagaagtcgcagacaaatacggcagaacgattattgccgacggcggtataaagtacagcggagatattaccaaagccattgcggcgggcggccatgcctgcatgataggttcgcttttcgcgggaacggaggaaagcccgggagagttggaaatctatcagggaagaaacttcaagtcttatcgcggaatgggttctttgggggctatggctctcggcagcaaggacagatatttccaggatgacgccaaaaaacttgtgcctgaaggcgtggagggaagggtgccttaccgcggacagctttccgaaattattttccagcttatgggcggactgcgctcgggcatgggatactgcggacagcccactataaacgatttgaggacaaaagcgcgttttgttaaaataaccagcgcttcgcttatcgaaagccatcctcacgacatttccataactaaggaaagccccaactattctcccaaaaattaactgatatttttatcggcataggaactgttattcctgtgccgatttttttatactaaagttttagcggataaataatgtaaaaaatacataaaattaacaaaagagcaaaattttagtaggatatgcaaatcaaaaatttgaattatcatttacaaataaacttttatgatgttataatattaactaagaaatgataaatttggagtgggggaggaaaagatgaaaagagtatttttgtttattctttgcgtttgtcttctgtgtttcaccgttcttgcggcatgcgacgatggaaacaaagacaaaggtacgcttacaattgccgatattaccgtaagcgtcggcgaagaaaaggatatcaatcctgtattttcgattgaagcaggtaagggcgacgttacctatacgtttgagggaaacaatatttccattgaaaacggtaaggtaaaaggtcttgtcgcgaatactgaaactctggttacggcaaagaccgataatcacgaggtagtgtttaaagtaaaggttaccgaaaaaaccattgaccgcggtacgcttacggtagcggatatcaccgtaaacgagggcgctactgttgacatcaatcctgttttttccaccgaagcaggaaagggcgaagttacatacacgtttgacggaaacaacatttccatagcggacggaaaagtaacggggcttgtgggcggcacggaaacggttgtaaccgccacgacttcctatcatgagattacgtttaaggtcaacgtttccgttgtggatcgcggtacgcttaaaatcaacaacataatgatgactgccgacgttaccggtaaaatcaatcccatattctcaaaagaagagggtaaaagcgcgcttacttataccatggagcccgccggaataatcgaaatttccgctgacaacaagataactgtcatcgaccccgagtctatcacgcaaaacgttgagattacggttaccgcaacgggcaaatatttatctactacttttaaggttaccgtaagcgagataaaccgcggcactcttaccgtatctctgcccataggcaataccgaggatcagcttaatacgctgtatgcaaactattcggctcgtcctttaagcgcgacgttctctaaacccgagtttgccgagcaggtgacctattcggttgaatccgcttatcaaagcaaggtcaccatcgaggacggcaacaagataaaagctacgggagatttttccactcccgcaaacgtgaaagtgaccgccgtatcggagaattttactgccgaagtcacgattaaagttaccaacttcaacggcaagaaccatgtgggaaattccttggaccttgaaaacaaggttaagtccagactttccaattgggaaaatctcggtggagaaacgggcggagtcctgtttatgggcgactccttcttcgacacgggattctggtccgatttctatacgacttacagccgtaaaaacgcaattaccatgggcataagcgcaaccaccacaaccgactgggaatatatggttgaaagactcgtttatcccgtagctcccaaagcggtagttattcactgcggaaccaacaacattttcgacgacaaaaagaacgccaataccgtaatcgaagatgtcaagaaactctttgatatggtacatgaaaatcttcccgacgcacaaatctattacttcggtatagagccgcgcgtcggacaagataacagcgcgcccaaggcggcaaacgtcggaatcaaagcttattgcgacgagaacgattggcttacttatctcgattctccgtcctggtgctatgacaatgacggaaacgtaatttcaggcttcttccgcgacggagtgcatccctctcttgaaaattactcgcgttacgtccgggcgcttgaagacgcaggcttagttgttgacgcgtcgcaggcggcaaccgatcctacgattgacgacattacgactactaccgatcagtccattgccaaaaataatacttatcagcttttctaccgcggactgccgcttaccaacaattacgttcttacgggtaaaatcgatattgcggtcgctgccaaaaatccgcacatccagtttaaattcaccggcaacaaccgtttccttatctgggacggcgaaagtttccaaggtaacggcagcatgggtcttggctggcaggtaaacggcactcacgtcagcgatgacgacgatatttatgcctatactcagaacgaacagtttatcgttctgttcaaactggtagttacggacagcaacgcttatttctatttcggtaacgataatgaaggcaccgttacttatacgcttaattccgtgtttgtcaatctgcccgattcgcttacgcttatttacggcactgaaaatatgagcgcgaaattatacaaccttacggcaaagacggctttggatgaccccgacgattatgccgccgcaacggttggcgctgagttcgattattatgaaaatgctcagacagccgtgcccgacggactttacgtcaatattccttccggcgacggactttacgttgtgcgcgacagccagcgtaccgaaggctatatcgattacagttccgcattctatcttaagggcatatctgcaaacaatgatacaggttacgacggaatctcaagggattggcgcgtggtaagcggcggtaccgataaccttacgggtgactttgcggtttcctatgattttgaaatcgtaaaaagaggcacgctcgagtctatcgatgccttaagcgcggaaaacgtttccgctgtcaactggttccatgttgcatcgatttctaccgataacgtatttaacgcttggaaagattatcacgtcctttattggaaaaccagcgatactaccgcaaaagtggcaggattgggcgagggcacaattaccgcacgcgaaggacttaccgacactaagttaagagtggttattgtccgtagcggaaatgttgcatatattgcaataaaggccggcggagagtggacgataaagacttgcgattataccgcaacatccgcttatgtatttttaagtagcgaaaacgtcaacggcaaaatcaccaaatttaccgtttccaaagaggcggcagacgttaccgccgcgcttaccgaaataggtaaaaacgcctgaataattaaaaaaaggtaatgacaaacgacttccgtgtttttccgcggaagtcgtttttttgcccaaagctttatactcacgaaatttttttgcttttgtaaacgaaaaaaagggtggatattttaatttattaattgaatatcgtcgtttttaataaaataatttttttccgttatatcagaagaatcggaagtttcatttataacgtatttatcgatttttcagtagattagtccatattctttttgattataaatagtttgaccccttgtgtttcttgaggataaaagtgggggtcaatcttatttattgatattttcagcaatacaaaagctcctccattgtgcggacaacggaggagctttattttgtaacgatttttatcggtttttataaggtttaagggtgtacccgtttgttttttaaaggctcatgctgcggaaattaaaattttactttatcggtaaagtattccgcaaggctttccacaggtatgcgcacctgctgcatagtgtcgcggtcgcgcacggttacggcaccgtcctcgagtgtgtcgaagtccacggttacgcaccagggagtaccgatttcgtcctgacggcggtagcgttttccgatactgccggcggaatcgtaagtgcaggggaagtgcttgataagcgatttgtaaatttcgtcagctttttcggaaagatttttctgtaagggcagcaccgcgactttgtaaggcgcaagataggggtgaaggtgcagaacgacgcgcacgtcgccgccctcaagctgctgctcctcgtaagcgttgcaaaggaatgccaaaactactctgtccgcacccaaagacggctctatgacatagggcacgtatttttcgttggttacggggtcggtgtactccatggatttacccgattttttgatatggcagttaaggtcgtaatccgtcctgtcggctatgccccaaagctcgccccaaccgaaggggaacaggaactcgaagtccgtcgtggctttggagtaaaagctcagctcgtctttttcgtggtctcttaagcgcagtttttccttatcgatgcctaaagagtacagccagtcgcggcagaaagcgcgccagtaatcgaaccattcgaggtcggtgccgggcttgcagaaaaattccaattccatctgttcgaattcgcgcgtgcggaaagtaaagtttccgggcgtgatttcgtttcggaaggatttgcctatctgaccgacgccgaacggcactttactgcgagtggtacgcagtatgttgttgaagtttacgaatatgccctgtgcggtttcgggacgaagataaacggtgtttgcgctgtcctccgtgacgccctgaaaggtcttgaacatgaggttgaatttcttgatgggcgtaaattcggatttgccgcagacggggcaggggatattgtgctccttgataaacgcttcaagctgagcgtccgaccatccggcgactttgacgtccattttttttcttgcgacaaagtcttcaacaagattgtcggcgcggtgacgggtgcggcagtttttgcagtccataagcgggtcggaaaatccgcccagatgtccgcttgcttcccaggtcaaagggttcatcagtattgcgcaatcgacgcccacgttgtattcgttttcggtgacgaatttctgccaccaggcgcgtttaacgttgtttttaagctccaccccgagaggaccgtaatcccatgtgtttgcaagtccgccgtaaatttcgcttcccgcgaagataaaacctctgcctttgcaaagcgcggtaagtttatccattgtcagtttgccgttagccataaaatgctccttgattttgcgtgtgaaataataataaatagttttttattttttgtcaagtataatcacactcccgcctttttttcatattatgacagtaggataatccttgaaaaaccgcgtgcggcacaaaagaagattcgattaactttaagacgaaaaaatcgttaaaggcgtaagggggcggggacggccgacccgaccctgaagccttaaaaatattacaaggaggaaagagacttatgttcaacaacggatgcggatgcggcaacgacattttccttattctcatactgctttgctgctgcggcggcggaaaagactgcggctgctacgaccgcaaaggctgcgactgctgcgacataatcgtatggttactgcttcttaactgcatttgcggcaaaaacgattgctgctgcaagtaaggttttatttttttacataacttaagataaaaccttcgacttgcaaaagaaaaaacacgggtccgtagtagaaaatacgtcggacccgttgtcttttttttctaaggcataaataagatttttcgtaaagacaaacattttacgattttacttgatttaagccgagaattgtgttaaaataatcgcgtaaattcccgccgataccctgaacggatcggaccgagtgtttaactatcaaacgtgcgggttattctttttagaaagcccagcaaaggagcaaaaaatgaaaagcaattcaaaaaacatcgtggcttttgccacactcggcgctctgattttcatcgccatgacccttgaccgcgcaattacgccgtttttgccgctgtccgccgcgtttataacgcttacggttacgtttacttttgcgcttgtaaggcctaatcttgcgctgagcctggcggccgcgcttattttcggactgtcgtcgtgtatcacggcgatatttttcggaaaggagtcggtaattaatccgcttatttccgtattgcccagatttttactcgggtttattgttttcggcgtttatgctcttatgcgccttatccttaaaaaggccgcgcccaaaacccgcgaaaccgtatctttagctgtggcaagcggagttacttccgcgttcaatacggtgctgtttctttctgccatggtgttattcggagaaaacaatacggtggcaagccttttcaagataaccgtacttgcaaacgccgtgcccgagttggttttgtcttcgatacttgtacccgtagtcgtacttgcgctgagaaaagccatgaaaatcgacgtggataaaatgccggcaaaacaaccgcgcgaggcttactcgcctttaagcgaaacttccgcggcatccgataattcgtcggtttcggaagaaaatacaaacgaaagtgcggttgcgactgaagcggtcaacgcggaagaagacgtcaaaaaagattcttcggacggaaaataaaattcggagggcaactctattataatgattttagtcgtagacataggcaataccaacattaaactcggtatattcgcggacggggagcttaagtattccacgcgtttatcttcttccacgcataagaccagcgacgaatattatctttccatcaaggacctgttcgaaaccaagggaataaagttttcggacatttcgggcgtaatcataagcagcgttaaccccaatcttaactacacttttgagcatttgataagcgtatatttcaaagtcaagcccatgatagtgggaagcggcataaaaacggggcttaacattaagtacgacaatcccaaggaagtgggcgccgaccgcatagttaattcggtaggggcgtaccgcacttacggaggtccgtgcgtagtcatcgactgcggtactgcgactactttcaacgtaataaccgaaaaaggcgaattttcgggcggtgcgataagtttcgggcttaaggcaagcgcggacgcactttgtcagaaggctgccaagcttccgaaaatcgagcttgtaaagcccgagcgggtaatcggaaaatccaccatcgcaaacatgcagtcgggacttatttacggctatataggcatggtcgaatacatcgtaaaaaagcttaaagaggaaatggggtgtcctgacgccaaagtaatcgcaaccggcggcttaagcgaaatagtaagctccaacagcgacgtaatcgatattgtggatcgaacgttgacattaagaggactgtatttattgtataaactcaacagcgagcagggaggtaaggaattatgaaaaccgtctatgttgccataatgggactgggtacggtcggcggcggcacttatcggattttaaccgaaaatcacgataaaatagcgtccgcttacggcattgacatccgtgtcaaaaaggtgcttgacaaagaccttgaaaagcttaaagccgcaggcgttgaaaaaaacgcgatgacggacaagcttgaggatattttgcttgacaaggacatcactatcgtagcggaacttatgggcggggtggaacctgcaaagacctttataacaaaggcgcttaaatcgggcaaaagcgtggttaccgcaaacaaggaacttatctccaagcattggggagaactggagacggttgcgcgagaaaacaacgtcggactttatttcgaagcttcgtgcgtgggcggcgtgcctataatccgtactctgaaggaaagcctgcagggcgacaatatccttatggttatgggtataatcaacggtaccaccaattacatacttactaaaatgagcgattgcggaatgagttacgacgaggcgcttaaggaggctcaggagctgggctttgccgagttcaatcccactgcggacgtggacggatacgacgccatgtacaagctttccattctgtcttcgctggctttccatacctgtattccttatacaagcatctatcgcgagggcattactaaaatcacgaaaaacgacattgcaagcggcaaacaaatgggttacacgcttaagcttctcgccataggaaaacgcgagggcaacagcgtggaagtcagggttcatcccacgtttgtgcgcgactctcatccgcttgcgtcggtgtcgggctcgtttaacgcagtgtttttaaaaggcgatttcgtggacgacgtaatgctgtacggaagaggagcaggcgcgcgtcccacgggcagcgcagtggtcagcgacatagtttactgcgcgggtaaggacaagcacgtgcacaccgattttgaaaataacggaaaagttacctcgggcatagagataaaatccgactttttcagcaaatactatattgcgcttacggtggaagacaaggcgggcgttcttgccaagattaccgacgtgtggggcaaaaacgacgtcagcataaactccataagtcagcgcgacgtagcggacggtgtcgcccccataataataatgacgcattttacatccgaaaacgccgtgcagaaatccatatcgcagctaagcaaactcgactgcgtgaaaaaagttgattccattataagagttatcgattgatttcacatattttttatcttagccgcgaataatatctttgcaattttccccaaaagtatttgacaaagatagggtaagatagtataattgatacgttaaactgtaaattcaggaaaaaacattaggagaacatagttaaatgaagagaaagaagagctttctggccggactttgtacgcttattttggccgtttcgcttgcattcggcggattcgcatatacacccgcttatgctgccagcaccgattttacgcttaacaacgttaaaattcaatccgaagtttcttacggcgacgcttttgctgtacctgcaaacaccggattcgacgtttccgtgactacgcccaacggcaccgtccttacctctcagcctgacggcggtttggtagcccaggattccgtttacaacgtaaccgcggacgagcttggtcattacaccgttactttcaccaagtcgggcatgtcctacagctttaaagtgttcagctctcttgaagaggagcttcagctttttgtgcgtaacgaggcgcaaatccccacttacgtgaagaccggcgacgaaaagaaacttcccgccgcttatatcggttattacgatgaggacggcaaagtggtggaggttcccggcaccgttaccgttactaccgataccggcgttgccgttacccccggcgagaacttcaagttcgaaaatgcgggcagcactttcatcgtttacagcgcgaaagtcaacgacggcaagaagtatctttccaaatcttacgaagttaaagtccaaaacgactttaccgataccaaggcgcccactctttccat

SEQ ID NO: 808 - DNA, 11019 bp, Unknown
  16S sequences of unknown bacteria
gacatgatcgtcaaaaacgaaaagcgtatgttgcaggaagcggtggacgcgctgatcgacaacggccgccgcggcaaggcgatctcgggtccttccaaccgcgaactcaaatccctttcggggcttttgcgcggcaagcaggggcgtttccgtcagaaccttttgggcaagcgcgtagactattccggccgttcggtcatcgtcgtaggccccgaactcaaactgtaccagtgcggtctgcccaaagaaatggcgatcgaactgttcaagccgttcgtgatgaaaaaactggtcgaaagcaaccagtgccacaatatcaagagcgcgaaacgcaccgtcgaaaaggcgaaatccatcgtttgggacgttctggaagaggtcatcaaagagcaccccgtgctcttgaaccgcgcgccgacgctgcaccgtctgtccattcaggcgttcgaacccgtgctcatcgagggccgcgccatcaagatccacccgctcgtctgcggcgcgttcaacgccgacttcgacggcgaccagatggcggtgcacgtaccgctctccatcgaggcgcaggcggaagcgcgttttctgatgctttcctccaacaatattttgaaactttccgacggcaaacccgtcatgagccccacgcaggacatggtactcggcgcctactatctgaccattatccgcagatacgacggcaaaaagtacaacgaaatgcacgatgaggacgaaaacggcgaactgtaccgcgcgggcatctattcgtccacggacgaggcgatcatggcgtatcagaccaagaccatcaccttgcaggacgagatctgggtcagaaggaccgtgcgcatcgccgacgaaaagagcccgtattacgggcaggaagtgacggggcgcgtcaagacgacggtcggccgcatcatcttcaacgaggcgatcccgcaggatctgggctttgtcgagcgtgcggaaaaagaggattatatcaaatacgagatagacttcctcgtcggcaaaaagcacctttccaagatcgtagacaaatgctttaaaacgggcggcgcgcccaaggcggcggacgtgctcgacaaggtcaaggcgctcggattcaagtattccaccatcggcgcgatcacgacgtcggtgttcgatatgcacattccgcccgaaaaacaggcgaagatcaaggcggcggaagacaaagtcgcgcagatcgaaaagaaattcaaccgcggtcttttgaaagaagaggagcgctacaacgcggtcgtttccgtctggaaagaaacgacggacgaagtgaccgcccttttgaaaaacggactggacgaattcaaccccatctggatgatggcgaactcgggcgcccgcggttccatcgaccagatcaagcaacttgcgggcatgcgcggactgatggtcaacccgcagggtaaaatgatcgaaattcccgtgaaatcgtgcttccgcgaagggctcaccgttctggaatactttatttcctcgcacggcgggcgcaaaggcttggcggatacggcgttgaaaacggccgactcgggttatctgacacgccgtcttgtggacgtttcgcaggacgtcatcgtgcgcgaagacgactgctgcgcgggcaaaaagccgcgcggcatgaagatcaccgcgatcacgggcgacaacggcgatatcatcgaagggctggaagaccgtcttgcggggcgtttcgtttccgaagacgtcgtggatcccgcgacgggcgagatcatggtccgccagaacgagatgatcaccgaagatatggccaaagccatcgtcaaggcgggcatcacggaagtcgccgtgcgcagcatcttcacctgcacggcgcgccacggcgtctgcgccaagtgctacggcaaaaacatggctacgggctcgcccattcaggtcggcgaggcggtcggcacgatcgccgcgcaatccatcggcgaaccgggcacgcagctgaccatgcgtaccttccatacgggcggtatcgcggcgacgggggacatcacgcaaggtcttccccgtgtcgaggaactgttcgaggcgagaaagccgaagggcgtcgcgaccatctgcgaagtttcgggcgtggcgttcatcaacgaagtggacaatcagaaacacatcgtgatccgcgacgagtttgcgggtacggaaaagaaagaatacgtgctgcctttcaatgccgaattgaagatccgttcgggcgagaaagtggagccgggcacacagctcaacgcgggttccgtcaatccgcaggacattctgcgtatacagggcgtcaagggcgtgcaggactacattctgcacgaggtgcagtcggtctaccgctcgcagggcgtggatatcaacgataagcacgtcgagatcatcgtccgtcagatgatgagaaaggtacgcatcgaaaactgcggcgatacgcagatgctccccggcgaactggtcgatatgttcacctttgaagaggagaatgaaaagaccatccagagcggcggccgtcccgcgacggcgaaacgagtgctgttgggtatcacgaaagcggcgttgtccaccgattcgttcctgtctgcggcgtctttccaggaaaccgcaagggtactcactgaagcggcgatcaagaacaaggtcgacccgctgatcggtctgaaagaaaacgtcatcatcggcaaactgatccccgcgggcacgggcatgcgcgattacaagaacgtgagtccccagatcacctcgggacaccgcgacagcgacataacccttccttctctggaagaagagatcgccgtcgaataaacgaaccaaaaaaggctcggcgcttttgcgccgagccttttgatatttaatattcttttaaacctaaaatatagtccgccgaaacgtccagatatgcgcaaagccttgcgagcgtatccaacgcgggaagagaagtgccgtgcatataactggaaatagcggattgagatacgaatacattttttgctatttgtttttgggagatatggctgtccgaaatcgcttcgcgcaatctttgtgaaatgaattcaaattcgctgtttactttattgcttggtctcatgattcaattttagcgcaaaactttataaaattcttaaaactcgtatattggttgattttcaaaaaaagcgaacctaaaaagacgcctctttcttttatgataaaaaataatcaaaaaaattttccaaaatatgccacaaatagtttgacaaatttcgcaataatctgtaaaatataaaataattttttatatattttttacaaaaattcacgaaagatggggagatgaaatgaaaattgcaattatagaagacaacagtttgatggcggaaatgctcaaagatatggtaacggagcagcccgattgggaactcgtcggtatcgcggataacggcgacgacgggatcggactgatccgcgcgaagcgccccgatatcgtccttttagatctgatcttacccaaatcggacgggttcttcgttctcaaaactatccgcgcggaaaacattcccgtgaagtttctcgcgctgagcagcctcaacgacgacgggctcatcgaaaaagcgctccgttacggcgcgtcttactatatgatcaaacccttccagttcgaccaactcaaagaacgcatctgcgacgtgacgggtatggctttccacagcgctcccgcggcgggcgcagccgctcatgtaaaatcactggacgaaaagttgtcggatatttttttacaactcggcatgcagatcaaattgcagggctttcatttcgtgcgagattgcattaagatcgcggcgcgtcggcccgatactcagaataatatgaaatctttgtacgacgaagtgggaaagatttacggcaaagccgccgaaaaagtggagcgctgtatccgtcatctcgtgctcagcgccattaagagcggaaaattcggtacgatcaacacctttttcgccgccgacgtttacacgccgcccgaacgtatgaccaacgcgcatttcattgccctttgggctgacaaaatacgcatgaactgtctttaatatttcatcccatgtcgatccgcgcggctgtgccgcgcgatttttacatttcgacggtgcgcgtcgcaactgctttgcaaaacgccgcgtcgtgctcgacaaagagcagtgtagggcgatattcgagcaaaagttcctgtatctgcatacgggaaatcacgtccagaaagttgagtggttcgtcccacacgtacaggtgcgcgctttgggaaaggctcgccgccagagctaccttttttttctgtccgtcggaaaaggacgcgacgggagagccgaacagttcgcttttaaaatcgaatttattgaggatcgccagaaactgcgccgggtcgacgcaaaggctttctgcgtaacgcgcgggcgtcagcggtgaatcgggcagcgtttgcggcagataggagatgacgagatcgttcggccgcgaaatttcgcccgcgtcgcagcggatctcacccgtcaacaggcgcaataccgtcgattttccgcagccgtttgcgcccgaaagccgcaccgcctcgccgcggcgcaccgcaagggaaaagtcggagagcacttcccgttccccgtaccgcacgcgcacgtgcgaaagcgcgcatacggtttccgcgcgatagggaagcggggacaatttcaaatttcccacgaattcggcgtccttcaagagcgagcgcttttccgcggcggcgcgctctttctgccgttcggtcgattttgcgcgcttcatcatcttcgccgccatcgcgcccacgtgtcccttgtcgggtttcagacccgccgttttttcgtttttgcttttctccacccgttcgccccactctttggtgcgccgcgcggactgttccagcgccgaaatttccgaacgcaagcgcttgttttccgtccgttcgttgtcttctctggcggctttatccgcaagataggcggagaaatcgcccttgcgcacctcgatgcccgtgcggttgagcgaaaggatatggtcgcagaacccgtccagaaaggcgcggtcgtgcgaaacgacgataaaaccgctctttttccgaaggtatgccgcaagcatttcgcgaccgcgttcgtccagatggttggtaggctcgtccacgagcagaaacgcgttttctttcaggaacatggcggcgatcatcgcctttgtcttttccccttcggacaaacccgcaaagggcgcgtacagcgcgttttcgtccagcccaagcgcgaaaagctcgcgcttgatccgccataacggggcgtcgggcgcgagcgttttgaacagttcttccgccgtgccgtaaggcgcgggataggggaaatactcgaatccgacgctcgcggatattttgcccgcggctgcgagccgccccgccagaatttttaaaaaagtggtctttccgcggccgttgcggccggtaaaaccgagtttccaatcggtgtccagcgtcagatctacgtcttcgaatacggtctgcgcgccgtaagaaaaggaaagcccccggatctgtatcatcgacatatttttacctcgcgatgtatgccgcaaaaaataaaacgccgcagcgacccctgcggcgtatctgactataaagggattctttcttgctgcaacgcacgaaaacaagcggcgcaacgtccgctctttttcgcaattcggttgttatctgcaagaaatgtacatgatttctcctttgtcgtttctgccgatattgtagcacgggaaaataattttgtcaatcaaccattgacaaacgcggaaatttggaatacaatgaaagtataaatcgcaaaggagacgaacatgaaaaagtttttatctttggcaaccgcgctgttactcgtcggcgcgctcgcaattttcgcgggctgcggcaaaggggagcggtcgggcgtcatcaaaggaaattatacggagccgaccaaagccgaactgcaatccgcgctcgacgcgatagacacggagaaactgttgggcgatacggaggcggaaggctggaagacggggatgtcgctgggcgcaaacctttcctatgaaatgagcgcggcgggcgaaaaaatgagtatgtcgttcgatctgtcgcataagatctccgcggaatccgcgcaggatgcgctcgatctgaaaggagagggcagcctcgcgctccagaccaaccttgcgggcgaaaaagaaaaatataccgtcaagacctacaacgatatgaaaaatatttatctggacgcttcggcgcatgcgaacggcgaaaatcaaaacgcgaaagtccgcatcagcattgcggacatattcgacggctacggcgatatgctgccgatcgaacccgtcggcccgaccgacgcggcgttgccgaccgacgcggacgcgcttttgaaagaactggcggacagcggcttcacgctcgaaatggatacttccgacggcatcaagataaaactgaccgcgaacgagagcgtctttacggagatcttagagggcgtgaacggctcgcttccctctacgggcattcccgcgacgggcgagtatttctctttctcgaaagattcttatatggaattttatctgcacgtcggcgcggacggccttctgaaaaaggttaccgcgagaatggatctggacggcgcgttcgatttttcgggactcggcgacgcggccgccgaagcgctcggcaaaatgacgatgcgtatcaaaggcgcgttcgaactggagatcggcgaagtttccgtttcaatgccttccgatctttcggattatcaagcatacaattaaatcataggaaagaattgccggcgcggttcgcaaaaatgcgaaactgcgccttttttttgcataaaaaccgccgaagtcgctaatttttgtttcaaacgtttgacaaagaggggctgaaatgctaaaatataccttgcgaccagtgcgtaaagggttttgcgcgcctaaaataaggcaggccgccgaaatttgcttctgaaattgcgtaagggcaattttaagagatattccaaatactacaaggaggtaaatcatgcctacaatcaatcagctgatcaaacacggcagagagaaactcacttacaagagcaaatctccgatcatggagcaatgccctcagaagagaggcgtatgcctttcggtgagcaccacttctcccaaaaagccgaactcggctatgcgtaaaatcgcgagggtgcgtcttacgaacaagcaggaaggtaccgtgtacattcccggcgaaggtcacaacctcaacgagcacagttccgtattgatccgtggcggacgtgtcaaggatcttccgggcgtccgttatcacatcatccgcggcgctctcgataccgcaggcgttgccaagagaaaacaggcccgctccaaatacggcgcgaaacgccctaaataattctcggaatcatgcgacgggggaatttccccgcgaccctacttgtcggaatataccttaaaatatgcccgattgaaagtaggcagtacgccgaaaggcggaagattcgctaccgcgtccgcggcaagcgatagctgtactgagggtatttaaaaacccttacgaatcaattcaaggaggaatcaagttatgcccagaagaggcaatgtcccgaaaagagacgtcctgcccgatcccgtatacggcagcaaggttgtgaccaaactcatcaaccagatcatgctcgacggcaacaaggctacggcgcagaaaatcgtttacgacgctttcgaaatcatgaaagccaaattaaatcaggaacccatcgagatcttcaaccaggccatgaacaacgtgatgcccgtgctggaagtcaaagcccgccgcgtcggcggtgcgaactaccaggtcccgatcgagatccgtcccgaaagacgccagactttggcgatccgctggctggtcatcaatacgagaaagagaagcgagcgcgaaatgtccaaaaaactcgcgggcgagttgatggacgcgttcaacaacaccggcggctcggtcaagaaaaaggaagatacgcacagaatggcggaagcgaacaaggctttcgcgcatttcagatggtaaaaggagtacactatgcccagacaatttgaccttgcggttaccagaaacatcggcatcatggcccacatcgacgcaggcaaaacgacgacgaccgagcgtattctgttctataccggcaaaacgcataaattgggtgagacccacgaaggcgccgctaccatggactggatggtccaggagcaggagcgcgggatcaccattacttccgcggcgactacgtgtacctggaaaaatcacaggatcaacattatcgatacccccggacacgtcgatttcacggtagaagtcgagcgctcgctgcgcgttctcgacggcgccgtcgccaccttctgcgcgaagggcggcgtggagccccagtcggaaacggtgtggcgccaggcggacaagtataaggttcccaggatcgcgtacgtcaacaagatggacatcaacggcgcgaacttcgacaacgcggtcaaaatgatgcgcgagagattgggcacgaacgccgtgcgcattcaactccccatcggcaaagaagagacctttaaagggatcgtcgacctcgtcaacatgaacgccgaaatctacaaagacgatttgggcaaagagtacgaaagagtggagatccccgccgatatggccgaggatgccaaaaaatacagagcgatcctcgtcgaggccgtcgccgaacaggacgacgaactgatggagaaattcttcgaagacggcgatctgtctgtcgaagacctcaaaaagggccttcgtatcgccaccatcaagatggcggtcacgcccgttctttgcggttccagttataaaaacaagggcgttcagttccttttggacgccatcatagactatctgccctctcctttggacgtagaccacatcaaaggcatcaaccccgttacgggagaagaggaagagagaaaaacttcggacgacgagccgttcgcaggtctcgcgttcaagatcgcggccgatccgttcgtcggaaaactcgcgttcttccgcgcctattcgggcgtgttggaagcgggctcttacgtgtataacagcaccaagcagaagaaggagcgcatcgggcgcctcgtccagatgcacgccaaccaccgcgaagagatccccgagatctattcgggcgatatctgcgccatcgtggggctgaaagacaccgccacgggcgacacgctctgcgacgaaaagcatcccatcgttctggagcagatggagttccccgaacccgttatcaaagtcgccatcgaacccaagaccaaacagggtcaggaaaagatgacgctcgcgctcatcaaacttgcggaagaagatcccaccttcaagacctatacggacaccgaaacgggtcagaccatcatcgcgggtatgggcgaactgcacctggaaatcatcgtagacagactgcttcgcgagttcaaagtggaggcgaacgtgggtaaaccccaggtcgcgtaccgcgagactttcagaaagtcggtcgaggcggaaggcaaatacgtccgtcagtcgggcggtaaaggccagtacggtcattgtaaactgcgtcttgaacccaaggaacccggcacgggctacgaattcgtggacgaaacggtgggcggttccattcccaaggaatatatccccgccatcgacaaaggtattcaggaagccgcgaaaaacggatttttggcgggttacgaagtggtggacttcaaggtcgtcgtgtacgacggtagttatcacgaagtcgactcctcggaaatggcgttcaagatcgcgggctccatgggctttaaagaaggcttgaaaaaggcgaatcccgtacttttggaacccatgatgaaagtggagatcgtcacccccgaagattacttcggcgatctgatgggcaacgtatcttcccgccgcggcacgatcacgggcaccgaggacagaaacggcgtgaaagtcatcgacgccatcatcccgctgtccgaaatgttcggctacgcgaccgaccttcgttcgcgcacgcagggcagaggacagttcaccatgcagttctcgcattacagcgaagtgccgaagtcgatctccgaaaagatcatcggcgaacgcggcaaaaaagccgaataatggcgcttttctaaaaaattttttaaaaaaccctgcaaaaatattgaaattattttcgttttaatatataattgtaggtgcttgtataagctgctttatctaaataatgatagatagctgcaaaggccgggtttccggcggacaagttatcatttataaataagtataatttggaggaattaacaatggctaaggctaaattcgacagaagcaaaccccacgttaacgttggtaccatcgggcacgttgaccatggtaagacgactctgaccgcagctatcacaatggttatggcatgtaaaggtcaggcagcgaagatgaaatacgacgagatcgataaggctcccgaagagaaggctcgcggtattacgatcaacacttcgcacgtagaatatcagacagacaaacgtcactatgcgcacgttgactgcccgggacacgccgactacgtcaaaaacatgatcaccggtgcggcgcagatggacggcgcgatccttgtcgtggcttccaccgacggtcctatgccccagacccgtgagcacatcctgctcgcccgtcaggtcggcgttccttatatcgtcgtattcatgaacaagaccgatcaggtcgacgatcccgaacttctggaattggtcgaagaggagatccgcgaccttctcacgaagtacggcttccccggcgacaagacgcccatcatcaagggttccgctttgaaggctttggaaaaagcgacttccggcgcttccgatgcggacgttttggctgctcccgagtgcaaacctattcttgaactcatggacgccatcgacgcttatatc

SEQ ID NO: 809 - DNA, 8405 bp, Unknown
  16S sequences of unknown bacteria
gcgtcagcaggaaaatcgtgttgtgggcggggtcatcgcccgggttgagcaggttgagccccggcgcggcgatggaccagttgttgtgcttgcccgagccgttgatgccgtcgaagggcttctcgcggatgaggcagtacagcccgtggtgcggcgcacaggtgcgcagtgtctccatggtgagcaggttgttgtcgaccgccgtggtcgaacgcgagaagatcggcgcgagctcgtgctgcgcgggcgcgacctcgttgtgcttggtccgggcatcaacgcccaggcgccacagccggtcgtcgacctctttcatgaaatcgctgaccgtctcgcggacggcgccgaagtaatgctcctcgagctcctggcccttggcggggtgcgcgccgaacagcgtgcggccgcacaagatgaggtcggggcgcttgcggtagtcgtcaagcgtgatgaggaagtactcctgctcggcaccgacggtcgtcacgacctgcggcacatcgatcccgaagcacttgagcacgcgcttggcctgctcggacaggcacttcatcgagcgcagcagcggcgtcttcttgtccagcgcctcgccgttgtaggagatgaacgccgtcgggatgcacaggacctcgtctttgatgaaggcatagctcgtcgggtcccacgccgtgtagccacgtgcctctgccgtttcgcgcaaaccacccgacgggaacgacgatgcgtcgggctcgccctggataagctctttgccggaaaacgatgtgatcgcggtaccgtctcccatggggtcgatgaacgcatcgtgtttctcggaggtgagacccgtcagcggctggaaccagtgcgtgtagtgcgtcgcgccgttctcgaccgcccagtccttcatcgcgtgcgcgaccgaattggccacgtcctcgtcgagctgcgtgccgttttggatggtctcgtgcaggctcttgtagatgggcttcggcaagcggctacgcatgaccttgtcgttgaagacaaggctcccgtagatcttgctgatgtcttctgccatatagaaggctccttagttcttctcggctgtctgtttgaaagcacgcacacactttaccgcttggaaagcgcgagacgggcggcatgcccgcacctgagcccaaatgcgcaaagaaaccaatgaatgtcatttgccagcaggcccaaacgccgtctcggccatctgctagagtgcaagaccgtcattccgtaaagcaagaaggggccctcatggcatccgaccaaatcgtcatcaagggtgcgcggcagcacaacctgaaaaacatcgatctttcgattccccgcgacaagctcatcgtcttcacggggctgtccggttccggcaagtcgtctctggccttcgacaccatctacgcggaggggcagcgccgctacgtcgagtcgctctcgtcgtacgcacgccagttcctcgggcagatggaaaagcccgacgtcgactccatcgacggcctgtcccccgccgtctccatcgaccagaagacgacgagcaagaacccgcgctcgaccgttgcgaccgtgacggagatctacgactacctgcgcctgctctacgcgcgcgtcggcgtaccgcactgccccgtgtgcggccgcgtcatcgagaagcaaacggccgaccaggtggcggacaaggtcatggcgcacggctccgagggcgacaagctcatgatcatggccccactcgtctcgggcaagaaaggcgagttcgtccagaccttcaaagaccttgccaaagagggcttctcgcgcgtgcgcgtcgacggcgaggtgcaccgcctggacgaagagctcaagctcgacaagaagtacaagcacaacatcgaggtcatcgtcgaccgcatcgtgctcaaggagaaatcgctcgcgcgcctcgtcgaggccatcgagacggcaacggcgctcgccaagggcaacgtgatcgtcaagaacctctccgaagacgagaacctcgaggtggagagcacgcaaggcgcaaaggcagcggccggaatcgccaacgagtactccttcagcctcgcgctcgcctgccccgaccacgactactcgctcgacgagctcgacccgcgcgacttctccttcaacgccccctacggcgcctgccccgactgcctgggcctgggcttcaggcagggcgtcgaccccgacctcgtcgtccccgacaagtcgctgagcgtcgccgagggggccatcgcgctgtggagcccctcgtccaactactacccgcaaatgtacgccgccgtgtgcaaggaggtcggcgcatcggtcgacacgccgtgggaggagctttcggccaaggcaagaaaggcgctgctctacggcctgggagacaagcgcatccgcatcgactacgtgacgcgcgatggccgcgacacctactggttcacacgctggccgggcgttttggcagagatcatgcgcaagcacgacgaaagcgacagcgaccgcacgcgcgagcgcctcgaagagtacatggccatcacgccgtgcgacacctgccacggcagccgcctcaagccagagatcttggccgttaccgtcggcgggaagaacatccacgaggcaacggagctttccgccgcggacgcgctcgagttcttcgggtcgctcgagttcggcgagacgcaagccatcatcggcaaccccatcatcaaggaaatctgcacccgcctgcagttcatggtggacgtcgggctcgactacctgacgctcgagcgcccgacggcgacgctttcgggcggcgaggcgcagcgtatcagactcgcgacgcagatcggcgctgggctcatgggcgtgctgtacatcctcgacgagccgtccatcggcctgcaccaacgcgacaacgagcgcctcatcgaaacgctccagcacctgcgcgacattggcaacaccgtcatcgtggtcgagcatgacgaggagaccattcgctgcgccgactacgtcgtggacatcgggccgggcgcgggcgtcgcgggcggcgaggtggtcgccgtcggcaccccagacgacatcgccgcctgcgagcgctccatcacgggacagtacctgtgcggcaagcgctccgtgcccatcccggccgagcgccgcaaacccaagcgcggcaagatcacgctttcgggcgcgaaggagaacaacctcaaaaacgtcaaggtcgacatcgagatcggcacgctcaccgcggtcacgggcgtgagcgggtcgggcaagagctcgcttgtcaccgacacgctcgcccccgccatggcaaaccagatcatgcacgcgcacaagcgcgtcggcaaataccgcaagctcaccggcctggaggccatcgacaaggtcatcaacatcgaccagtcgcccatcggccgcacgccgcgctccaaccccgccacctacatcggcgtctgggacgacatccgcaagctgtacgcgagcctcccggaaagccgcgcgaagggctttgggcccggacgcttctcgttcaacgtcgccggcggacgctgcgaggcctgcaaaggcgacgggcagctcaagatcgagatgcacttcttgcccgacatctacgtgccgtgcgaggtgtgccacggcgaccgctacaaccgtgagacgcttcaggtaacctaccggggcaagaacgtctccgaggtcttgaacatgaccgtcagcgaggcggtgggcttcttcgagaacatccccaacatcaaacgcaagctgcagacgctcaacgacgtcgggctggggtacatcaccctcgggcagcccgcgacgacgctttccggtggcgaggcgcagcgcgtcaagctcgcaagcgagctgcaaaagcgccagaccggcaagacgttctacatcctcgacgagcccacgacgggcctgcacttcgaagacgtgcgccagctgctcgaggtgctgcagcgtctggtggacgcaggcaacaccgtgctcgtcatcgagcacaacctcgacgtgatcaaggcggccgaccgcatcatcgacctcggtcccgagggcggcgagcgaggcggcaccatcgtcgccaccggcacgccagagcaggtggcgacgatgcccgaatcccatacggggcgtttcctgaaagacctgctcgcacagtaggggcagcgcatggccccgcccgcttggacgacgagctcgccgcccaagcgggcgggatttcatattccgcaccctttgtgggataatgcggcgtatgtatacccgcgataacagattcgtgcgcatcctgacgattgccctgatcgcctgcttcgccctcgtcgtcgtccagcaggtcgtcatcatgatcgtcggtggccgcactgcgcaagcgcaaagcgatctgagctccctgcagtcgcaggtcgcagacgcccagtctcagaactcccagatgcagcagcaatacgacgagaagctcatcgagtggcgtaacgcgcagggccgcctgtccttcctgggcgacggcagcggcaaggtcgcctacctcaccttcgacgacggcccctccaaggccctcacgcagaaaaacctcgacatcctcaaggaaaagggcgccgtcgcgacctggttctgcctggcaaacgaccagacctacacctacctcgacttgaacctgtgcaagacgatcgaggatcagggcaacgccgtcggcatccacgactgggaccagaacgactcgtacagctactacaagggctcggtcgacgactacttcacgactgacttcgacaagacgaaggacaagctcgagcaggccgtcgggcacgagatcaagatctgccgctttgccggcggaagccccaccatcggctactacaacaaggccaacaagacagctctgccgcaagaggtcatcaagcgcggttaccagtacttcgactggaacgtgctcgccggggacagcgagccttcgcagttcgtgaacgggcacacgcccaccgaccgtatcgtcagcaacgtgctgggcgaggccaagggctttgccgagacgaactcgcccatctgcgtcctcatgcacgacaacccgggcaaggagacgaccaccgaggcgcttccgcagatcatcgacgggctgaaggacctcggctacacgtttgccacgctcgactacgacacccccggcttctaccagttggtgatctcgtgatggcagaccgcagatactcgcaacacggctactcccgcaatccgggcggtcagaggcgctccggcgccccgcggccatcggacttcggcgccggaagcggacagcagcgccgtcgcggcagcgcgccgtcgtattccacccgcagcagctcgcctgcaccgggcaggcagcaccgtcccgcgcagaacacgcgtcggcagcccacgcgcacgggcggaaacccctacagccgcggcagctaccagcgcaaggtggtgcgcgagaacggcggccaggcgccacgcgccggcagcgagtcgtatcgcagcaggcagctgagcgcccatgcccccaaggcgagcaactaccaggggcgctcccccgtccacgcgcacagcgtcgccgcctcgcaggaagtctcgcagcgcggactgattgcccgcatcgtcgtcatcgtcgtccttctgctggtactcgtcttgcgcttctcgggatgcgcgggctcggtcggcacgctcaacgacgtcaacacgcaggtggcagaccagcagtcgcagctcgacgacctgacctcgtccaacaccacgatgcagacgcagatggactccatgcagagcaccatcgacacctacacccagcgccagaacaacggctagcaagcggcaaggcgcgcttggcgccgcctgcccttggcgcggcctgcccttgacgactaccgattgtcttcggcgacgcggtacagcgcgttgagcacctcgagtgccacctcgagcggcgattccccctttgcaaccgggaccgagtacttctcggacttcgtgaagtagatcgcgcgcagtcgctcgagcacggcgcgcgactccttgttgcccatggcggccgccttgagctggttgcgcactggcttgatcacgaccttgccgccggtctgcagcacgctttcggcaccgatctctgacgcgagggccttcaggcgcgcacgcgtgcacatgttggccgcgggctcgggcagggtgccgtgggcagtccgcatgtcggtgacgatgcgctccgcgtcctcgacggttaccgccgccgcgagacggcgatagtacatgacgcgctcgtctgcagcgggcatgtactcttcggggatgtagaagtctaccgcggcatcgacgcggatgtcctggtgggcgatcgtctcctcgccacgcgtctccgagaccgcctcggcgagcatcgacgcgaacaggtcaaaaccgaccgcgctcatgttgccgctctgctcggcaccgagcagcgtgcccgcgccgcgaatctccaggtcgcgcatggcgaccttcatgccgctgcccagatccgtgaactctccgatggcctgtagacgctgggttgcctcttcggtgagcggcttgttcgcgggaaagaggaagtacgcaaacgcctggttggacgagcgccccacacgccccttgagctggtagagctgcgccaggcccagacgctgggaatcttcgatgatcaacgtgttggtgtgcgggttgtccaggccgctttcgacgatggtcgtcgcgacgagcacgtctatctcgcccgccgagaactgctccatgacggactcgatttccttcgggctcatctggccgtgcgcgaccccgatgcgcgcctcgggcgccgcctgctgcacgcgctcgaccgcatcgtcgatggtgcgcacgcggttggagacgtagtacacctgaccgccgcgctccatctcgcgtctgaccgcgccgctgacgatgtcttcgtcccactcccccacatgcaccttgaccgggcgcctgttgggaggcggcgtggtaatgagcgacatatcgcgcacgcccgaaagcgacatctggagcgtgcgcgggatgggcgtggcagacagcgtgaggacgtcgaccgactcgcgcagattcttgagctgctctttgtgcgagacgccgaagcgctgctcctcgtcgatgatgatgagcccgaggtttctcgggttgacgtcgcggctcagcaggcggtgcgtgccgacgagcacgtccactttgccctgcgcaaagccctcgagagcgcgcttttgctgggcgtcggtccgaaagcggctcagtacctcgacgtcgatgccgaagggcgcaaagcggtcgtggaaggtcgtgtagtgctgctgggcgaggatagtcgtcgggcacaagatcatgacctggcgtttgtcgctcacggccttgaaggcggcgcgcagggccacctccgtcttgccgaacccgacgtcgccgcagatgaggcggtccatcgggcggtcggattccatgtccgccttgacgtcggcgatggcggtgagctggtcgggcgtctcctcgtacgggaagatggcctccatctcctcctgccagaccgagtcgctggaatacgagaagcccttgaccgacgagcggcgtgcgtagaggtcgacgaggtcgaatgcgagcttcttggcggacttgcgggccttgccgatggcgcgggtccagtccgcggagttgaggcgcgtgaggcgcggcgacgagccatcggggcccacgtagcgcgtcacgcggtcgatctgctcgacggggacaaacagcttgtcgccctctgcgtaggcgagcagcaggtagtcgcgctcgacgcccgcaacctcgcgcttgaccatgcccttgaacagggcgatgccgtggctcgcgtggacaacgtagtcgcccggctgataggggaaggttatctcggtgatgtcgacatgccggcgcgacgtgcgctggttgccgcgctgcgagaggtcgcccagcgacagcacggccaggtgcgcgtcgcgggcgatgaaaccgctcgcgatgtcgacgtcggtgatgttcaagtactcggaggcaagcggggcatccgcgaagttgaggttttccacgaaggggaccgcgttgtcgccaaagacgagctcgatatcctcgcgcgcatgcctgtcggcaaccgagaacaccgtggtcacgccctctttgatgagcgagcgcacgagcgcgaacaggcgctcttccttgcccgagaggctccggcgctcgatggagatgtcgacgtccaccgcgccgcccacgcgcatgatggaaagcagggtcaggcgctgctggctcccaaagtccatcttggccggcaggctgaaaagcgattccaccacttcgggcttgatgcccgcctccttggcgcgcgccatgatctcgtcgtagcggcgcgaggcgtcgtcgaacagggagcgcggctc

SEQ ID NO: 810 - DNA, 7212 bp, Unknown
  16S sequences of unknown bacteria
gccatcgtttcgcatcaccgatttgctttattgtggttgtgcggtgttgccttaagttaaaggagaacccaaaatgaaaaagcaaatcacactcattctgctcgcggcagtcttagcctctacattcgcttgtgaaggcagacagaacgacgtcaccgacgaaaccaccgccggtgataccacaccggaggtcacgaccgagctcaccgacgggcttcccgacaagaacatggagggctttaccttcaacatccatcactcgacgcaggcgtcgatgagttgggtcaatctcgagctcgacgcggaggctgagaatggcgagtacctcaacgacgcgatttacaagcgcaatcagtacatcgaggagcgcttcaagtgcaatctcaacatcaccgaagcgcattgggacgacaacgcgagcaatttccgctcgattgtgatggcgggcgacaatccgtatgacatcttcttcatctacggcaaccgcgtcatgggcaatctcgactcaatcgccgacttcaacaacatcccgcacataaacctcgaaaaggattggtggaatccgctcgcgacgagcgcctacaatgtcggcggaaagcagattgccgccgcgggcaactacacgctctcctatctctcgagcgccggatgcttcatctacaacaagagaatagccgacgagatcaagactgagaacatgtacgacctcgtgagaaacggcggctggacggtcgacaagttcttcgaaatcgcgagaaagggcacgcgcgacctcgacggaaacggcgagtacgatgaaaacgaccagttcggcataatcagcgagtcggcgaaggcgttctatgactcaatgatcatcggctcggacattcactatctcgagagggacagcgacggctatccggcgttcacgctgaagacgaacgagaagggcatcagcttcttccagaagttagtgagcgtcatgaagaccgacccgtacatgtacttcgacgactcgaaggacgtcaacaacgcgacggacgctataaagttcgagaacggcaacgcgctcttcatgcgcaccagaaccaactacataagcaactaccgcaatatgcaggacgatttcggcatccttccgattccgaaatacgatgagaagcaggaaaggtacatcacgaactgcggcgtcggcgagatcgccgtcctcccgagaagctacgacgagagccgactcgacaatgtcggaatcctcctcgaggcgatggcgttcaagtctcagcagacggttgttccgacctacaaggaagtgcttctccagaccaagttcacgcgcgacgaggactcgggagagatgatcgacatgatcttcaatggcatcgcgttcgacctcgcgattgttgcgtatgagggtacgtttaccggtccggtcatgaacaacatcttcatcccgcgcgaggacgtcgtcgtctcgacgttcgagtcgatcgcgaacacgtttgattccgatctcacctcgctcaaggcagcggtcgcagaaatgccgtaagaccgaagtctgaaaataaatcttcgaaccaaacagtttcgaggttttcacgacataggggtgtgaattttgaaagccggcttgcccggctttcaaaattgcctcaaaactgtaagttagtatgaaaggtatgctcataaccatggcaaaaaagtcgaacatcatcaccttttcgtcgcgcggcttcgggcggacgcagagcgagatattggcgtcgctcggcaaaaaattcgaggaaatctcaaagctccgccccgatctcgtctgctttcccgaggagattctgatttcgggcggcgactcgttgaacccggattgggagcgcaacaattcgctcgcactcgagctctgccggactcaggcgaagaagctgcggacaaacgtagaggtctgcctcgaggagccgtccgaagcctatccgggcaagcgatacaacacctcctacctgatcgaccgcgacggctcgatactcgcgaaataccgcaagcggcacatcaccttccgcgcgatctcgcacgatggactgccgggcgagtcgattgtggtcgccgacaccgacatcggaagagtcgggctctcgacctgctttgacatcggctggcgcggcgactggcaggcactcgaggacgccggggcgcagatcgttgtctggaacagcgcgtatcacggcggaaagctgctgaacgcctacgccgccgtgcatatgtactacatcgtcacgtcggtctggaacgcgccgagccggataatcgacccgttcggaaacgacatcgccgaaagctccggctgggacgcgttcgcgtcggcggaggttgacgcgcgcgccgagatcttccacttcgaccaccacgaggacatgcttccgaagctccgcgcggagtacggcgaccgcgtttcgttccgtgtcgagccgcttgggaatatgttcgagctctctgtcgacgacccgctcacgcttgaggaggtcaaggaaaggttcggactcgtgaattaccgcgattaccacaagcaatcaaccattgataacgcaaagctcctcgcggagtatccggaggagtaggaaaatctgtatgaaaagactgacattttcgactttaggctgccccggatacaatccgggagagataatttcgctcgcgaagcgcttcgggtttgagagcgttgagcttcgcgggataggcgatgagctggatgtcgactcaattcattggcttcagcccggaaatctcggaagcacggctgatctctttgccgacgccgggataagaatctgctctcttgactgctcggcgtttctcgcaagacccggagcgaggatggaagagtgtgttttcgcgtcgcacgccgcggcgaaactcggagcgccgtatatccgcgtctttggcggaggctctggggaacgtgacattgacacagccgccaagcggacagacgagctctgcgtgctcgaaccgactgtcacggtacttctcgagacgcatgattccctcagcaacgccgaaccgatacgctcgtttgcaagccgcgtgaagcgcccgaacttcggcattctctgggacgtagagcacactattcgcgccggagtggactcggctgaattcgtctctgagttcgcgccgcttataaagcacgtgcatctgaaggactacagcgaatcggggctctgtctgccgggcgacggtcttgtcgacttctgcggaatacgcgacctgcttgagagcgccgggtatcaggggcttttctcgcttgagtgggagaagcgctgggtgaaggaactgcccgacatcgagcccgcgctcgagcggttcgttgaaatcatgatgtgaaatattcagtatatattcagaggcaactatggaaaattttgtaaatctgctgcgtattcccgacgatgtgaagataaagacgccgtcgactccgctccgattcgaggaaaaaggaatcgcgaaccccgtgaaagccgaggtgcgctttgagatcggcgactcgctgaaggtcatcctcgaggcgtccgagccggttgagtggataagactccgctttgacggcgatctcaggggcgtgaagtcggtgctcggcgacgcggtcgaacgctgcacggcgaatgatctcatctggtcggcaatgctcccgcacgcgcgcctgccttggtatttccacgccttcgacagcgagcggctcgattcatatggcgtgaagaccggcgcgaactccttcgcgtactttcagcccgacccggcggggataacgctctggctggacgtccggaatggcggctcgggagtcgagctgaccgagccgcttctctgcgccgaaattgtctgccggaaaggaatttccggcgaagacccgtttatcgccgcgcgcgaattctgcaaaatgatgtgcccgacgccgaacctcgcgaaatcgtcgctctacggcttcaacaactggtactgggcatacggcggaatcgacgaagcgacggtactccgcgagtcggaatatctggcgtcgctgacctcagagaacgccgcgagaccctacatggtcatcgacgacggctggcagatcacgcactcgaagggctacaacggcggacgatgggacgcgcagaacgagcgtttctcgccgatgaacgaggtcgcggcggcgataaaatcgcgcggctgccgcccgggaatctggctgagaccgctgcttacgatgcgccacgtgccgaccgaggcgatattcgcgtcgccgactcaggcggtcggaactgtgctcgacccgacgcatcccttcacgctcgaggcggtcggcgcggacatctcgcgtatcgcctcatggggcttcgagctgataaagcacgatttctcgacctacgacctcttcggaaacaacctatcgaaggtctcggggcatttttacgaccgctcgaagacgaacgcggcaattgtacgcgggctctacgggacgattcagaggagcgcgggaaacgccgtagtactcggctgcaacacggtcggacatcttgccgccgggattcatcaggcgcagagagtcggcgacgacacgagcggacggagttttgagtggacgcgccgccacggcatacactcgatgatgcgccttccgcagaccggcagcttctattcggtcgacccagattgcgctgcgttcacgccgaatgtctcgaaggagctggatttcgactttctcgaggcgtcggcaatcagcggctgcgcggtcttcgcgtcggtcacgccgggaattctgacgcccgacgaggagaagcggatgagcgcgattctcggcacggcggcgacgctcacacccgccgaatacgcgattccgaccgactggacgcacacgaccgcacccggcgagtatctgttccgcggcgaaaagcgttcctacgactggtaccgcgactaccgcggcgcgagaaatattctcacatggtttgaataattctgttgacaaatggatttggcggcgatataatatctttgaaatctaataacggacagcgcggtggaatccgtgcccgagctattattaataaaaggaaaaccaaaatgaaactcaatggcaaaaaaatcaattttctcggagacagcatcacagagggctgcggaacaagcggaaagggacatttcttctccgacctgatcgccgccgacacaggcgctctctgccgcaactacggaatcggcggaacccggatcgcacgccagcagaagccctcagccgacccgcgatgggacctcgacttctgctcaagagttgccgagatggacgccgacgccgatatcatcgtcattttcggcggaacgaacgacttcggtcacggcgacgcacccttcggaaatttcgacgataagacgtccgacagcttccgcggcgctttgaacgtgctctgcaccagtctcatcgagaagtaccccggaaaagtcatcgtcatcatgacacctctccaccgcagaggcgaggacagtgcccgctccgcctcgaatcccgaactgaaggcgtatatcgaggcgatcagaagcgcggctgagtactacagcctgccggtgctcgatctctacgctatgtccggactccagccgaatctcccggtcattcagcagaagttcgtgcccgatcagctccacccgaacgacgccgggcatcggattctcgctgaccggattatcggattcctcgagtcgctatgagaaggtatttactgccgataatcgctctgacggcgatgctgatgctctttgcctgctcggagaaagcggctgacccgatagtcgtcagcgaatgtgtattcatccgcccggacatggctgacgatacgtcgtcagcgcagctatgagcgtacacgcgtcgctgaaggagtacagcgtgccgataaagactgactttctctcaaagcgcgagaacgaagtccccgccgagcatgaaatcctcatcggcaaaaccaaccgtgaagaatcgctcgatgtgcttgattcgctcgacacgagcgaccccgacaaaatattctacacagttcttgccgtgaacggcaagctggtcatcatcggcgcgaatgacgagggtaccgctgaagccgcgaagctccgggcgatctcgatgacacacggtatttcagcgtctcagagcggctggatgcttacagaaaggagtacataaacaagatgaaggaaaatttcacggacatcacgaggttcggcaagataaataagctcaagttgtccttcaattcgccgcgcattaagcctgagagcggcgtccatccgcggctgatgttcagagccgaagacctcgaagtgataagggcgaacctcgaagcacccgagaattcgtatgcctacgaggaatacaaaaagcttgtcgcgactgagtgcgatggtgtgatcaagggtgaactcagttacaacgaaatcggcaaaatccttacaacgattgagtcaaaggctttcgagtacgcgctgaacggcgatccggtcgtcggctgcgacgcgataaacgcgatcgcgaacgtgatgctgaccgcgacatatagtcatattccggatagctcacgaccaatggggcaagtcatgatgactgccgccgaggtctacgactggtgctatgacctgatgaccgacgagataaaggcggcttttgtcgccgcgtgcgagagcatcgtcacgccgggcatggagatgggtttcccgccagcaaaacaaggaaccatatcaggccacggttctgagggacaagtattgcgcgactggctggcgttcgctatcgccacatatgacgagtaccccgatatctacgagttcgtcgctggcgaaatattcgacaagttcgtcccggttcgcgactattactataagtcgggcgcgatacatcagggcaataactacggtccgtaccgcttcaacttcgacttgtggtcagcgtggctttttaaggcaacaccgcacaaccacaataaagcaaatcggtgattcgaaacaatggcaaatagtgtagaatttccctgtgtccgtccgcacagggcgcacaaggtcagactgccgggcaaagcctgtcagccagaaccaagttcgccagcgcgaacagcatattcagtttggcggtctgttttcgcagaccccggtatcgcgttttcgcgaccctgtcaacctgattgtgtaaacatatcaaaaactaaatcataaatccca

SEQ ID NO: 811 - DNA, 13537 bp, Unknown
  16S sequences of unknown bacteria
taggtggggacggccaacatccgttatcgtgttttgccatggcgtgccgtggcaagtaaggggttgcgcccaacggcgcagcaaatagagtggtaccgcagagcgcttgtatgcctttgtctctagttgttttgaggcgagggctgtttttttatacagtggagacgggaaaaacggcgatatgcgggcgtatcgtgcggaggcataggcaaaattgagggggcggcccgggcggctgccggggaaacgagaggacgatgaagatgaagctgacaggtgcacagattatggcggaagtgctcttagagcagggcgcggataccgtattcggctacccgggcggggcagtgttgaatatctacgatgctttgtatgaatatcgggacaggatccgccacatcatgaccgcgcatgagcagggcgcggcgcatgcggcggacgggtatgccagggcaacggggaaaacggggatcgtaatcgcgacatccggcccgggcgccaccaacctggtgacgggcattgcaacggcgtatatggacagcgtgccgatggtggcgattaccggcaatgtcagcaccgatcttattgggaaggacagctttcaagaggtgtatatcgctggggtgacgatccccattaccaagcataattttatggtgcggcgtgtggaagagctggcgccgatcctgcgccgggcgttccaaattgcctcttccgggcgcaaggggccggtgctggtggatattcccaaggacgtgacggcggcggtcgcggagtttgtaccgaaaaagccgcagccggccaagctgaatttgccggaggtggagctggcagacctggtgcaggcggcgtcgatgattaaccaaagccggcgcccggtactctatttcggcggcggcgtagcggccagcggagcgggcgaggagctgagaaggctgatggaaaaggcggagatcccggcggtgcatacgctgatggctgcgggtgtgttaagctatgacgagccgatgaacctgggccttttgggcatgcacggcagccggacggccaacctggcggtagacagggcagaccttgttttggcggtgggtacgcgtttttccgaccgcgtggcgcaggataccaataaatttgcgcacgatgccaagatcatccagatcgacatcgaccagagcgaaatcaacaaaaacgtgctggtagacctaggcctggtgggcgatatcaagcaggtgctgacaaagctgctgccgcagatcgagcaaaagcagcatacggattggaagcagcgcatccaggcctggcgggcggaggattataagccggcggacgacgatacggtgctaaagccgcaccaggtgatcggaaagatctgccaaatcgcgggcgatgattccattttggtgaccgatgtgggccagcatcagatgtgggccattcaatactgcaagcgtgtaaagcccaacagctttttgaccagcggcggcctgggcaccatgggctacggctatggcgcggcgctgggggcgcaggtggcgtttccggaccggcctgtcatccacattacgggcgacggcagctttcacatgaacatgaacgaatgctgcacggcggtaagctacaatctgccggtggtaaccgtcatcatgaacaacacagtactgggcatggtgcgccaatggcaggcggcgttttacggagagcggtactgctctaccagcccggagaggaaaacagactataaggcggtggccgagggctttggcgccaagggctatcgcgtgacaaacctaaaggaatttgaacaggcgctaagagacgcgctggctagcaagcgcccctgctggatcgaatgccccatcgacaaggatgaaaaggtgctgccgatgatcccgccggggcagacgatcgatgagatcatcatggactgaggaggagaaacgatgacaaataaggtattgtccgtattggtatacaaccattctggcgtgctggcgcgcgtttccagcttgtttgccaggcggggctttaacatcgattctctgaccgtgtccgccacaaacgacccggaaatttcacgtatcaccatttcggtgcgcggggatgcgcaggtgatcgaccagatattaagccagacctttaagctggaggagacgaagacggtattttgcctggaagagggcaagagcctgtttcgcgagctgctgctggtcaaggtcaaagccacggagaccacgcgcagcgccatcagcgaggtggcccgcatctacggcgggcatgtggtggatctgtccgtgggcagcatgattgtagagctgaccggcattcccaccaagatagacgcgtttttgaacgtcatcggcgaatacggcatattggaaatgtgccgcaccggcgtcacggcgctggagcgcggcacgccggcggagcaccggtgcaaggaataaaggaccccaatattatcacctatataaaaaatccaaagaaagaaggatgtttgaaatgattcaaaaatactatgaccacgattgtaacctggggctgttggacggcaagaccgttgccatcatcggctatggcagccagggccatgcccatgcacagaacctgaaagagtccggggtaaacgtagtggtgggccttcgcaagagctctgccagctggaaaaaggcggaagaggccggcttgaaggtcatggaggttgatgaggcggccaaggcaggcgattttgtgatgatgctggtgccggatgagctggcggcggatatttacgcggcccagattgcccccaacctaaaggaaggcaacgtattgatgtttgcccatggcttcaacatccactttaacctgatcaaagcgccgaaggatgtagatgttatcatggtagcgcccaagggccctggccacaccgtgcgcagccagtatgtagagggcaagggcgtgcccagcctaatcgcggtataccaggatgtatccggccgggcgaaggattacgcgctggcctatgcctgcggcattggcgcgggccgcgcgggcattttggaaaccaccttccgtgaagagacggagaccgacctgtttggcgagcaggccgtgctgtgcggcggcgtcaccgaactgatgaaggccggctttgatacgctggtagaagcgggctatgagccggaaatggcgtattttgaatgcatccacgagatgaagctcatcgtagacctcatcaactccggcggctttgcgatgatgcgctattccatttccaacactgcggaatacggcgactaccgcaccggacgccgcctgattaccgaagagacccgcaaggaaatgaaaaacgtgctgcgcgagatccaggatggcacgtttgccagcgaattcatgcaggaatttggcgccgggcgcaaggccaaatttttggcgacccgccgtgtggaagctgagcatccgctggaaaaggtgggcaaagagctgcgcgatatgatgagctggctaaaaaaataagccattttgaaacgataagggaggccacacaggcatgcaactgagaagcgcaaatgtgacccagggcgtagagcgggcgccgaaccgctcgctgttctacgcgatgggatataccgatgaagaactcaaccgtccgctgattggcgtggtatgcgcgcacagcgaaatcgttccgggacatttccacctggataagatcgccgaagcggtcaaagcaggcatacgaatggcaggaggaacccccattgaggtgcctgccattggggtgtgcgacggcattgccatgggccatctgggcatgaaatacagcttggcgagccgggaactgattgcggacagtaccgagacgatggcattggcacattgctttgacgggctggtgttggttcccaactgcgataagatcgtgcccggcatggtcatggcggcggtacggctgaatctgccgtccatcgtcgtgtccggcgggccgatgctggctggcaacgtggcgggagagagaacgagtttgtccaagatgtttgaggcggttggcgcgcgtaaggcgggcttgatcgacgatgaacagctggaagaatttgaacgcggcacctgcccgggctgcggttcctgctccggcatgtatacggccaacagcatgaactgtttgtgcgaagccatcggcattgcgctgcccggcaacgggacgatcccggccgtatacgccaagcgcaccatgctggcgaaaaaggcgggcatgcgcattatggacctggtgcaaaaggatatcaaggccagagacatcatcaacgaagtgtccgtgaaaaacgcgctggcgtgcgatatggcgctggggtgcagttccaacagcgtgctgcatttattggccattgcgcatgaggcaggcgtggagatggatctgaatacctttaacgaggtcagcgagaaaacgcccaacctctgccatttggcgccggcagggccgacctacatccaggatctggacgccgcaggcggtgtaccggcggtgatgaaggagctgacaaagatcggcgcgttggatacctcggccctgaccgtgacgggccaaacggtggcggaaaacatcgaaaaggccgaaaacggcgataaaaacgtgatccgcccggtggaaaatccatacagccagaccggtgggcttgccattctatggggcaatatcgcgcaggacggctgcgtggtaaagcgcagcgccgtggcaccggagatgctggtgcacagcggcccggcccgcgttttcaacgacgaggaagaggcgatccaggctatttacgggcaacgcatcaagccgggcgatgtggtggtcatccgctatgaagggcccaagggcggcccggggatgcgcgaaatgctcaaccccaccagcgcgctggccggcatgaagctggataaagaggtggcgctgattaccgacgggcgcttttcgggcgccagccgcggcgcttccatcggccatgtatgcccggaggcggccatgggcggtaacattggccttttggaggaaggggacatcatagagatcgatattcccaaccatagcatcaacgccaaggtttcggacgagacctttgccgagcggaaaaagcggtatgtacagccggaggcgaaggtgcagaccgggtatctggcccgctacgctaagctggtcagcggcgcaaacaaaggggcggtgatgccgtgatggcggaaaagcgcgaactgacgctggataagatctatcacgcgtcgtatgtattgaaagatgtaatccgcaagacggaaatgatccatgcgcctgagctgaacagcgaatgcgaggtgtacctgaaaacggagaatctgcaggtgacgggcagctttaaggtgcgcggcgcgtattataagatcagccagctgtccgaggaggaaaaggcgtgcggtgtggtggcgtcgtcggccggcaaccatgcccagggcgtggcgctggcagcggcgaaaaacggcatttccagcctgatctgcattccggacagcgcccccatcagcaaggtggaggccaccaaaagctatggcgcggaggtggagctggtttcaggcgcgtatgacgattcctacaagcgcgccttggatttggtagaggaacaggggcggacgctgatccacccgtttgacgacccggacgtgatcgcgggccagggcaccatcgggctggagatcttagaccagctcaaggatgtggacgtggtgctggtgcccatcggcggcggcgggctgatcagcggcgtggcgtacgccatcaagcgcatgcagcccaacgttaaggtatacggggtgcaggcggcaggcgcgcccagcatgctggaaagcatccgcaaaaaggagaaggtgacgctggaaacggtggatacctttgccgatggcattgcggtaaagcatccgggtgatttgacgtatgagctggtatcaagctatgtggacgacatcgtgacggtcacggacgacgaggtagccaacgcgattttggcgatgattgaggagcgaaagctcatcgctgagggcgcgggcgcggtttcggtggcggcggcgatgtacaacaaagtgccgttaaagggcaaaaaggtatgctgtgtggtatccggcggcaatatcgatgtgaatatcctcagcaaggtcatcgagcgcgggctggtcacggccgggcgcaacagcaacatcaccatcgcgctgacggacaagcccggccagctcgaaggcgtcagccgcatcattgcgcagtacggcggcaatgtggtgtccgtgcaccatgacaggggcgaagcaaacatggccatcaacgcctgttttttgcgcattggcatggaaacacggaacggcgaacaggcgcgggagatctgcaaagcgctgcgcgaggcaggcttccatttggtataacggaaaagacggatgcgtcctctcttatggggcgggccatgcagcggcccggaccagggaagggggcgcttctcggtttataggcgcgtttttcggcgcggcctggaaaggggaagggccatgaactggaaggacatggtacagaaaattcattcgctggtggtattccgcagcatttgggacgacgaagtattccaaaaatttgcggccatgctccaagcggtatgggatggcgcggaaaaagcggtggatacctatgcggcgtttgtggcggcgttgtatcaaaggggcgacaactggagcgaatacctgctgcactatatcctgtgcgatgaaaacttttatatgctgctgcgcgccgaagggaagcaggcggccccggtggtggagcaggccgtgcagcatgaattgcgcgtgctggacgagatcgcccaggtaaccagcgagtccgtacagcgggacattcggttttccggttttttgccgcaatggaacaccacaccgctgcattttggctcggtctaccgcgataggctggcaaacatcgaaattcacgggtacggcatctttgcccaataccgcgcctttgtattgaaaggggaggagatcgtgcccattcagtcgccagaccccatccggctgagtgagatgagcggatacgaagcgcagcgcgctcaggtgatagacaacaccaaggcgctgctgttggggcggccggcttccaacatcctgctgtacggcgatgcgggcacgggcaaatcctccacagtcaaggcggtggttaacgagtttgccggcaagggcctgcggatgatagagctgaagaaaaagcagctgtatcagctgcctatgctgctggatcggctaagcaaaaacccgctgaaattcatcctgtttatcgacgacctcagctttgaccgcgacgacggcgattttgctgcgttaaaggcgattttggaaggctctgcctctgggcggccgcaaaacctggtggtgtacgccacgagcaaccggcggcacctggtacgcgagacggcgagcgcgcgggcgggcgatgagatccatctgagcgataccatccaggaacagatgtcgctttccgaccggttcggtatcctcattaccttcctgcggccggaaaaggacgtgtatttggaaatcgtactgcacctggcagagcagtacggcgtgacgatggacagggacgagctgatccaaaaggcggaagcgcacgctttgcgccgcaacgggcgcagcccgcggacggcgcggcaattcatcgagcaatgcgctgcgctgcagggcgttggcaaacgataagcaaaaggagaccctgtaaaaaggtctcctttttttgatgcacacggccaaaatacacagcatatctgcaaaaggcccgggcggttatacggatttgcgtttgcgataggccaggcaggccgttgatacggcgcctatggcggccaagctcagtaaggcggcccatatgccgggggtgctgttgtcgccggtctgcgggctggcaggtgtgggcgtgggtgctgccgaggccgccggcgcggacggcgctccggccaagagcctgatagagcagggggtagcggtctatgaaacgacgcactgctcctcttacatcatgacggatgtagcgcagatctcgggcgcagcgggagaaacggcaggcccgtccgcggcttctccgcagaccggcgatgcgcaggcgtccatgatgctgtggattgcggtggcggtgctggcgctggccggcgcgggcacggcggcactggcaaagcgcagataacacaaccattccaatggcgatgaaaaagcccggcgataggccgggctttttgttttgggcagggaagggaaaagacgccgccaacggaaagctggcatgcttggccgattcagagtaaaggctttttaagacaaaccagggcaagggcggcgggggccgcaacagcgccaggatgcaagggcaaagaaaaaagcacaggcgatttgcctgtgctttttggtgggttttatgcgtttgtacggcgcttcatcctgaggaacgccgcgccgcctgcgagcaccaagagggccgcccaaagggccgtttggctttggtcgccggttttgggtgcgccgctctgggtggaaacaaattctgccgacacctccacatcgccatgatccggcatggtaaaggtatatacgccgtctttgccctgaagagcttccccgttgacaaagaccttggatacgcggtagccttcgttggccttggcggtgatggtgatggtttcgcctgctttggcggtttccttatccacggttagcacgccgttttcactgggcagcacacgaacgatgtagttgatctcggcagagagaagctcattcatgaaagcgcccatatcggagctgacggcctcggcgccgttttccgttttcaaggcgtgtacagtgacggtggggcgcagatactgggataggatctcgacgttgatctgctttacaaggggatcgtatgcagctttgatcgcgtcggtaaatacactggcatacagcgcccgctcctcagccggcagggtatccaggaaggagatgagcgcttgctcgtctgcgatgacggcatcaggatggttgatgagcactagctgcaccaaaatatcggtaaaggattgatgcaacgcttcgctgtcttccggagacacggattcgccgctgatctcctctaggtaggcgattaggccatccagatagccatccagggaatccacgagcgtttggccggaggtgctgtccaatttggggatgatgatatcctccggtacctgcgtctggttaaagaaataatacagcgcactgccctggatggcgtcttcgccctgggcctggccgccggacacagagccttcgatgaccagcttgccggcctgtttggcttcctcatcctgtgctttcaggcagagcacaacgacgccgtcgccggctacggcctgctttttagaggcagcgttgccgcctttgacatcgcccttgaccgttacatccgcggtagcttcgatgccaacgccatcgcccgccatggcaacggtgtcgtttttggcatcgccaccctggacgctgccacccacggtgacctcggattcgccggccgcgatgacgcctgtgccgcccacagcttggtcggtatcggattccgcattgccgcctttgacgtcgccagccacctctacctgggcgttttctgtggaaacaacgccgtaaccgccttgctcggcgccgtccttaccggccacatcgccctctacctttacggtggattcgccttctgcggccacgccgacttcgccgcctttgacatcgccgtttacgacgacctcgcccttgtcggtagcgagcgcgcctacgccgtcagaatccacatcgccattgacggtgatttttgattcctcagtagcggccacgccgcccagcgtgccgtctacattgccgttgacggtaacgtccgctgtaccaagagcgcccacgccgccgccgttttcatcggttttgacatcgccattgacggtgaccttggcatcttcaacggccagcgccgtatcggttgcttggttttgaacgtcagcgtttacctctgcggtgcctttgccatggaacgcgacatcggacagggtgtacgtatgcccgttgaggatgtaggtctggccctctttggcctccaaggagccggcaaactggatatcaccggtgaggatgatggtgacgtccgcgtcggtatcgccaaacgcctccgccagcttatcccagctatccacattgtcccaggtttttgccagggcagagacggggagcatggtggccacggccgttgccagcgccacagaccaaaattttcgttttctcattgcagtaccttcctttctaagaatttatgtatggccgcatgagatacaaaaggaaacaaagaaataaatatgttcttaatatgcctttattatatccgacagatagatgatatgcaaggcgttttcggcataaatcgtctatattatggcagggagacaaaaaaggaacaaaattctttcaatatgccaacaagagagcatcccttgcttggcagaaaaaaacgggcatgataaagtagaaaaaaaggatgaggaggaacaagatgcagctgcgaatgaagcggggtgcaaagcgtgccctggccatggcggtaacggtatgcctattggtgatggcgtcggcctgcacggagccaaagctggccgcggattcctttgatgatttttgtacgcgcgtgattcgggagatggtgggggaggattatgtaacgatccactttttctttgacgatccggatgccttggggctgggcgatgtggcgccgacctttggccgctatacagcggaggtggatgaggaagaggcggagcgcagcgcagcgatgatccgcgatttgatgcggtatgatagggatacgctgtccgagagccagcagaaaacgtatgatctgttgctttggacgctgcaaagcgctgtgcctgcagcgccgatgtattatgagaaccccaatgcgcccaattttggatggcaggcgcaaattcagatctcgttggcggaattggcgctggatacggagcaggatgtggaaaactatctggcgctgctcagcgatatgccgcgctatgccgaagcactgatgcaatatcagcaggagaagaaggaagcgggcttgggcatcagcgccgagcaagcggagctggcgatagaagaatgcgaaacgtttttgcaggccggggaggagaacattctgctgcgctcgtttgatgagcgcatcgacggcatggagggcttgacccaggcgcaaaaggagagctataagcagcgcaacagggaggcggtgcaaacctattgcctgccggcgtaccagaccatggcggacggcctggaaaaggcaaaggatgaaagcagcgacggttcgctggccagcctgccgcagggccgcatggtatacaagacgctggtgcgccaatataccctgagcgaggcttcgccggaggagatacaagaggagctggaagaggatgagcaggcgatgatggcagagatgcgcagccttgtctggcaggacccggccggctaccaggcgtgggagatgatggatctgggcacggaggacccggaacagagcgtagcatggtttcgggagagaatgcaggcggatttccccgcgcttttggccgatgtgccgtatacggtgagccaggtgtccccggcgctggaggataccattcaaaatcccgcgttttatatgatcccgtatctggataaagagggggtggaaaaccacatctatatcaacccaaagcatatgggggacaacgtgctgcctaccttggcacatgaaggctttccagggcatttataccagaccaatttcagccggcagaccggcgacagcctgctgtgccagcttttggagccgacgggatatagcgagggctgggccaattatgtggaaaattactgctatcgctacttgacggagaacgagacggcggcgcagctgtgcagaatcaacagccagctgagcttgaacctgtattgccagatggatatcggcgtgaactacctgggctgggatacggaagagctgatggattttgcagaggcgtattttgaggtggatacgcaggcgatagaggagatgtaccagatctttattgcatcgccgggcgaatatttgcagtattactatactgcccgccagatcgaaaaggcgtatgacaaagcctccgaagcgctgggcagcgaatttaacgacaaggatttccaccaggccgtgctggaggcgctgcccaccaaggagggcattgaaaaggcggtggatgcctacatcgacgccaacggcggacagcaaataagcagcgagtcggcgtacaaagcggctgcgtaacagaaaatcacggacaggaagaggggaacaggcgcaaccaagcataacaggggaaacaaatgaaaaaagcaatgctgaggcaaaagggaacggccatgctgctggcgccgggcatgttggcaatgacggcggactgcggagaggaaccgatacactttgacgctttagacgcttctgggatgttatggcaggctttggcatgggccaatggggcggcctgaaacagcggatatgcatgcggaaaaaagacgggaaaggccgtcttttttctttgcagaggaggcggtatggcgggtggatttttggcaaagctgaaaaagggggttgcaaaagagagaaagttagaatatactaacaatacaccccaggggggtggggtaaggagagcgaaatgaaacagaaattttccgtaacggggatgacctgctcggcctgccaggcgcatgtggaaaaggctgtaaggcataccgaaggcgtgcaggatgtgcaggtaaaccttttgagcaattcgatggttgtgacatacgatcaggcggcggtttcgccggaaacgatcatagcggcggtacaaaaagcgggctacggcgcggccctgcccgggcaaaccgaggcaaagccgcaggacggcacggcagagcagctaaaggaaatgaagcggcggctcatcgtatcgtttgcgtttatgattccgctgatgtacatttcgatggggcatatgtttgcctggccgctgccgtggtttttgcatggcgatgaaaacgccatttcctttgccatggtgcagctgctgttggcgctgcccatcgtatatgtcaaccgaaaatattaccaggtggggttcaaggcgctgttccatggcgcacccaatatggattcgctgattgccatcggctctgcagcggcgatcgtatacggcctgtttgccattttccgcatcgggtttggcctggggcatgggcagatggacgtggtgcatcattacgcgatggacctgtattttgaatcggcggcgatgattttaacgctgattacgctgggcaaatacctggaaacgcgcagcaagggcaagacgggcgaggccattcgaaagctgatggatctggcgcccaaaaccgcgacggtggtgcgggatggccgggagatggaaattccgctggaggaggtcgtggtgggcgatac

SEQ ID NO: 812 - DNA, 18542 bp, Unknown
  16S sequences of unknown bacteria
gagcaggaagcccccacttcaaaatcgtaagatttaagtggtgggagcatgtcactgctatactcgatattattgtgattatgtaccggaaaggatcccgattatggcatgcgctccaaaccgcattactttaaaaaccattgccgagcattgtgactgctcggtaaatacggtctctcttgctctgcgaaatgactcaagaatttctgaggctacacttcggaaggttcagcaggcagccgatgaacttggctatatccgcaacaacctcgcatcttccctgcgttccggaaagagtcacatgattgcggtcatcattgagcatgctcacaatccgcattataccttcctcattgatgatatcgttgctgagctgcgaacacacggttatatcccactgctgctttttacccacagcagcgaggaaacagagcagcaaatgctgaagcttgctctctccctctcggcagacggcatcattctttttgttcacggaaccgcagagcattccgctaaaatgctccggtcactgacacttcccgtgatcttaattgaccgtggcgtccccggtaccgaaatggattgcgtctgcgtcaatgactatgatggcggatatctggccggccagaagctgacccgactgtcacattcccgttttctgtacattgccggtcctcccacgatagaatcccagattcggcgtcagcagggaattcttcatgcattgcaggacgcgcatcttccatctgacgctttgcgtattatttccttcgaagaaatcaatcgcaccattgaacaaaataccattttgcagcttcttcatccaatcaactatactgcaatcattgcctacaacgatgaatttgcttactatataatgaacaccctgcgccagaatggctatcgcatcccggaagacatctcgatctgcggctttgaccatatttgcagcagcatgccatacctaccgccgctctcgagtatctcctatccgaaggatcgaagcctggcacaaacggtcgtccgcttcctgctcaaccgactggagcgtccgaaccgtccggttcagatcgatgaatttccggctgtttattacgaagaagggacggtagctatctgccatgacaaaaagcatcacaccgacacagatcaaaaagaataaccgcagtctgatctatcactatctctatcagcatcccggaagctctcagcaggagctggccttgcagctgcatttgagccgaccgaccgtagcctccaatctctccctccttgaatcagagggacggatctccaagagcggacagatcgcttccgaaagtgcaggccgcaaggctgctgcctatgcgatcgtcccggacttccggatcgcactcggcgttgagctgctcaaaaacgaagtaaaggtcgtcgccgtcaacctgtacggcaaaagcattgcgcgcgactccttttctgagacttatactgacacgcctgagtattaccagatgatctgtgataaaattcttatctttgccagggcacttccatgtgaatcctcacagatcctcggcatcggttttgccatgcaggcgctgatctctgctgataaaaaaagcattctctacggaaagatcctctcctgtaccgggctgtcactgtctattttttccgatcatcttccgtggccgtgttccttcatccatgacgcggaaagcgctgccatctccgagctttgggcctctccggatctcacagatgccttttatctctcgctcagccgtcatcttggtggctccgtgatcgcaaaaaggacgatcatgggcggcaagcacggacacagtggcacgatcgagcacatccacatgcgtgataacggcatccgctgctactgcggccagataggatgtatggagacactctgctctgtcaagacgctgctcgccgatggagaaacacttgaatcgtttttcacaaatgtgcgtcagggcaatgtcatctgctcctgccgctgggctgccttcctgtctgacctcgctgagtgcatcaatcttctgcatctcgtctatgacactgactttatcctcggtggccatctggcaccttatctgcaggaagaagatctcctttttctgcacgaaaaaatccgccagctcacaccatttggggaaccggcggactttctccgcatcagtaaaatgccgcaggacaatatttgtatcggagcggcgttgccatatattcaggggttttgggggggaaattgtaaagcggacattcgcaatccatccctgcagctctgctgacagggcctagcttcgctacttgctcatgaacgcagtcgcttcgcgacctgtcagtgggagctttcaactcccactgacataagcatccccctcacccgccgcttagtgctccgcacacttgaagcgggggaatgcttatctgctattcttttgttcgcagataacgctttcacaccctctctacaaccgtcgagcagcccatgccgccaattactttctgctcacggttacgcaggtcattacctgcgtgtttgctgcctcacgccagcttcaaaatcatctccagcactcgctttgctgacagctgcagctctgcgcggcttaacgcatacggatgcgtcggatcttccagtgccttcaacatatcgattttatccgatgagattcccggcatggtgatatcatttccggccttcacattgcccgctgcggacgcgcacggccacttttctcctgatgcgcccatacctccggtcacaagccagtcagtcatcacgacgcccgcaaagccccactcatcgcgcagcgtatatgtctggatatccttgctgttgcaggcatgctcgccgttgatcagattgtaggaggtcatgataaaatgcggctgggaatgcttgacgcagatctcaaagcccttcagataaatttcccgaagcgcacgttcactgacgcggctgttcgaaaaataacgatttgtttcctggttgttgcaggcgaaatgcttgatcgtcgtcgcgcagcccttatgtgcctgtacgccgagcgtcatcgccgccgcaatgcttccggagagcagcggatcctccgagtagtattcaaaattccgtccacaaagcggagagcggaaaatattcatggcaggtgccagccagatatgggtgccaaactgctccatctccttgccaaccagatcgccgcactgctttacgagctcttcattccacgactgtgccagccctgtcccgatcggaatcgcagtgcagtactgataatacgtctcgccgcccgcttcttcggatgcagcggcagccatcgctgctctctcttcctctgaaagcaccaccataaaggattctccgaaattcgaagcagtcgaccggattgtaccgtccacacactcatatgtcggacttaagcgcagacctgccggaccatctgccatgacaagcgtcggagtccccagctccttgagctgctgtgtcgtctctcctgctgcaccggctacagatatcgatgcatttccgatgacctccatcatatcctcacactctttatatgcaccaatacacaggtacgcaagctgttcatccgtcagaccaccgacaaactcctccatggtcttcttcccgctcactacctcctcccatctgcacgccgggccatgcggcagctctcttggaagctctgaatacacatgtgtcacctgcttcagctctgccgctgacagctccacagacactgcagataccttctcttttgcctcttctgcataagtgacgccacgcttctccggcttcagatccgtaaatccgctctcaccgcagatattccgctcctgctccacgaccgcctctgcatccagatggattgcacctgcgatatgcgtatttctcgaactgtttccgacgcgtacatagtaaactccggcttccagtatataggcagcccgcgccatatcataacccgccattgattccgtagtaaaacttaccgtcacttcctcctgctcgcccggctgcagctccttcgtttttgcaaagcctgccagctcctgatacggacggtccagtactccgtccggcgcggagtaatagacctgcacgacctcttttccggctgttgttccggtattttttaccactgctgtcacggtcaccgttttggcgtccgccgcaaagtccttcggctcaaccgcaaatgttgtatagcccataccatatccaaatgggtaatccggagtcgttccaacggtatcaaagtaccggtatccgacgtaaattccctctttatattccgtatcgttcggatctccaaagccctccgtggatgcatactccccgatcggcgcccatgtcatcgtcagctttccggaaggatacgcccgtccaagcagcacatctgcaaatgcatctccggtcgcgcttccgagctgaccgagcagcagcaccgtgccgacggtatttaccggctctaagttgaccataccaccaacattcaatacaagcacaaatcgctcatacttctgattcaaagcaaggatatcccggatctccgtctttgtcagctcgacatctccggcctgcggcttccggtcggttccctctccggaattacgcgccagtacatagacagccgtatcaccttcactatccagcggcaactcgtattccggctccgggcaggtccgtcccattgcaaagagcatgatcgcctgtccctttacgccgaccgcctccgcttcttttcgtacccctgcataatactccttctttgctctctggcagatcgcatcgtaagcatccatccatgcctttgtcgtgatcgtaaatccggcatgctccagtccttcctctatgtttacaaaatgccgcacattcacatctccggagccggtacctcccttgattgtgctgcgtgcgccgcttccatagagtgccagcttccccgttcccgaaagcggcagtgtgccgtcatttttcagcagtaccatgcactccggcgctgccttgcgcactgcttccgtatgcgcgatctcgtatggctgtatttctgatgttgcaattctgattggattcatttgtaaaaccctccttttttccatgtgctcgtcaaagcagatattctcaatccgcttcgctacttgacttgattcggatcaattattttattattcgtgactgaatcttaaataaattcgtcacaaatacagataacgcaattgatgtaagtgttgtgtcatagagcttggttcttatcaagtccattccgtagcagcgtttactcaaactgaatgaacgttctacctcaattcgatcggtgttatcctggtattcctgccttttctctttaactgattgttttgtaaggcttggtctcccaagctttggaccggataatcgtattccatgaagcttacagaattttctgttgtctctggttcgatatatctggtctgccagtaggcgttccgggtaatgaccagttcgtaccctgaatcgttccactgcttcaacaagtactgtactttcattgtaggcatcataggatattttctctattctgccaagaccactatcatcaatgcttaaatcaaacttagcaccaaattcaaccggagcttttgtttttcctctgacgatgggtctgatccatggctgtgagatactgacaatgcgattttctacactatgaaaaagcctgcactgttggaggcttgtttggcatgcccaaattttcacatatggcagcaacaagagcttccattctctgattttgcaggggttctacatttttgagccccagtagaagaaatgcaatccccatatactctgtggctacacgtccgcgaactggtacaattggaaagaatcacattcagagcagatttactcagtgaagaaatctgctctttttaactgctctgaatctgatactttcctaatgaattataccatttttgagcgaaaaatgcagtaaaatcaatggtttcaagctgattttttcattaatcagcagatactaattacgcgcataggagaatttccacagcccgttcaaagaatatacaaaactgctctccccgtcttccgcctccgaaacggaagcataaaaccgatgatccgaatgcgcgtccattctgttttcacaaaaaaatccacatccttcacacggctgtaatcaaaatctgccatcttattttctccttccgtctgctgagcatcagattcttaaaaatataccttgcaaacttcttcataaatatcaagcctgtcaacacgttttccatccggcaaaggaaaattcttaataatttcgtcaagttcaaagggcggttcatcaccgcccttctttttatcttttcttttgcgaaccttacaggtactgatttgccattacaagcatagcgctggctgtccaggtatacgctctgtcacgaagaccttcaccagtcagtgcatcaaagttctcagcacatccgctcttgcctaccatctggcagaatttgtgtgtcacttcgcgtacaaattcttcttctccgcattcccgcaggccatccagaatcagcatggtgctcggcgcccagatcggtcctctccagtaaccatccggatcatagagtgaactcttcggactttctgttgccaatccgtatgcggtattgaacttgtcactttccagcacttcaaccatgttgcggcgaatctctttcggaagtctcttaccgagcacgatcgggagatataagatcagactgtctgtctcaacacgatgtttctccaatcctgtaaatgctgccggaagtccgtctacatacagctcacccagcatctgctccagcatcctgtcggcacgctgtttccacatatctgcatcagcctttttatgaagcttctcagcagtctcactcaatacatccatctgaagaatcaggaaaccggcaagatccggcaatgtagcaggcggaagttcacgaaatgctgtcgcattatcccaaccggaatcatttccgtgtgtatattcgcacaatccgtcttcattcgcatcccgacatttcagccaccagtttgtccatttggatattttttcatatgcttcctgcagctgttccatcgagacatccataatctctgtcattttgcggagtgcccatccatgaatcggcggtttgcagtaattatcaacctgtttacagtcattgacactatccggaatatttcctgacggtttctgataatcaaacataatcataaactgatcccaggcttccttcggattgttataggccagcgcaagcgcgttgaagcaatgatcccagctccatacattgcacatccagttttttgacataaacatcgcttctcttttgatcagtccgcacggttttacaatactggaccaatccacataggaagccatttccgctgcatcacgatagcagtccggcacttccggcatggatgcatagaatttttcaaatgcttctttgctctcctgtaccgccttttcaaactcaatcttgcgtccacggtcactccagtcatacagattttcttccagtgaaatcagatactcaccagatgcatccggtaccagatgcattctgcagccgtcagccgtacttactttccactcctgatccggaatcagtgcccccttatctgcatgcatcatataccgacaattagtcatgaaacaatttaccagataaaaatcgcgttttcctgcctttgtcggctgaataaaggtaaacggaacattattgctcataaaatctaaggtcagctccagatttccgcgaatccagagtgtatctgcatccgcaaaaacaatctgacattctttttcaccgtctttgatcgtaagaacttccggacatgcctcatactggtattctaccggatcctcttttccccgcaccagaatccgagccacaagagaagtctctgctgctccatgtacgtttctcaaatacagtcctttttccgcctgtttgtgtctcgatccgtcttccagataggaaatcgccatataggatccccggtaactgaaagtaacctctttcaaattcagtttcatcttttttcctccgttattttatgaaattttgtaactgttcagaaccccctgattagattcaagtaatatttgtacaaaacagagaaattaatatttctgttttgcattgtgtttcctgtaatctgtggataatcaaaccacagatacttcattaattattctattgtggattactccacaaattttcatctttacccccttataactatgaggaattatttcatttgcagcaaacacccacttgctgtatgcagaaaattgttttatcgttattacaatccttcatcactcaacagtgggtgtctttcattttacacgcttttcgctatttatcttatatagtttagccctttaatcctgagaaggtaataccctctataaaatacttctgcgccataaagtatacgacaatcatcggaatcgtaatgacagtcgcagttgccatcatctgattccagtcactcttatgctgtcccataaaattctgaagtgccagtgaaactgtttttaatttcctgtcgtccagatacaaaagcggtcccataaaatcgttccaggtattcataaatgtaaatactcctactgaacaaagcgccggcttggacatcggaacaataattttggcccagatcacgaaatagtttgcaccatctaccaaagcagcttcatcatactcctttggaattcccgaataaaactgtcgtaccaggaagatattaaatgcacttccgaagaaacacggaacaatcagcggataaaatgtattatatccacctaatgactgccagatcaggaactgcggaatcatcagaaccgtataaggaatcatcatagtcgacagaagaagtgcaaaccacagatttcttcccgggaatctcagccgtgcaaatccaaatgcaataaagctggcactcaaaacagctcctaacatattacataaaacaatcaaagccgagttcagaaaatatcttgcaaacggggcagacctaaatgcttttctgtaattctccagatcataatgtgacggcagccactgaatcggcatggtcataatctctctgtttgtcataaaagaacttcgaaccatccaaaagaacgggaaaagcatgacaacagagattccgattaaaagtatatagcagaatattcttgtaatttttgtttttttgcttttcataatttaatctccgttctcatagacaacccattttttctgtgacataaatacaatcgcagtcagcaccgcaatcaggacaaataataaccaggacatcgctgccgagtatcccatactcgattgtttgaacgcagtccggtataccagaagtgaatagaacaagctggcattattcggtccaccttcagtcatgatatatgcctgtgtgaaggtctgcatggaattgataatcgccattacaaaattatagaaaataatcggtgtcatcatcggcaccgtaatatccttgaattttacaagtgctccagctccgtcaatttccgctgcctcatacagatgacgcggtactccctgaagaccagccagataaattactaccgtgtttcctgccgcccacagtgccataattgccagtgacggaagtacaccaccggtactgtaaataaaattctgaggcgagagtccaaacattcttaagatgctgttcaaaagaccgcctctggggttatagatatacatccagatcgcggaacttgcaaccgctggaacaatcgacggtacataaaaaatagcccgaaaaacagagattccctttacctttgtattcaaaagtattgcgatcagcaatggtacgcaagtaaccagcggtaccgtaataagtgtatagatcagtgttactttgatagcctgaatcaccagcggatcatggaacatttttatgtaattgtccaatccgataaattctttcggagtgagaacatcccattttgtaaaactgattcccaggctgaacagcatcggtccaaaattaaacaaaaacaggccaatgattgcaggaccaataaaaaaatagccccagcgcatctgtcttttttcccttgtactcatttgatgttttttcttcatatggtgacctccttaagtctaccgatagcataaaccgccgcaaagcggcggtttatgctactctttcttaattccaggttccctgaagatcctctgctacatccagagttgacagtgcttcttctgcagtcatctctccaagccatacgttgtccagaagcggtacaatcgtattatccacaattactgagaagtttttcagagttacattctcgccaagacggttgtccttctgctgaacgatatccttaaatactgcgcagttttctgtataatctgcaccaaaataagtggatacccacgctttttcgttttcgccatcatcaaaggtatctaaggagtgcggcaggcatcctacagatacaccctgctcaagtgctgaatgaacggtattgttaaagtctgtatagtagcagaggaaatcaaaagcagtcttgttgtctgcgttttccggagccatacatacggcagcgccccagctcatatttgccggatgatcaaacatcggaagcggagcaactcccagatcctcaaatccttcatttgcgtagtttccaagtgtccatgcgccatcaattaccataccgagctgtccgttcattaccatagctgacacatctgcaaacgcgccctttgctgttccaacgtccggagcacatttctcaaccagagaaagatctgcaatcgcctgaattacttcaattccttccggcgtattgatcagtaattctgttccttcatcatttgcaatcgcggaattgttgctataaagcagcggcagccacttaacaaagtctgtcggcattacggtaccgtatgtcataacgtcctgatcattgaagccttcatcaagcggagtctttccatcatagtcctttgtgagcttctttgctacatctacatattcttcccaggtccacggattattcggatctgctgacggtaattccagtccgttttcctcaaacaatgctttgttgtaaaatactgccattgttgctacattacatccaacgccccatacactgtcaccgctctggaatacagtagacggaaccatctcatccagcggattaatcccagcttcgtcataaagcggtttcagatccagaagtgctcccttggaaccccactctaacgcattcatctccggaactttgaatacatccggcatactgcctgctgcagccattgtattcagtttactcagatactctgcatacggaataaaggttggctcaaccgtaactcccggatgctctgcttcgtactgagcacaaacagccgtatcggcttccgcctcagaacctgatgaccaagaatagaatgtaatcgtttcttcctcagcctgagctgtaagagcgccaccgaacatggatgtcagcatgcatgttcccattaacagtgcagtttttttcttcaacatgataatttcctcctttttattcacgaactttgtttgatatagttatattattacaagaaagagtggtattctagtatgttttacacacaaaatcagcacaaaaccatcttttcattattcaaaatgttcctgtttccgaaactctctcggtgacatatcgcacaccttacgaaaagctctggtaaaataattcgcatcgttgtaacccacaagcgctgcaatctcactcacggaatactctgtcatcttcagatattctctggccttcccaattcggatattttcaagatactgcagaatcgtcacctttttcttttccttaaagcgttttgcaatgtagttcggcgcaagaaaaaattcctctgacagatctgcaatactgatttcttcactgtagtgctgttccagatatcggcagaccccttccacaacatcatctgtttcaaacagtttctcaatttcgtcctcacattttgctgcatactctatccagagttccaaaatttcatccttctttttgtaattcgccagcgccatctgatagaattcctgtttcaattcctgtggtatctggagctggtatttagaataaagaccgacaaataatgcgataatgaaagaatgcgtttctctcattgagtaaagattttcttttctggcaaacaatttttcgaagatattctgcagcagcttttccccctgctcttttttcctgttttctacaatcagctccagctgctcccagtcaatttccagccccgtaattttctcttcccccatcggaatcaactgtgaaaatccatgccaaaatctgaggtctaaagatctttccagtttgttcagcacctcaccgatttctttctcgtgtacttccccccatacaatatacggctgtatccaacttccgcatctgtcctgcagctctctgatctgaggttcttccagaaaccgatcttttcccatcagcagacagacatttctactttcatgaaaccagtaatagttccagacttcttttggaaacatcgcttcccattctttcttattcacctgaaacagttcctcaagcatcacggccagtttatcctgatagagcaacagcactgttccgctgaaagattccagctctacaagaccgtcttcccagtattttttcctgtttttcatcagttctttctgccgtactctctctccgtcaatcttcccgcaaaccgttctgaggcattccacaaattcctgctgctgaatcggtttcataatataattcacgacaccaagctgaatagcgttcttcatataagtgaagtcatcgtatccactgatcacaataaactttgtcacactttcttcatccagtaaccgtacctgctcaataaattccaaaccgctcattcccggcatatttacatccacataaaaaatatcgggtttctgctcctgatacagctccaacgcctctgccccattcgctgcacatccggcaatctccaccacaaatccactctgcagaattctctgctcgatactttttacaatatacgcttcgtcatctgcaatgcatattttatacatcttctcctccttctggcaatactatctgaatcttcgttccggcaccctcccttgccgaaatgttaaagtgcatccgctccccatattccagatacagcctctggaatacgttcaaaactccaatatgtgcagaagattctgatttctgaaccggattttcccgaattcgatctatatccatcttaagcgctttcatccgttctccggaaattccaaccccattatccataatcataactccgattccctcttccagattctcaatcataactgtaatacaggaatcctgatactgctttacaagtccatgacggattgagttttcaacaagcggctgaagaactgattttaagatcttttttttgactacccctgcttccacttcataatatacggacagatttctgactttacatttcatgatcagcagatattgtttgatatagtccagctcttcctgtacctgcacccatttatcccgtttcagattatatcggaaaatctgccccaacgtctcacagactctgactgcctgctctctttctccgctcagaatcagtccattaattagttccagagtattatacaaaaaatgagggttgatctgttgaagaagcatctgatattcagtttccttctgcagcagactgattgtcttgtttttttctatcagcagaccgatggaagcggacatttcattgaagccattcatcaattcgcccaattcattctgataagaatgttccacctgtattcccatatgattattgcgaatttccgtcattgcatcacgacagcgcagaatcggaatcatcagatacctagaaaacacaaccgcaagggcccaaaacagtaccaccgccatcataacaacaaacagatatatcgtccagacagagtcctgattcacaaccagactctctttatccaaataaactacaatcttccacttcgtatcgaagacagacagttctttttcttcagtctgcagatcacggttttccaataagtattccggcagtgtccccgtgatccgttttccttcctcatcgtacagctctgcatagcttccttcaaaatttgtatccagatattttctgactgtttcctccgggatatgtgtcacaagaatcccttcctgatccagcgtagaattattgcgaatctggtaatacaaattgacggaccagttttccttttccttataaatacctgtacctgttccgatttcaacatattttcctttttcctccagctccggataccattccttctccgtcaaatcgatgctgtaatccagataatacgtgctgtgacttttgattctgttttcgttatccagccagacaacaaacttcgccccatcataatagctttccagccccgacaaaaaatccattacattatcctgaattttctgcatttcataataggttttgtgccttgcaaacagcgtctgcagccagttgctgtagcatgttgtaattgccacatccttcatctgctgaaaataggtttccaacgcgtttttccgctgttcattcatactgctcagactccgttctaccgtttgcgcagtattccgttctataataatacaggacgttactgtcgcaagcacgactacaataaagaaaaacagaagaacaattccaataattgtttttcgcaatcctaattttccaaatgaagcctttccaaacgaaaataatcctttcacacttcttttgaataccttcatgtttccctcctccacatcttgttcctccgaaagcagatttacgtaaatcaaaatagcagttttggcatttacgatatattcttcataaacaatccaaactgctatgattatttttgaccgctcatcttgacagagtacacgatcagtttccaagatatttttcatcacttgcaggcggacagccttcctcctccgggagcacaggctcgatcaaccgccggatcttttctgttttgccgtatcccacaaggttcgccagaagagccccgggtgtcttttcccctctgtgccagtccatcagaaggtccagcagttccgttccgtcctctgcagtcacatccttaggagctgcttccgcaatacagtgctccagtgacggcaccagatagaaacggaactgatcccgtgccgcctcagccccgattttctccatcacccgcatagcatagtgccaggcgtccgggaagagaacacaggcatccgccgtaccggaaacaatcataagctttccgcctctggcaaaaaaccgggtcagatccggatcattcgcgtccatgtacccggaaagtgcagtatgtaccgcttcaaaatcacggtcaaaatcaaactgataaggatcgaatttttctcccagtgcccagtaaaacggatagtcgtaaggcggtgtcccggctgcacacacattgtccggaatgtcctttgtgacgacgcttcccgcaccgatgaccgcattgtttccgatcttcactccaggaagaatgtcgcagtttccgccaatccagacattatccccgatcgtcaccgcaatgccatactcatatccggaattacgactgtccggatgcagcggatggcccgccgtataaatcgaaacgtgcggtccaaacatgacattttttccgatcgtgatcttcccgacatcaagcatcacacaaccggtatttgcataaaaattttctccgagttcaatatggctgccatattcacagtgaaacggcggctcaaaatatacattttctccgtgctgcagaccgatttcatccagacatgcccgtcccttttccggctcaaatggcatcaccgtgttgtactcccggattgctttttttaccttaaatctgttccgctatcacgctgtcatctgcaaaatatggcagctcatgatctctgcggtatctgttatccatttccattttttcacatcctcctgattttttctatcaccatgcacatccgctgtcgtgcgtttgctatgattctatttacagctccagcacatcccgtgccatcgccatccgctcctgaaactgcgaataaaaatctccggcctcatacggctttaaaaagaacagcttcagcacgaacagattcacatttttcacctgctcttccggcatctgcggcagcattttttcgactgtctccagaaagctgtgccacttacggatataagcctcatattgctccagctgcggagtatcgacccatttcccgacctttaccttcgtcttattcggcatcggacattcatgcacctgcaggaaatagcaaaaatatcccgcctcccggatgcctgatactgcttcggccgaatcttcgtagtagcgtcccagcgggaacagcctgcaaatccccgggcgatatgcatgaatgctgcaccgaccctccttatccaaaaaaccacaggcggaagtcgtcggattcatccgcagatttggaagaatcatcccatccacaacatgcagctccagcttttcctgcagcagctcattcgccgtcacccccagattcaccgtcaggcgccacagatcatacggatcgagaataatcgattctcccattccgtggcagcatgcagagcaccccttacagtcaccgcagccagcccgcaccatatcatttttatcatacagccttccgtcggaaatctcctccagacttacatttcgtttcatttgtcttttcctttctcagctgcccatagtgtctctattatagcggaaatttgggcaatgctcaataacttccggcaaccaggccacatattccgcaggattacatactatcattatactttatttccttttttagcgcaccaaaaaatgccgccttccggcatttctgccggaaagcgacatttttatttatgaaagggagggaatattatatttttcggatcgccgatcagtttgtctcctgctggctgtcctggtaatcagaaagcttaccaagcgtgatggtcaccttctgctcttcatactcggagccgttctgacgctggatcgtgaccggaacctcttcgcctgctgcatagtaagcaagctgtgtctccagatcctgcatgctggtcacgctgctgccatcaaacttcgtgatgatatcacccttctgaagtcctgcatctgctgccgggctgccatcctgtacctctgtcaggtaaataccttccggaataccatacagggaagacatctcaccggatacaccctgtcctgcaataccgacgtaagcactgtcagcctcgtctaccttatcggttctggtttttttgttcatcagatcctcaaggatggactttgcattcgaaatcgggatcgcgtagcccataccttcaacgccgttagctgctgccttcgcggagttgataccaatgactctgccctgcatatccagaagcgctccaccgctgttgcccgggttgatcgctgcatcggtctggatcagatccgcctgatatccatcgatgtcaatcgtacggttcagcgcgctgacgataccggtcgttacggactggccatatccaagtgcattaccgattgctacgacctgctgaccgactaccagtttatcagaatcaccgatctctgcaaccttgatggcatccatcgtatcactggaaatatcatccagctttactgctacgacggccaggtcattggaagcatccgtaccctttacgactgcctcgcagacggattcatccgcaaaaccaacggacagctccgtcgaattttctacgacgtggttgttcgtgcagatcagaagctcgctgtcattcttaccgatgatgataccggagccacagcttgtactctcctgctcataggtcggagcaccatagccgtaaatactgtacaggttctgtacctcctgcacggatttgtttgtaattgatacgaccgacggcattgccgctgccgctacatcactgacaccggtaatggtcccggtcgcctctgccgtatcgctggtgtctgaatctgaatccacatcagatgttgcaagcagctgcaccttttctgttccggcactgcctgccagcgcggtatcattatccgcaaaccccataagccctgtcaccgcgcctgccgtcaaaacgcctgcgcacaataatgaaatcactgtctgttttctcatatataagacctccttcgatctaatccatgaagcttccggggcatctcttctgctcccaccggcttcattccttttctttttctttatgccaacagtataatgaatccttttgaccgatttgtgattaaaatgtggtcgttttgtgggatatctgtgtttattttgtgaacgcagatcgcgaagcgactgcgttcatgagcaagtagcgaagtggattgc

SEQ ID NO: 813 - DNA, 17324 bp, Unknown
  16S sequences of unknown bacteria
cggcgccgtggagccagtcgggacgagcacgcccgattgcccgatgagcgagttccagaagcctccgcggtagcgaccatagtagccgagctggtcgtagaccatgtcggccgtgtagaccttgtcgcaccaggtgggaacagactccgcatcgtacttggtggtctcgcccgtgcacgcatccacgaggatggcgccgtcgtagtcctcgccaccgaacagcccgatgcgcatgttgaccgtcgggacaatccagtacgggttgccgtcgtcatcgagctcgaacgccgcgacgccgaacatttcggtcggatactggaagcgcacgtagcggtacaggtagttgttgaagtgctcgcccgtcgatatgtgcatgtaatggccttcgggcagacgcacgagctgcgtgtcctgcgtcgccatattgaccgtcacgaatccggggaggccctgcatcgtgttggtaatccacttgatggggtcggcgtacacgagtggcgcgacgcgatacggcgcgttcttgtagttgatctgcgtgtacgagtcgtagccctcgtcgatgccgaactggctgacgaggtcgctcatctcgccaatggtcctgctgcccaaacgtacggccgtccccttgtcgaccacgggcacgctgttcatggaaatctcgttgatgtcttcggagaagttgccgtcttcgacctgcacgagtgccgagtacgcacgcgcgttgaagaacggcgagcttgccacgttgccgatgatcaggcccaaaatcagcacgaggatgagcacgataatccagaagataaaaccatgttgcttcttctcgcccttggcgcgcttgcggtggcggcgcttgccagaagactcctcccccatgtcgcctgcgctctcagcagagctcgacgccgagctgccacggcggcggaacagccccgtcagcgcgccgagaaagccctcgcggcgcagcgtgtcgccgaaatccgtgacgaactccgagccggcgtcgtgcaggcgcggcagcccaaagcacacgccgatgacgacgaggcaccagatgacgaaccaccagaagtcgacgcttttgatgttgatgggcggaatcgtgatgtagtagaagattccgattaccacgaccgtgataatcgccgggattacaaatctcgttttgacgttcattcgtcttcctttcgcatgcatcgggcgaagctacgtgctacgagccgtcagtcagacgtttatgcgcggcctcgatctgccgctgcgacatgttcgaagaaccctcgatccggatgtttgccgccttgccgcttcccagctccttggcggtgacgtggacgattccattcgcgtcgatctggaacgtgacctcgatctgcggcttttgcatgccgaggtgcagcccgcccaggcggaacttgccgagcgacgtgttctggctcgcgcgcggcgcctcgccctggagcacgttaatctcgaccatcgtctgcatgggcgtcacggtcgtgtatctctcgctgtgcatggccggcagggtcgagtttctcgggatgagcacgctcacgccatcgttgatgacctcgatgccgagcgaatgcggcgtcacgtcgagcaggagcagccctccgacctcgcccgacaaaacgcctgcctgcaggcatgcgccaatcgcgacgctctcgtcggggttgatgctctcgctcggctccttgccgatgaggttgcgtacggcctgcttgacggcgggaatgcggctcgagccacccaccatgagcaccttgccgatagacgaggcggtcttgccggcatcggcgagcgcgcgctggcacggccccattgtccgctcgactaggtcgtgcgtgagcttgtcgaactcggcgcgcgtgacctgtgtttcaaagtgaatcggctgcttgtccttggtggcgagaaacggcaggttgaccgtcgtctgcatgacggcggaaagttccctcttcgcgttttccgccgcctcgcgcaggcggctcatcgccgccggctcgccgtgcacgtccacgccgctttcgcttttgaagcgccgcgcgagctcctcggtgaggcgcgcgtcaaagtcgtcgccgcccaggtggttgtcgcctgccgtggccagaacctcgatgacgccgctttggatggagaggatggagacgtcgaaggtgcctccgcccaggtcgtagaccatgacggccttgtcctcctccttgtccacaccgtaggccagcgcggctgccgtcggctcgttgacgatgcgctgcacgttgaggccggcgatgacgccggcatccttcgtggcctggcgctgcgcgtcggtgaagtaggcgggcacggtgatgaccgcatcggtgacaggctcgcccagatatttctcggcatcccgcttgagcttgtccaagatcatggcggagatctcttgcgggaggtacttcttgcggtcgatctggatggggcgcgtcgagcccatctgccgcttgatcgacacgatggtacggtcggggttcatcgcctgctggcgacgggcgacctcgccgacgaggcgctcccccttcttgctgaacgccacgacggacggcgtcgtgcgcgagccctcggcgttggggatgacgacgggcttgtcgccttccatcaccgcgacgcaggagttggtggtgccgaggtcgatgccgatgagcttactcatgaaactccttcacgaaatgggcgataagtgctgcagacgtgggcgtgcacagctccccttcgagcctggtggcctgcaccgggatgttgaagcgctcgaggatggcggcggttgcgggggcgggaatgtcgagcacgccgtgcgcgcattccaccgtgccgctgcccacctgcacgggcgtggcggtgatcttcttcggcgcgatgagctcgatggcggtgcagatgccgaggatggcgcggcaggtcatggcctcaccgacctcgtggaagtgcgtctcggacacctcgcagccgtgcaccttggcctccgcctcggcaaggatccggtagacctccttggcctcggactttgcgaagtcgcttgcaaccgtcgtgtcgatggcggtgcagacctcgtcgaagttgttgaggtgcaggctcgccgggatgctctcgtcgtcgacgacgtaggcgatgcgggtcttctcgggcttgtcgagcagctcgatggtcctgccgaaaatcgcctggcgcgttgccgtgcgggagaggtcgaaatggagttcgtctcgtgccactttgcggtccttcctgtgggaaaccgtgacatacagttgccttgataatgctgcatttcgcgccgcaataaaagcgcgatttccaagtgtttggctttcgtcacgtagccgccctaaaaacgaggggcatgcgccccatttgagcacatgccccttgccttgaacgagccgccagaatctagcggatgaagatcggaatccccgcgctgacgcggttgtacagctcgacgatgtcggagttggcgagcctgacgcagccatggctggtgttcgtcgtcccgtgcaggaagatgccgccaccgcagctgaccgccagcgcgcgcaagcccagcgggttgttcggccccggcgggatgctctcgggcatatccgccgcccactcgctgtgcggattgtaccaggtcggcgaggcgtccttgtacgagagcttccagtcgcccttgggcgtggagtacccggacttgcccggcgtgcaggggtagctcttcacctcgctgccgttctcgtacaggtgcacccggcatgcgttcgtgtcgacgtagattgcctgccccggcgtcgtgaccttggggtcttcggtatcgatctcgcccttgacggcgataaccgccgcgtttttctcgcccacggcgaggatctcgtcttggatggcggcaaccgtcgcatcgacgttgaccttctggcctttctcggcggctgttgccttgagcgcgttcgtggccttgtcgtaggtgtagccggcgtccttcggatccctgtcgatgccgctcgcaatctcggtcaccttgtcggagagctggtcggcagacggcacgcagactgtgatgacgttgtaggtctcggtcgtgccgccgaagagctccttgacgcggtcgatccaacgctcccacatgggcttgtcgtacggggcaaaggccgcatcgacggtcttttgggtgtcgaccgtcccgacatcgcgcaggtcgatggagaagctgtccgtgccgagcgtgagcttgacgtctgccaccagcccgctttccatacgtgccttgatggtggaggaaagctcgtctgccgtcatgcccgacacgtcggtgttgccgtcgagcatcgtcttggtggggaccttctggatgcgctgcccgtcgtcgtaggcaagcgccgcgcagcacccgccggcgatcgcagcgagcacgatcaggacgacgagcaggactttcaagcccgtgtgcttcttctttttcttgggcgcgtcttggacgtcctcggcagcttgcgcaggctcgcgcgcggggatgaccggcacaacgggaagctcgccggtgggcgtgtcctcgtcgtcgatgtcgtcgagccagttgccctgtgcctcgattctctcgaaatcatctgcgtgctcgggagccgccccgtcagccgcatcgagttcttcggagctgagcacagtcgttgcgtcggcgctcgcaccgtcctcgagaaccgccccgtccgcatggccctcatccttcgcagaatcgacatcgctctcggcgcctttgtcgtccgcctccggcgcggacacatcagccgcatcggcgcgcacctcgcgcctcgccgccgcgtctacatgctcgtcgccggcgccaggcgtatcgccttctagcacctcgcgcgcctcggggcgttctgatgctatgtcgtcgacgatggcgctggccgtctgtatgagcttcgtgtcctcgtcggcatctctaatgccgtcgacgatccggtccgcctgctcgtcgtagctttcaacgaggtccctcggcttcaggatgcccgtgagcgcgggttcctcgaccgcatcggggccctcgtcgatagtggtatcggcgtcatgtgcgccgttgtctgaaacatcgtcttttgtcatcgaaaatcccatcatgacagtcccgcatgctctgcatttctcgttctcgattgcgggttgcactatcttaccttagatttgttcaaatgtatcatcgtatcgggcgaagcaccccgagggcatgcccgccgtggtgcaagcgtaaccaaaggtcagcagcgaacggagtgtcaagtgaagattgccatcgtgaccggcgcgtcgagcggcatgggccgcgagtacgcgaagctcgccgacgcgtcgggagactacggggagatttggctcatcgcgcgccgcgaggagcgccttgccgcgctcgcggaaacgcttgagacgcccgcacgagtgctcccgctcgacctgacccgaagaaacgccgcgcctttggtgaaagagcagctcgaacaacgcgctgccggcgacgaggcgttcgaggtcggcctgctcgtcaacgccgcaggctttggaaagttcggcaccttcgaggacatgggactcgacgagatcgacgacatgatcgacctgaactgccgtgcgctcgtggacctgacgcaaaccgccctgcccttcatgcgctgcggcgcgcgcatcctggagtttgcctcgagcgccgggttccagccgctgcccggcctgcacgtctacgccgcgagcaaggccttcgtcatctcgtacacgcgcgcgctgcgccgcgagctgcacgggcggggcattcgcgtcaccgccgtgtgcccgatctggatcaagaccgagttcgtcgaggttgcccgtcgcaccgcgaacggccagaccgtcagacacccctggccgcagctttccccgcgccgcgtggcgcgctggtcgacgctcgtcaacaaggccaactaccccatcgcgacctgctcggtgttcgcgtttctgatgcgcatcgccggcaagatcattccctccccgctcatcatgtggatctgggcagggctgcgccgaatctagcacttcaaaaacacatgctagatgaagtaatatcaagcgttatggagaatggcacccagcagcaggacaatttcatactcgacggactcaaggcggcgtggccgattatggcgggttatgtcgtgctcgggctgccgtgcggcctgctttgccagcaggcgggcatgaactgggccatgtgcctgatcatgtccaccctgttctactcgggcgcgggccagtacatgattcccaacatgtggctcgccggaaaccccctgctctccatcatcttgagcgtcacgctcgtcaacacccgacagatgctctacggcgcatcgctgtcgcgcttctgcgagaacgtgagcaggccgctcacgttcctgttcggcgccacggtcaccgacgagagcttcggcgtgaacctcgcgcagttcgagaacaagaactgggacgtcaaacgcgccaccgtcgtcaacctgtgcagccaggcgtcgtggaccgcctcgaccgtggcaggcgccctcatcggcatgctcgtctcgtttccgacggccatcgcttcgtttgccatgacgtccatcttcatctgtctgctgtgcatgcagaaggtgaacgccacgaacctcatcacgatcttcaccgccgcggctggcgtctttctgtgcaagtgcatcggcctttccggcccggcgatcctcatcggcgctctgctcggcgtggcatgcggctacgcgtatggcaggcgccaccccaaggttgccggcggcaaagggggcaactgatggattggacgagcttcttcatcgtctttctcgcctgtgcaatcaccatgctcatctgccgcgtggtacccgtctttgccctgaagggacgtgagcttcccgccaatgcggtacgcgcgctcaacctcatcccgcctgcggcattcgccgccctcatagccaacgacttgctcagcccaaccgtgttcgctaacggcccctggccggcgctcatccccttcattgccgccgccctcgtgctcgtcgtcggctacaagaccaagtcgctcgtctggtgcatcgtcgtcggcgtcggctcctacgcgctgctcaccttcatctagcgatacgcgcacaacctacccacgctcccgcacgcatctcaacgcaggtgctctctcgcgctgcgctgccagatcgcattcgtgtcttgacttattgtcaccctatatctattttatggtgacaattatcccgagtcgactggagcaccgatggaacacgcccaaacccgtatttcaaccaagagcatcgctacctgcgcattgtgcgtcgcgctcctcgtcgtctcgtgctttttcaccatccccgtaggccccatccccttcacgctgcagaccgcggtcgtcatcctcatcgccttgctgatgacccccaagcaggccgccgtcacgacgggcgtctacctgctcatgggcgctgcggggctgcccgtgttctcgggcatgaccggcggcatcatccgcgcgagctcgggttttttgttcagctacctcatcgggacggtcatcgcctccgctgtgcgcctgcagctggaaaagcgcggcgtgaagcagattgtctgcgacgtggtcaccgcggtgctggtcatctccatctcggatgtcttggggtggctgtggatgatgttcttcacgcagaccgacccgcttgccgccttcctcatggcagatgctcccttcatcgcgatcgactgctgcaagggagctgtggcgatcgtcgtcgccacagccgtgcgaaaggcgctcaaaaccgcgtagaatcgtgcctgtagatcagacgcccgcacgcagggcgtcactcgagagaggcacgtcatggttttcttcttcacggggacgggcaacagcctgtacgcggcacggcgcatcgcgcaggccacacacgatcaaacggaaagcatcgcgcagctcatgcgcgaaggcacgcagacgtttgaggccgacgcgatcgggatcgtgtgtcccgtctacggtcacgaccttccgcccctggtcaagcgtttcctgcgcaccatgacctttcagacggactacctctacctcgtgctgacatacggcaaccggcacggtggcgccaccgaggtcgcgagacgcttcctcgacgggcttgggctcgaggccgcctacaccaacgacgtgctcatggtcgacaactggctgcccggctttgacatcgcgcagcagctcacgctcgacaagcacatcgacgagcagctcaacggcatctgcgccgacctcacggcacgacgccgctacctcaagcccgccaccgagcaggacctgcgcgtctaccgcgaaggactggagaaacacggcgacatcttcgagaacccgcagttcctaaacagcatgctgcagatcaccgacgcgtgcacgggctgcggcatctgcgcgagcgtgtgcccggtcgactgcatcgagctcatgcatgaggaaaccggggcgcgagcggtgcgcccggcacacgacgagccggtgtgtacggcctgtcttgcctgcatcaacgcctgccccgccaaggccatacacatgccgatgggcgagaagaaccccgacgcgcgctttcgcaacgagcacgtgacgctcgccgacctcatcgcagctaacggcagcctgtagcaggctgctcgactattggcagatctcgacctaagttcgagcgtgtacaatgaccaccatgaatacgacgacaaaagacagggtgctgcagcgcctcgaggcgcacaagggaagcttcgtctccggaggtaagctcgcctccgatctgggtgtgacccgcaactccatctggaaggccattcgcgcgctccaggcagagggctacgacatcgagagcgtgaccgggagagggtaccgtctcagcgccgcatcgaccattctttccgcggcgagcatccagcactacgtgaccgaccaccgcatcgtcgtcgagtaccacgactccatcgactcgaccaacacgcgctgcaagctgctcgccgagcacggtgcgccggagggcacgttcgtcgtcgccaactgccagaccgcggggcgcggacgccaggggcgcccgttctactcgcccaagggggcgggcatctacttctcgctgctgctcaggccgacgttcgagctcgaggacgtgtcgcttctcaccacatacgccgcttgcgtgacagcacgcgccatcgaggagatcttcgggctccagacccagatcaagtgggtaaacgacatcttctgcaatggtcacaaggtatgcgggatcttgaccgaggcccagttcagcgcagagtcgcatgcggtcacctatgtagtcgtgggcatcggggtaaacgtcgcgcgacccaaaggcggctatcccgagcaaatcgcgcacgtcgcgcaggcgctcacctccggcgacgagggcgccgaggacaagcgtgcccagctggccgcccgtgtcgcggacctgttcatgcaagactacgatcgggtgccggacaagccgtttttggagtactaccgcgctcattcgctgctggacgggaagaccgtcaccgtctatgcgggagcagattcgttcgaggccaccgtcatcggcgtgaacgacgacctgacgctcaaggtgcgtctcgaaaacggaacaacgaaggatctcgcccacggagaggtccatatcccgtcgagccagctgtagcccatgacgaaagaccagaaaacagcgctgttcgtggccatggtcacctcgttcatggccccgttcatgtcttcggcactcaacctgtccatcaccgacatcagcaccgagttcaatgccccggcaggaatctcgacctgggtcgtgaacgcctacacgctttccaccgcggcgttttccgcctgcatgggaagccttgccgacctgcgcggcaggcgccagatgattctcgtgggctgcgtcgccttcgccgccacgagcgccctgtgcgcgctgtccaccaacatctacctgctcgtcgccttccgcttcctgacgggcgtctctgccgcggtcgttctggcagcaaacatcccgctcatgctcttgtactttgcaccgcaggtcaaaggccgcatgctcggcatttccgtgagctcggtcttcgtgggactcgccttgggcccgacgctcggcggcgtgttcaacgataccctgggatggcgcacgatctttgccctcggcatcgcgctgagcgtgctcgccttcgtgttctgcctgcgtctggaagatgactcgaaagacgcgcccgcgagctttgaccaccgcggcaacacgctctacgtgatcgcgatcgtgctgctcatgctggggctcaccgagcttgcgacccagcagtggggaccattcgtgctcgctgcgggcgtgttcgtgctcaccgtgttcgtcttgctcgaatggcgctgcgaacacccgatgatacacgtcaggctctttgccgagagcagggcctacgggttttcgaacctggcgacgatgctcaactttgccgccgtctttgccgtcgcctacaccatggccatctacctgcaaaacgtcaaaggactcgacgccgccatggcaggcctgctcctcgttgttcagccgcttgcccaagtcgtgctcgcgcccgtttcgggccgcctgtcggaccgctttgcccccgccgccatcgcgacgactggcgtggcactgtgcacgtgctcgctcggcatgctccttacgctgagcgccgacacgcccctgtggttcatcgtcaccgcgctcgtcgtgctcggcatcgggctcggggccttttccgcgcccaacaacaacgccatactctcgtgcgtcgaccgcagccactactcggaagccaacgcgacggtctcgaccatgcgcggcatcgggcagacggcaagtctcgcctttgcctcgacgatgctgtcctcgtcgctcggttcgacgattatctcggagtctgacccgcaggtgctctctacggccatcgcgcagatcatgttcgtgtgcttcgtgctctcggtgctgacaatcgcagcgtcgctcgtacgaaacaagcgcgcgtgagagaagggggctcgcgccccgcatcgacggagacaggtgtcccatggcctttcgcccgatacccaagcatgccaaaaaccacgccccatatctacgcgccgctgtgcgaacggtagcaaaaaatcgaccaaaatcggacaaaatcgcaggtcaaccgctcacggaatcatgacggccaacaatgaacaggcacctcggaccccctcgtttcatcgctaagattttttcatatgcgatgcacgaaaagaagggagtctagatgcacacggtaaacctcagcgacgttgccgtcgccgatcgcgaactagcccagaccatcgcgcagcgcgccaacgtcaacttgcgcgactgctatcaatgcggcaagtgcgcagcgggctgccccatggcagacgacatggacctctccccacagcagatcatgcgcgcgctgcagatggggctgaccgaaaaggcgctgagcgccaccggcccatggctgtgcgcgcagtgcatggtgtgttccacgcgctgcccgcaaaacatcgacatcacgaagatcatgcgggaggtgcgccgcgagtcgcatgcccgcgggcaccgctgcatccccgagagcaacgcgttcgagacgcagtttctcaaaggcgtcaaggccgacggccgcaacaacgagcagtacctggcggcgtttttcaacctcaagtcggggcacctggcgcaggacatgctcagcgcgcccaagatgctcgcgaagggcatggtcggcatcggcaagcactcggtcaaggaccgcgatgccgtccgcaaaatctacgagaaatgcctcgagaaggacggtgagcagaagtgacagagctcaagtactcgtggttcccgggctgctctgccggctcgacgggaatcgcgtacacgcaatcggccaagtacgtcgccgacaaaatcggtctcgagatgaaagagatcgacgactggtgctgctgcggcacctccgccgcgcgcatcaccgacgacgacctcatgcacgccctgcccgcgcgcagccttgccctgagcgagcgccagtaccccggcctcgacattgtggcgccgtgcacgggctgctactcggcactcaagggcgctcggcactgggcgcgccaaagcgaggagaaccgccggcacgtaagcgagctcatcgacatggactacgccgccgaggctgacgtgaaaagcctgctcgagatcatggtcgagcccgacgtggtcgatttgaccgtctcgaggctgcaaaagacgctcggcggcatgaagatcgcctgctactacggctgcacgcaggtgcgccccgccgaagtctgcaacttcgacgacgtggaaaaccccaccagcatggagcgcctgctcgacgcctgcggcgccgagtgcgtgcaatggggcttcaagacggagtgctgcggcgcctcgaaccacgtggtcaagcccaaagccgcccgcaaggccgtcgagcggatcttccgcaacgccaaggcctgcggcgccgaggccatagtcacctcgtgcccgctgtgctggctcaacctcgacatgcgcgagcagcagatcaactcggagatgggcaccgactaccacctgcccgtctactacttcacggagctgctcgccatggcgatgggcgccacgcccgatgaggcggggctcggctaccacttcgagcctgcggcccagctcgcgcaggacaggatcgtcgcggataccaagaccgaggaggtgacgcgatgagcagaatcggagtgttcgtctgccactgcggcacaaacatcgccgcaaccgtcgactgcgaggcggtgcgcgactatgccgcgacgcttcccaacgtcgtgcacgcggaagacaacaagtacacctgctccgaccccgggcaggcaaagatcaaagaggccatcgagaaatacgacctcgaccgcatcgtcgtggcggcctgtttgcctgccatgcacgaggtgacctggcgcaacctcctgtcgcagaccaagatcaacccctacatgctcgaagtcgccaacttgcgcgagcagtgctcgtgggtccacaccgactacgacgaggcaaccgccaaggcaaaagagctcgtcaggatggcagtcgccaaggtcgaccgcaacgtgccgctgttcacgcagcagattcccgtcaacaagcgcgcgctcgtagtgggcggcggcatcgccggcatgcaggcggcactcgacatcgccgatgcgggctaccaggtgaccatcgtggagcgcgaggcgaccatcggcggcaagatgcccaagctcgacaagaccttccccaccatggactgctcggcatgcatctgcacgcccaagatgtccgagacgggcaaccaccccaacatcaccgtcaagacgctgtcggaagtcgagaaggtcgacggctacgtgggcaacttccaggtgaccatccgcgagcacgccaagtacgtcgactacgacaagtgcacgggctgcgggctgtgctccaccaagtgcccgaacaagcggattcccaacgagtggaacgagctcatggacacccgccccgccatctacaagcccttcgagcaggccgtcccgtccaagccggtcatcgaccccgagcattgcacgatgctcacgcgcggcaagtgcggcctgtgcgccaaggtgtgccccaccggcgccatcaactacgaggacgtcgacaaggtgacgaccgagacctacggcgccgtcgtgctcgccacgggctacgacctcatcaagtggcaagacatctaccccgaatacggtgggggcgcctacccggacgtcatcgacggcctgcacttcgagcgcctcgtcaacgcatcgggccccaccgaaggccacatcctgcgcccctctgacggcaaggagcccaagtccgtcgtcatcatcaagtgcgtgggcagccgcgaccccaacaagggacgcgcctactgctcccgcgcctgctgcatgtacggcgccaagcacgcgcaccagtacctcgacaaggtcaaggacgggcgctgctacgtgttctacatggacgtgcgcacgccgggccggcgctacgacgagttctacatgcaggccaaaaacgacggcgcgctgtacctgcgcggccgtgtgagcaaaatctacaaggaaggcgaccacctcgtcgtgctcggcaacgacacgatcctgggcgagaacgtgcaggtggacgccgatatggtcgtcgtcgagaccgccatggtgccttcggcgaagtcgcgcgagaccgccatgctgttcggcgtgcaatgcgacgaggacggctggatcaccgaagcacaccccaagctgcgccccgtcgagaccgcctcgcgcggcatctacctggcaggagccgcccagggccccaaggacatccccgacaccgtcgcccaggcgggtgccgcggcgtccaaggtcatcggcatgttcagccacgacacgctcgactccgagccgcagatctcgcacgtcgacgtctcgaagtgctcgggctgcggccagtgcgtgccaatctgcccgtacggcgcgctgagcttgcagcaggtgacgctgcacgagaactccgtgaaggtcacgcgccaggtctgcgaggtcaactccgcgctgtgccagggctgcggtgcctgcaccgtcgcctgccgcccaggcgcgctcgacctgctcggattcaccgacgaagagattatgagggaggttgacgccctatgtcagtggtagaacagaccgaccagaccgccggcactgccgcgttcgaagagttcaggcccaagatcttggcgttcacgtgccgctggtgcacttacaccggcgccgacctcgccggcctcaaccgcatgaagtaccccgcagacatccacctgctgcgcgtcccgtgctcgggaagggtcaacccccagtacgtgctcgaagcgctgcaacgcggcgccgatggcgtgctcgtgtgcggctgccatcccggtgactgccattacgcgacgggcaactactacgccaagcgccgcatgatgatcttcaagcgcgagctcgagttcatcgggctggagcccgaccgtttccagatcaagtggatctcgggcgccgaggcgggcaagttccgcgacaccgcgaccgccttctgcgaacgcatccgcgagctcgggcccatcggcgacgacttcaagctcgagccctcgctcggcgcctccgtcatgggcaagggccccaagcaggcgcccgcagccgatgccgccgacgcgcacgaggaggggaggtagtcatggcagacacgcaagggcagattcgcacccgggcacgccagctgctcgaagacggcacaatcgccgccttcgtgggctgggaggccggccgattcgacaagcagaccacgccgctcgtgtgcctgactcccgacgacaccgaccggctcgtcttcgacgagtactgcgtcaacaacctcgccaagtacgtcttggacctcaagcagcgcggcaagatcgggctgtgcgtgcgcggctgcgactcgcgcgccataaaccgcatggtccaggacaaccagttctcgcgcgacgacgtctacctcatcgggcttccctgcccgcagatgcgagaccgcaagacaggcgccgtgctcaacaagtgcacgtactgccagcaccgcaaccccgtcacgagcgacgagctgatcggcgagcaggtggtggagacgcctccggcagaccgcttcgagcaggcgactctcatcgagggcatgagcgggcaggcgcgtcaggacttcttcaacagggcgtgggagaaatgcatccgctgctacgcctgccgcgacgtgtgcccgtgctgcacctgccgcacctgcttcgtggaccagcggcgcgttggctggctcggcaagcagaacaacctcaccgagaaccgcttctacgggctcatccgggccttccacatctccgaccgctgcatcgagtgcggcgagtgcgagcgtgtctgcccgatgggcctgccgctcatgagcctgaaccgcgagctcgtcaaagacatgaacgagctgttcggcgaatacgagagcggcatgacgaccgaaaaccccgacgtgctgcgcacctacgacctaaacgacctcgaagagttcatgtaggaaggaggacctgacatgctgttgagaaaggacaaactggacgaacttctcgccgagctctccaagcaggcggtcgtctacgttcccaaagaggtaaaaggcgtgctcaagttcgcgccctacatcagctccgacaagatgcgcctcgacgcgaccaacactaccctgccgcccaaggacctgctgttcccgcaggcgcagaagatgtaccactacggcgtcgacacgaacaacaacatgttcatcgacccgatcatcgagtcgagcgagcaggtgctgtttggcgtgcgcccgtgcgacatgcgctccatcgactgcctggacgacgtgttcttcacgaagggatacgtcgatgagtactacgaggccaagcgcaacaagatcacgaccgtcgccatcggctgcacctcacctgccgagacctgcttctgcgagtcgatgggcatcgaccccaacgccgcgcccgcagcagacctgatgctgcgcgactgcggagacgcctacaccgtcgtcgcgcagaccgacaaggggcaagacgcgcttgccggcgcatgtaaggccttcgtcgaggaaggcgaggctgcccccaccgacgtgcactgcacgctttccgtcgacggagcaggcatcaaggagaagatcgggcggctcgccgacagcgacgagctgtgggatgccatgagcatcaagtgcctgaactgcgggacctgcacgttcgtctgccccacctgctactgcttcgacatcgaccaggagaaccgcaacaaggagggcgtgcgcttccgctgctgggacagctgcatgttctcggagtacaccgagatggcaggcggccataacccgcgccccgagaagaaggaccgcgtgcgcaaccggttcatgcacaagctcaactacttcgaggaccgctacggcaagatgctgtgcgtcggatgcggacgctgcgtcgagaaatgcccggtcagcctcgatatcacggtgctgatcgacacggtcaacgcccttgcggaaaaggaggcggcaaatgcctgagcccatcgtgatcgaacacggctgcgcccgcggcgg

SEQ ID NO: 814 - DNA, 32759 bp, Unknown
  16S sequences of unknown bacteria
gaagcgagttcacgctaatcctttaaattttgaaaatcagcgtgaacgattttctactttttctcgtcttactcggatgatgttctgtatagggacgtaagtcttgaggatcgttcacgctttttgaaggcaaattggcttattagcgtgaataagaattagaatcctgaaaactttgcaaaaaccgttcacgctaaatctcgtttttcggacaaaaagcgtgaactcatatcgaaattctaggcatatgcgattctacgcacgcgataaagacaatataaatagacttttttgaaaaaatggcgctgatgatgaaatccatttccatcaccaacaccaaaaggtatagaaccctactttttctcttcctccggatttttctccgtcggttccgtattcaagttcagatccaaatccgtctgctgatgcagcaggccaatcaaatctaccagctcgtctttcttggaatccagggttttgaaagtgagctccggattccggttcttctctgtccggtattcgtccatcatgctggagaaaatcacggaagaggaaatcggtgtgtagacgatggcattggcaccggcctcaatggtgcggcggatggattcgtcggtcttgccgccgctggcgataatcggcaccttcgggaagtccttccgaatttcccgaaccacatctgcggtgttctttccggctgccacgttgagaatggtgacgccggcatccagccgttcctgaattccggtggaatcaatcactgtggaaaccaccgggatatcgataacccgcttgatgaatcggatattgctgttgctcatgggattgttcaccacaacgccgaaagctccctgcgcttccgcatcctgagccatgtacacggagcgaagtcctttggtggtgccgccgcccacaccgacgaaaacaggaatggaggaggcgttgatgatggcctcggaaataacctgctgcggagtgaacgggtacacggccagaaccgcatccgcatcacagtttcgaataatggcaatatccgtggagaaaattaaagatcgaatttttcgacccagcacgatgatgcccgaagcttctcgaattacttccggcatttcaatggtatgggcacgaagtgtgccggttattcttggaattgattcctgcattgcgaaccctcctcttactttcaacaaaaactgtcagaatataacatggggaactgcatttctcggcgaagcacagttctgtatgttcataaaatcaccggataattatacacgattgcgccgaattcgaacatatccaaatgtgtatttttgataaaaaattgttgtactcggtatcgacttccggcgcagaatagtccaaaggctattgaaaagattctatcgagatactataatgagtacattcaggaggctttccgctgggaggcctctttttagttggaaaggagagggagcaatgattgaatgcctggtagtgggcgccggcggcttcgtgggggcggtgctccgatatctcgtgggacttctggatatgaacccggaaagcggtttcccgataaaaacatttatcatcaatattgcgggatcgttcctcatcggtgtggtggcggctctggcgtcccgggaggccttgaatcctcggacggtgctttttctgaaggtgggaatctgcgggggttttaccacgttctcttccttcgcactggaaaaccacaatctgatgatgaacggcgcttccggcgtagcactcacgtacatgggggtgagcctggtattgggaattctggcggtgtacatcgcccagcgcatgttcggcgcctaagggtaaaaaaccgaaagaaatccgaaaacaatatcccatcgcttatgggaatgtggtacaatgataacaatttatgaaataaggcaagacaaggagattaggtcgatatggaatttatggaagaacggattcgcagagacggcagagtggcaccgggggaaatcctcaaagtagatacctttctgaatcatcagatcgatgtcagtctgattcgtcagattgcaaaaacactgaaagaacattttggggaccgggagattaccaaggtggtgaccatagaagcgtccggaattgccattgcaagcatcacggcagaggagttcggcgtgccaatggtgttcgccaagaagtccaagagccggaacctgaattcggatacctataagtcccgggtatattcctatacccacgaccgctattacgatatcgtggtgaacgagaatgccctgaacgacaacgacaaggtgcttctcgtggacgatttcctggcaaacgggcaggccatgcagggattgctggacatctgccggcaggccggggcggatgttgccggaatcggcatctgcattgagaaatccttccagccgggcggaaaagcacttcgggaagaaggatacgatgttctgagcatggcaaagattaagagtctggagaacggaaccgtcgaatttgaataataaaaaatcgaatcgtcaaaaggagctgcgcagtaggcacactgcagcagctcctttttcaaatccgaattttaatctcccacaattaccggtgtgccgatgtcaaccttttggaacagttctccggcggcgtagaccggcatattgacgcagccgtgagaaccgccgtactgatagatatttccgccgaaggcaccacgccactcggcgctgtggattccgaaggaaccgccgataaaggccatccagtattgaacggtgacatcgtaaccctgccccttgaggcgggtgccggtgctcatggaattgatatagtaacttccccgaggcgtatcgtgaactccttgggtgccggtaaccaccggcgaggacatattgattttaccgtctacgaaataggtcagtctttgtttcgggatgctgacgtagatgtaggttcccatggcgccgtatgccggtttctgtacgtggaaggtggccttggcctgggaaatgttgccgtaggggtcggtggcagtggcgtgtacgatgtagttccgaaccttgtgaacgttgatcttctcgtgggagagcttcagcttcactttgccggaattgtcggtggccttgaacattccttttagcagatcctgaagttcgtagtccgtcagctccgtatctttgaaaatatagacgtccttcgccttcttgaatttcggcttttccatatccttgatggtcacctgatatttccggtagacctgatcctcgtagtagatggtgaggggataggtgccgggacggtcgtatttgtgcccggaaaccttatttccatgatagacgacggaagagttcttctttacgtatttctgttcttctttggacaaggtatccatgttcacgtattcggatatgtccgtagataccgcggtgccgtagttgacataaatttccgggtgggcgtatttctgattcagctccagcagcggaccgcatccggtgagggcgaaaaccgccatcaggcagagcagcagcggaatcacccgccgacgtattttgcttggcataaaacatcctccattaatgtgcgtatgtcttgagattatactatagaaatcattttgtcgcaaataacaataccgcagattgtacgaaaaaaagtgtttgtagaaaacaacaaaaaaattgaaaaaattgttgacaacttcatgaaaaaagttataataaggtaagtcaactgaatagacctgattcgatagaggttgcggaaatcaagagtacggagttacggacgcagaggatgcggtaactcgggaaagggaaatccgccgaaggctgaagcatcctacagcggaggcctgggacatcgcagaatatgcgatggactgtcacacatgtggagcgctatcaatggtatatatttgtacaggaagagtttttttgagtacttagccatggatacgtttcagacgttattcagggcttttttatttacattttacgagaagtctgcaacagaaaggtattgcagagaaaagggaggattaaaatgacacattcaattcgaacaaggctgaattacatcttcggcctagcgattctgataatcgcttctatgccggcactttgtttcgcagcagaggaaacggcaaagaagccggcactgtacgcaaccggattttcggttctgccaccgctgatcgccatcgtgctggcgctgattacaaaggaagtatacagttccctgttcatcggcgttttcgcaggcgcggtactgtatgccggtgccaacttcagcggcatcatgaaccacctgctgcaggacggcatcatcgcatccctgtccagcgccggtaacgtcggaatcctgattttcctggtaatcctgggcatgttcgttgccatgatgaacctgagcggcggatccgctgccttcggggaatgggcttccaccaaggtaaagagcagacagcatgcgcagttcaccaccatcctgctgggaatcctgattttcgtggatgactacttcaactgcctgaccgtaggaagcgttatgaagccgctgtccgacaagttcaatatttccagagcaaagctggcatatctgatcgacgcaacggcagctccggtctgcatcatcgctccaatctcttcctgggcggctgcagtatccggcttcgttcaggggcagaacggactgaccatctttatccgcgcgattccgtacaacttctatgcgctgttcaccatcgtgatgatgttcgccatcgttgcaatgaactttgattacagcaagatggcaatctatgaaaagaacgccattgagaacggcgacctgctcaccgttcacgagaacctgtcctctcaggacgaagagatttctcaggaccataacggtcacgtcgcagacctgattgttccggtaatcgtgctgattatctgctgcctgatgggaatgatctacaccggcggattcttcagcggaacatcctttgtagacgcttttgccggctgtgatgccgctgccagcctgtcactgggcagcttggtcgcactgctgattaccatcgtatactactgtgcgcgccgcgtcctgacattccgtgaatgcatggactgcgttccggaaggattcaagcagatggtatccccaatcctggttctgacactggcatggtccttgaagtgcatgaccgacagcctgggcctggctccgttcgttgcaggaatggttgaaaagatgccggctagctggatggcactaattccggccgttctcttcgtcatctcctgtgcactgggctttgcatccggtacatcttggggaactttcggaatcctgattccgattgcgctggcaattaccgcatcccgtccggatatgatgattccggtaatctccgcttgcatggccggcggcgtgtgcggtgaccactgctcgccgatttccgacaccaccatcatggcttcagccggtgccggctgcaaccacatcagccacgtggagacacagctgccatatgcacttaccgtattggttatctccaccatttcctacgtcgttgtgggattcaccaagtccgcaattccgggactgattgtcggtgtggttctgctcttcctcttcctgaacatgatgaagaagagacaggcacgcatgaacatggtggccaacgccgaagcgtaagaatatcgtattgcgagatatcgagacttcctaaaaaaacattttgcaagccggggcttccgagggagctccggtttttcgctgggcgaaataggtggacttatctcctcaaacagaatatactttacatgtaatcttccggtgcacggatgaagaggggaggaaaacgatgaattcatgggaacagagttataccactgatgaaattctggagatgattcgaaatcacgacggaaaagaagtattgaatcttcggaaatgcgaaatccaaaatgcggatatttccggctgggacattccggagaacattgacttcgagtggagtgtttttaccaatgtaaacatgaccggaaccacctttcgaaaatgcaatctgaatcacgtgtggttcaaggagtgcagtacggagggcattcggtttctgtactgtgacgtgcgggaggcgaatttccggtggatgaatttccggggagcggatttctccggctccaatttccaccataccttgtttgaatatgccaataccgaggatataacggataacgaggacacgaaatttttccggatggtgtgtccggaaaccgggccgttcatcgcctggaagtgctgcacggagcttcgggtggtgcagctgctggtgccggcggatgccaagcgggtgtcggccacggcggaaacctgccggtgcaataaggcgaaggtactgtccatcaagagcattgatgagacaaaatcctatgattgggcccagtccacggtggatccggatttctactacgaagtggggaaatgggtggagccggccaacgggtttgaagagaaccggtggcgggattcttcacagggaattcacttctttatggaacggcagcaggccgtggattatcaatcgaaataggaaaggattattgtttttttatgaattttaacgattacagcgacgatattgtatttggttttaacacccgtaccggcggcgtcagcaccggggtgtacgattccatgaatctgagcctcacccttccggacgatccggaagatgtcaagaagaattacgaaatatggtgccgggacctgggcgttcgtatgcaggatctggtcatcggtctccagacccacaccaacaacgtggttcgggtggatgagcgcaacaaggggcaaggacttttccgaacccgaatgaaggatgtggacggaatggtgaccaatgtgcccggtgtggcgctggtaacttatcatgcggattgcacgcccgtgtacctgtacgatccggtgaaaaaagccatcggcatggtgcacgccggatggcggggcacggtaaaggaaattgccggagcagcggttcgaaaacttcagacggagttcggaacggatccgacagacctggtggccatgatcggtccgtgcatttccaaagaatactttgaatgcgaccgggatgtggtggatgcggtgcgggccatgaatattccggcagaggaaatgatttcctacgacacggtcaaaaataaatatcacgtctccatcgccggggtgaaccgtctggtgctggaagcggccggcgttcccggggatcatatcgacatgcaggatcggtgtacctacggaaatcccagcttgtttttctcccatcgccgggatggactgaagagaggcggtcactgtgcattgctgatgctgcggtagattttgcgccaaccccataaaggcagagaattcggttgaaaaaaagcgctgaataggttattctaatataagtgttgaaaattgaagtaaagggagtgttattatgaaaattacatggattggacattcgtgtttcaaaattgaagagggtggatattccatcattatcgatccgtatcaggacgattgcatcccgggactggctccggttcgagagaaggccaacgaggttctgaagagtcatgagcatgatgaccacaatgctgtagacaatgtggaaatcgtaaagactgtggcttctccgtttaagattaccaccattgatacgttccacgatgagaagaacggcaccgagcgcggtaagaacaagattcatatcatcgaaacaaagaatcagcgggtggcacacctgggcgacctgggctgcgagctgacagatgagcagatgggacagctgtatcaggtggatgcactgctgattccggtaggcggcgtctacacattggatgcggcacaggcggcacagctcaccgtggatctggatgccagacataccattccgatgcactacaagagcgtagaaagcgaattcgatttgccggagctgggcaccgtatacgattacaccctgcgtctttccggtgtgtgggtgaattccctgaacaccctggacctggacgagaattatccggcaaaggtagtggttctccagccgcagaacatgaccaagaagttcatgagcatcggcgagatggagaaaatgagcaatacaaagaatgcgaagtagccccattcgaatgcggcaaaaacaaatttaatgaagccaaaggtgaccggtgggaacacaaaaagttctccgccgcgtcaccttttttatttggaaatgacaatacattttcggagagatgtggtataattcaattaacccaattaaaggaggtcacaactatgaaggttatgattacagcgaagaattataagccgagtgagcgtctgcaggacaacatcgagaagaaattttcgaaattagagaagttcttcgatgaagatgttaccgcgaatgtgattgtttcgaagttcaaggacaagacgaagttggaagcaaccatcaataccaagcagacactgttccgtgccgaagagatttcggacaacgtgtacgaggcaatggatctcatcatcgaccgactgtccagccagatgaagaaattcaaaggcaagctggaatcccggtacaaggagaacaaggcgctgaagttcgagttcattccggacgatgaagaggaagaagataatctcactgttgtgaagagaaaacagttcgagctgcagccgatgaattatgaagaagccattcttcagatggagatgctgggacacaatttcttcgtatacttcgatatggatacggaatccaccaacgtggtatacaaacggaagggcgatgcatacggtttaattgaaacatacagatagaaggcaatccgatccctatccggacgtgaccggacaactgaatattgattttatggggctgtcatcgaggcagccctgtttttatgaagtgaaaataggtaattccccggccttgccgcccattttcttgacaccgcaaaagccctacggtaatatattgacatgagtagaagaactccgaggagacagggcgcatcggtgtcgagacgaacatctcagcacggaaatgccggccggacccgggcgggttccagggcatcccggaatgcgtctcggaagaacggcggcggccgaagacatgcaacgaaacaaagggcatataccacctccgagagtcggatactggacttcctggccaccataccggccatgattgtgattcttattaccctccgggagatttttctggcggtaacgaattccgcaatggggaaggaacagtatacgaaattcccggagctttttcaatttggcaattttattatcattattgtagggattctctatgtcgtgctgtccaacatggttccggtgaaaaagaagcccctcctgcagcggaatccggagtttctgttcttcggtatctttatgatctgcatggcgctttccaccttggtgaacggcatcgatgggaaagccatccacggaattccgtatcggaatcagggcatcttccattttgccttttacatattgatttattacttcgtttcgtccaaagtcaagctgcagcagcttcggaagtttgtgctgctgtcctttctttttaccgcggatgtgctgggcgttaccgcaatcgggcatcagttcttcctgaacatttcggcctattccgggaaaaaaggcctgagtgcgatcttctttaacagcaatcactacggatattttctggccatggctttgatggtggcggtaactgcttttatcgtgggcgataaagtgtgggtgcgggaattcggcttcctgtccgggatgctgaatctaatcgtactgttcatgaacaacaccttcggagcgattctggcttctttcatcagcttgctggtggtgctgttcctgtctctgattaagttgccaaagagcaagtggcgggcggtatcggtggcatccctgattatcgccattccgctggcggggggcgtgctgctgaacgcccagttcgacaatttcgtggtgttgctgcaggatattggaaaaatcatgtccggaagttccgatgcggcatcggccggaaccaatcggtggggtcagtgggtcaaagccgtgcagtacattcaagagcatccgcttctgggatacggctgcgaggggatggcggaccggatgatgaacgatatcggcatttccaatccccacaacgagctgctaacctatgcgctgttcttcggcgtcccggcggcggtgtgctataccgtggcggtgctgatgattttcttgcggcaccttgtgagcggtgcctggaaggatccctatgcactgatggcgttttccgccgcattggcgtatttcatctcctcatttttcggagtggccatgttctataccacaccttttttctttatcatgctggggtacagctccgggaaggggaaacggtgaggaaaatatatcagatacttatcacaccctccgcaagtgcttatcactacattgtgttgaaatattaacgagtggcaattgttttattttaatggcaaggaggaaacatgaaaaaaaggtatggtataattacaattttattggcggtattatttttttcaatatcaactgtatttgcaacaactgattcaccgatagatgattcagatgctatagatggaggaatatcaaatagcgagtacgaagaagaattcgacaaggtggttgaacgtatttataacctaagagaagaagggttttccttcgaagaaattgatagtgcccttgaaaaagacagtatcaaaaaggaaggggcattaaatgtcaaaggaatgagtccatcggataaattttatgattatgcgcacttgaatgatattgagaagaaattgtttaaggagaatagaagcaaagctttgctgtgcttagccaacggcaaattggcgctaaagtattcacaagagatgtatgagagtagtgtgctacataatggaaatggagatgcttttaggcatactttgtggaattatggaatggcaatcgatgtaggacaaggcttcgcaaaaaaatgggccgatgcacatgaaaatggagcaaaaggacaaccgaagcttgagaagcagatggatttgtataacaataaaataggcaggaaattggcaaaaacctatccaaacactaaaagtcattctacttttaagaaaaactctagggctaaggttcgtgcaggaaagtgccgtattataagtggaaaagaacttgttaaatcatcaaagaagggagaaagataaaaaagaaaggcgagtgaatttatgaaaaaagcgaacttattttttctgattacaatgattgttatcggttgtgttgtatcgggatgcgccgaaaatgataatgcagaaatagtgaagaaatcttctaagttgcaagaaataaacctgactttgaacaatgggaaaagtgtaaatgtgacggaatcagagaaaatagaagatatagtgaaggtaatcaacggtgcaacacctacaaaagaagaatctgtacaggatgtaccggatgcagagcagtatgaaagaattatccttgtatcgaaagaggatgaaagaaccctgtattactatgaaagagagggtaaatactatattgaagaaccgtatgtaggaatctatcaatgcgatcaagatcttaattcgtattttaaatccatcgcggacctctaaattcggagcatgtgaaaaaaagtctctttgtcaaatggtgttggtgaagagtaaaagcgatacatatcgagtagccgttacgctgctcgatattcttttttcggttctttcccgccgttacgtcatatattcaggaattagagacgatggtaaaaggaaattcaatatgcctagaatttcgaagcgagttcacgctaatcctttaaattttgaaaatcagcgtgaacgattttctgctttttcccgtcttactcggataatgttctgtacagggacgcaagccttgaggtttgttcacgctttttgaaggcaaattggctttttagcgtgaataaaaattagaatactgaaaattttgcaaaaaccgttcacgctaaatctcgtttttcgggcaaaaagcgtgaactcacctcagatttccagacatatgagaattcacgtgcgtgataaagacaataaaaatagaattgctttttgaaaaaatggtgctgctgatgaaatccatttccatcaccaacaccaaaaggtatagaacctatatttttcactgtcctcttgacgggaagcggttcaatcggacttacttccggatgatgactcgggtgccgttcggaaccatcttgtacagcttgctgaccttggagcgcggcatgttcacgcatccgtgggagccattgtatttgtagatggaaccgccgaattgggaacgccaggaggcatcgtgcatcccataggattgtccgatgaacggcatccagtagtttacgtggcttacatatcccggaccggagagatttacgttccgagctttgtgatgcagtttgaatcggccggtaggcgttccgcatcctcggccgccggtgaccacattgctctttagttttaccttgcccttgacgtagtacttcagcgtctgatcgctgatatcaatcagaatatattttttgtaattgtacggaccgtagcttgcccggcggtactgcttcttggtgatggcaccggtcttcttgttgggacggatggtgacatcgtggtatttaaacttgttggttttcgccttagcggcggaatcgaaatagtagtaatactttccggatttcaccattttcttggtggtgagctttccgcctttattgcaataataggtgttgctcttccaacggaaacgacctttcgccgtgcggaggacgcctttggaatcggagtagtagtaatacttcccccatttgtacacgccccgcatgatgacaccgtttccggctgcccggtaggttttcttgccgagcttgaatgtctttcccgcgagaatctgtccgccgttctgaacgtagtagagtctgccgctgcaggaaacgaagccttttgccgtgcgaattgcgccttttccgtcggcgtaataatacgctttgccgattttcagaattcctctttgcaggataccgtcgttattgaaataatacttttttccctcgatggtattcattccggtgacaaaatgattctccgtatcatagtagcgggtctcattgttgtccgaaacccagcccaagttctttggggattccggagtagtcgggttttccggggatgcagaattttccggtttctgttcttgattttgttccggattctgctccgaaaccgctgaatccgactctttcgaagccggcggttcgccggattcttgctgcaccgcggaatcggtaccggtcgcagcggtgtctgctgcgaagacgctgttcatgctcagcgccagggttaggacgagcagcagcgcgaaaaatgaaataaaccgattcttaccaaaatgtttcatcagtttgaattccttcctttgattttctgataattattcccattcagtgtagcccttttcgtaacagaaagctataaccgaatggttcaattctggggactgcattgggaactacaatgtccaataatttagatccacccgtcctttaattcccggaaccttcccggagctggtgtactgccagcatcggtatgaacccttgtaggtgacggtgtcgttgtactgcgccacccatacccgatagccggacagcttcttcatgtccaggttgttgttgagccagctggtgctggcataaatcatcggggtataacccttggatttcacatagtcgcaaaaagcttttaccgccgcggttcgcttggaccggttcagcttcgatgaggatgctcgtccgcccgggtaattctcggtatcgataaccagcggcaagttgagtttgcaaccggatgccttcacctgcttgacggcgaaggcggcttccgcctgagcttcttttaccgttcgtgcctgcgagaagtagtaggcccctacgtccaccccggcttcggtggccttccgcatattatccttaaaggtactgtctgcacagcgtttgccgttggaagttccggagtagccgcaccgaagaaaggcgaaactgatgccgccggatttcacctttgcccagtcgatatccttcccctgataataggaaacgtcgatgcctttcatatatttccgattcgaagagataatggatccggatgcgttcgcagtgtaggtgtattttcccaccttaaaggtgccggtgggggcagcggccttcggcccggcgtagtaaatgttgctcccgctaaaataaaagcgatgggtatacagggtgccgctctttcggctgtagtaggactttcccttccatgtaatccggccggccttcttccgcagctttccggtggaagtggagtagtaatagtattttccccatttgtgcacgcccaccttgatgcgcccgtcggaaccggctcgataggtgtactttccgattcggaaggatttgctcttctgaatcttcccgccttttcgaatgtagtaacggttcttcttccaggtgacgaagcccttggacttccgaagccgccccttgctgctggagtaataatagctttttccccatttgtatacgccggtttttatttgaccttttttgttcgcccgataggtgaatttacccaccttgaaagtctttccggtttgaattcggccgccttttcgaacgtaatatttatttccgttccaggtgacaaatccggctttcttgcgaattttccccttgctgtcccggtaaaaatagtatttccctttgcgaaggaccccggctttgctcttgggtttggacggtttctcggacggcggctggattgcgttcgcttcttttaccgtaaaacgcatccggacactgtcttcgtatagaatttcccagctgccgattgcatcggtgctcagaagatagagacctttcgaatccggctgaaggaggatttccttagacgaatcggtggaacgctgccagagaaccggtgcggtgccggagtcttcctgcgaagaggtgccggattcggtggattcggcacctgaaaaacgcaggtatattttcttattctgctcaaaagtaaccgattgactcgaatcgcagctttgccagctttccgcattggacgaatccgcagtgtattgcaggacatccgttttcccgaaacagggaaggggagcgagcatcattacaagtgcaatgactgcggataaaataattcgattgtatttcatgaaaaaaatcctttcatttgatgattgatgacggaataaaatctgcattgttatctcttaattataatataggagcttccggaagggaagaatataagggaaaacaaaaaagagatgagggaaaatctcatctctttcttcgggaatgtgatacggtatgtgtaggtggtaccgaaatcaaattctcatgtgtataggtgtgtaaatttatgatggcgatttaataataccagtagtccatatctacgcgggtgctgattccgtttactttgccggaactggtgtactgccagcatttataggagccgccgtaagtgaccttcttgtaatactgagcaacccatacatagtagtcagacagcttgctcatattgagctgattgttgagccaactggtgctggcatagatcatcggcgtatatcccttggcttttacctgcttgcagaacgcctgaaccgcttcggttctcttggtcttggaaagtctgctgctggatgcccgtgcaccggccaggttctcggtgtcgatgacaaccggataggtgacatttacaccggatttcttaatctgcttgatgcagaaatcggcttcttccttgccttccttcgcattgatcgcttccgtaaagaagtagatgcccacatcgattccggctgctttcgcgcccttgatgtttctcataaaagtactgtcggtgcacaatttgccgttggtgctcccgcggtaaccgcagcgaatgatggcgaacttcacgccggaggctttcacctttttccagttgatttcgtactggaaataggatacatcgatgccgatgaccttgccggtattcagctcgataatccgacccgtggatgtggtcttgtatttctttccatccactttgaaggagccggtccgaatggcaccggtggaggaggcgtagtaccggtctccgcttacggtgatgaactgattctgatagatctttccgccggatgcggcatagtaccgctttccgttgtaattaatccaacccttggtggtcttcacccggcagttggaatcaccgtaatagtacttggatccgtatttgaagattccttttcccaggcggccggtggcatacgccttataagtgtagccggaaaccttgaaggtgtgaccccattcaatctttccttcggaattcacatagtagcggtctccgttgtaattgacaaatcccggggtggtttttaccacgccgttgctgtctgcgtagaagcgggaaacggttccgtatttgaagacgccggttcccagtcttccggttgcgtaagccttatatctctttccttttaacttcaaggtgtgaccggtatagatggtgccgcctttggtgacgtagtagcgattgccgtcgtatttcacgaatcccgcggtggtcttcaccttgccggaagaggcatcggagtagtagtaattatcttcatgagaaaaatgtcctttaacaaggcgacctttctcatcaaaaaaatacttgcttcccttgatggtggcaaagcggtttttgtagtatttgccgttcttgtagtagtagtacgtataggaaccggacttcttccagccggtcttgctcttcttggttgctccctgagccggaaccatggccagcgcaaaaataagaagcaccgccagaattgcgattccgatattgattttcttcgtgtgtttctgaatcataacgctttcgtcattgccctttcttaaatacctgtaaggataatatcattgttgggaataaaatgcaataatattatttgtaaactggcggaaatattttatcggttaacttgtgacaggggcggttatgtgctaaaatcgcactatattgaggtgataccaatgagatatatcagatattgtacaaatcttatgactgccggcgtttttattctgttgaaccggattatcggcatcttctgtccggtgcgaaagaacaaggcggtatttatttccgacgttcgcgcagagaacggcggaaatttaaagtgcgtatatgacgccatgggcgaagattacgagagagccacgtatttcaaagcggatcggcggaattggagttccttcgggaaattctgcaaattggtctatgatatgagcacggcagaagttgtttttctggaggattatttccgctacacatcgtactacaaggtgcgagaaggccagaaaatctgccagctgtggcacggtgccggcgccttcaagaaattcggatacagccgggcggaaggaaatgagaatattcgcatccataaaggataccggaaatatacccacgtgattaccagcagcgaagccatcaattcttgctatgcagaggcattcggcgtaactccggataaagtgcgggccaccggtgttccccggacggatatttttttcgatgaggaatatctgaaggaaacgaagacacggctgcacgagacgtatccgcagctgaagggaaagaaactgattctctttgcaccgacgtatcgaggccttcgggcggatgatgcaagctacgatttcaaccggattccgctggatgaaatctacgaagcgcttcacgaggaatatgtgtgggcctttaaatggcatccggcactgtataacaacattgcaaacggcaaggttcggatgccggatttcgcaaagtatccggatttctttctggacctttcggaagagcgggaaatcaacgatatcctgacgattacggatgtgatgattacggattattcttctgtgatcttcgattattatttgaccggcggtcgtgtggtatattatccgtatgatttcgacacctactataacggccggagcttctattttgattacgaggaatacctctttggcccggtggcaaagacaccacaggaactcatttcggcaattcaggcgccgacggaggatgaatcggagattcgccggaagttcggaaagaaatacatgtccgcatgtgacggccgcgccacggaacgggttatccaatgggtatttgacagaaacgggagtgaggaatgcagataatgctgaaaatcgccattgccatctgcaacggcatctacgaaattcacaagctgttcccggttcggaatcgcatcgccatggtgagccggcagagcagcaccttgacgttggatatgcgtctcctaaaggaagaattggaacgacagaatccagaggtggaaatcgtcacgctgaaccggatgattccaccgggactggcgggtaaaattaaatatctttggtacatggtgacccgggagatgcacgtcttcgctacatccagagtcgtgcttctggaagggtattgcatcaatgccagcattctccatcatcggaaggagctttccattatccagctgtggcacgcgctgggcgtgctgaaacagttcgggtactacgcggtaggaacggaagaagggcacagcgaggccttggcaaaggcgatgcacatgcacgaaaattacgattatgccatctgcagcagtgaattctgtcggccgtactatgcgaaggcttttcgcatgccggaatctcggataaaagtatgcccgctgccgcggacggatttgctgacggaccgggaataccatcgccgaaagcgggaagagattattcggaggtatccggaattgggcaaacgccccaatgtcctctatgctcccacatttcgaaatggagaggatatcacagaatatttagattctttattcgaagcgttcaattatgaagagtataatctgatagtgaaactccatccggtggaccgaaccggcatccatcgagatgagatttttgaatgtccggaatttacggcgatggagctgttcagcctaacggatgcgttgattacggactattcatccattatctatgaagcggcggcagcggaaattccaatctatctatacacgttcgatttggatgggtatctggagcggagaggttttatcatcgatttcatgaaggatattccgctggagaaatatcgggagccgaccgagttgctggaacgggtgtatgaagatgttaaaagaagggcggaagaagccgatatgtgtccggatgaaaatcggtctttcattgagaaatacgtacagtccgggaccggaaacacccgtcggttggcggaatgggtgcttcaggaactgtcgaagtccggcaattcttgaatattatacaaatataagatataattacatgatttaactctgatacataagggaggaagaaaaatggtatacggcgttgttctggcaggtggcatcggaagtcgaatgggaaatgtggatcgtccgaagcagtacctgcacattggaaagaaaccgattattgttcatacagtagagaaatttatcatcaatgacaattttgagaaggtgatcgttctgtgcccggcacagtggattacctatacgaaggatttgttccggaaacaccttccggagaacagcaatgtggttgtgattgaaggtggaaaagatcgaaacggcaccatcatgaatgccattcgctacattgaagaaaccgacggattggatgaagagacctctttggtaacacacgatgcggttcgtcctttcgtgacgcatcgaatcttggaagagaatgtggaatccgttcgaaagggaatcgcttgcgatacggtaattccggcaacggataccatcgtggaaagcgtcgatggagagaccatcgccagcattccgaaacgggcgaactactatcagggacagaccccgcagagtttccgggcgaagagattcaaggatttgtatgaaaccttgagcgaggatgagagaaaaattttgaccgatgcagcgaaggtgtttgtcgtaaagggtgataaggtggcattgattaagggagagacctttaatatcaaagtaacctatccgtatgatcttcagttggcagaaacgctgctgggaggagagaagtaatgctgaatacagtatatcggttggtagagccgcgacgtattgagtcggaattctccaatattgatgtaaatggtgattcggtgctggtgcgtccgacccatttatctatttgtaacgcagaccagcgctatttccaagggaccagaccgccggaagtgctgaagaagaaattaccgatggcgctgattcatgaagcaatcggtgaagtaatctacgatccggcaggagattttgaatcgggccagaaggtggtaatggtaccgaatactccgatggaggaggatgacatcgttgcggagaattatctgcgcagcagcaaattccgtgccagcggatttgacggttttatgcaggatatcgtagccatgagacgggaccgagttgtggccgtgccggacggaatcgacgattacgttgctgcttttaccgaattggtatccgtaagctatcatgccatcgatcgctttgaccggaaagcgcatgccagaagagatgtgctgggtgtatggggcgatggaaatcttgcttttatcacatcattgcttttgaagaagagattcccggagagcaaggtgtacattttcggaaagcatgaatacaagatggacgacttcgtttttgcggacgagactttcttcatcgattccattccggaagatttgagaatcgatcacgggtttgagtgcgtaggtaaagccggttccggtacatccatcaatcagattatcgattacatcaatccggagggatgtattgcggcactgggcgtttccgaagacccggtaccgattaatactcgaatgattttggaaaaaggactgacactctacggaagcagccgaagcagtgcggatgatttccgccatttactgcagttctataaagagcatccggaagtggtggattatctgtccagcattatcggagaaatcgtagaggttcgcactatcaaggatatgacccatgcgtttgatgcggatatccagaaacacggcggaaagaccgttatggtgtggaagaaatagcgagcgaaacgaattaatttgagtgggggaataaaatgagtatcaggcagatttgtaagaatctccgaaccaagggttttaaggaaacctatcgaattcatcgggtacacaaatgcgaagagggtttgtatgggtatgcgacgaaccggccgtatggaaacttgccgctggagaagcggcataaggcgctggaaaaaaccgtcaagtgggaacagaccttggaagaactggattcgaagaaatataagaagttcaagaagtggctgaagccgcattatttgaaggaagtgattccacagagatatgcggaactggttcagaaatgcgatgtgaaaaataaagtcgtatttatggaaaaatatggaccgaatagtccgccgaataattacatttccaaagtccttcgagaggagggaaagtacgaggttgtgaaaatagggttggacaaaaatcacaattccgattttggaatctttgaaaatgtggttcatctggtggaggagatggcggatgcgaaagcaatctgtatctccagtgcaaatcagtacctcagtcatgtagagattcgcccggaaacaaagtttattcagttgtggcacggttgcggctgcttcaaaaaggtgggatattccacattagacagtaataattttggacgaagcgaaaagaatcttcaggaatacgagcaataccataactacagttatgtgtgtttgccggcggaggatcagaagtgggtgtttgaagatgctatgcgcattccgcgagacagcggaaagctggtgccggtgggggtttcccgtacagaccagttctacgacccggaatacagcaaggcggcgagagaaaaactggaagagaagttcccgcagattgccggaaagaaaattattttttacgcaccgacgtatcgaggcagaatttccaaagcgtatactccgaatcagttggatgtcgccgccatgggtgaggccttgagcgatgaatacgtccttttgattaagtatcacagctttggatgcaagacgaggccggcacttccggaagaatacgccaattccttcgcattcgatatgaatgcgaacggtatcttggatattgaatcgttgctggcaatatcagatattctgattacggattattccagtgtgggttttgaattcgcaattctggaacgaccgattgtattctttgcgtatgacaaggatcagtatctggatgagcggggaatgtattacgattatgaagaaattacgccgggcccgatatgcacggaaacggaagaaattatctcatatgtcgaatctttgaaagacggctttgacgatgccgaaatcaagaagtttaaagagcagtacgtaaaaatgtgtgatggtcatgccaccgaaagaacgattgcgttgtttgatgaataggcgaggaggaaaccgatgaagagagtgattacatatggaacctttgatttgctccactacggtcatatcaatcttctgcgtcgcgcaaaacaactgggggattatctgatagttgtggtttccagtgatgagttcaattggaatgaaaagcacaagaaatgttacttcacttatgaacagcgaaaggcactggtggaggcggtacgctatgtggatttggtcattccggagaccagctgggagcagaaacgttcggatatgcatgaataccatatcgacacgtttgtcatgggagatgactggattggaaagtttgattttctggaagatgaaggcgttgaagtggtatatctgccccgcacaccggaaatcagttcctcccagattaaagaagatttgaatatgcagaataagtagaaaaagaatctcaggacgacatcctgagattcttgcttttcttgaagaaagtcgcaaactggtatataataaagagctaagtgtataaaaatcggtgatagggaaatcgattttagatatagaaccataatatgcgaaaggaagttttatatgtcaccaaaagtatccattattgttcctgtatataatgcggaaaaaacattgccgcggatgctggatgcaattaaagcacagacttttgaagattatgaagtcattttgatgaatgacggctccgtggacggaagcgaacaggttatgagagcgtattccgaggaagatgaacgttttcgggtatactctcaggagaataaaggtgtcagcgccgcaagaaatgccggtttggattacgctcagggcgagtatattctcttttacgatgcggatgattccgtgccggaggatgccgttcaaaagatgtaccatagagcccgggaaaagatggcggatctggtagtgggtaagacggtaatgcactacatgtcggagcaatcctttgcaaaaccaacggtcaccctttccgagctggaagatattccgaaaaataaaaccacgatgatgtggaatttttctctctgcaacaagatgttccgcaaagcggtaattgacgaacatcacattcgttttaacggaacctctcacggagaggatggtgtatttctgtacgaattcatccggaatagtgaaaccatggtgggctgtgaacgagaagtttacaattattacaagaagggtttcatggaggaatcctctttaagccagagcgtgtccactgcatctttccgggatatttgtaaaaattttgaaacaatttgccgtactttggatgccatggcggaggaagagctggcgaaatttgatgagacacagcagtccggtccggcttgggacgaggagcgttggcgctggagaagattgaaagctactgtatggaaacggtttgccggtgtttctattctgaatgaatattatcggatgatttggcgtagcgatgaggatttgtatcctctgctgaaggaatggctgaagaaatgcgaagaaaacatgttgccgagtcagtggcagggactcctggaggatcatgcagatttgcagctggaatcgggacttctgtcaaaggaagaactggcagaaaatccactgatttcggtaatcatttcagacaagcttccgtcaaaatatgtaaataaagtactgagtgcgtattatcatcagattttcccatctttcgaagtgcttgtggacgagtccatggcagatgctgtagcggaagaatacaaaggcatgatgaatctgcatttcttagaacatcgggatactgctcattggaaaaaggaggctctgcagcaggcaaaagcaacgcactgcattttcgtggaggaaccgatttatccggtggcacggactattcgtcagatgttcgaagcgatggaaaaggggacgttcatcactgcaccgcttctgcagtattccaacggggaatacaaaccgctgaaaacgcagtccacggcgttcattaacgaatttatgatggtttattatcggtcgccgtacaaccagctggattctacctggggaaataagattttcaatgtgaagaatctgctggccaaaaagcgcctcttcgaaaagaaatccgaaacggatatgaaccgtttgtacaacaattccaagtatacgaaatttacggataattctttcgtaacggatttgacggatcaggatattctgaaacgggtggaaaaattctccgttaaactgggatatccgcgaaagctaagacaagaagcgaagcggctggctcgaattgaaaaggaatccacccgcattgtcccgctgtcgctgaggctgaaaaagtggagaaataaaaagcttcgtcagggatacaagttcctgactctaaaggtgatattcccgttgtactataagtggcatgcccggaagccgattgaaaagaacaaggttctttttgtggtaaaccggaagccgacgttgccgaattccatgacgtacgtacacagtttgctggagaaatccgggaagtttgatattcacaataaattcctgctgaacctgtctctgcggtatcgccagaagtttaaggtggatttggaattcatcaaggatttggcaacggcaaactatgtattcttagatgaagcgacggtgaccacctgtggaattcacaagagaccggaaacaaaaatagtccagctttggcacggatgcggtgccttcaagaagttcggcttcagtacggcggacaagattttcggtggaaatgcaaaggagcagtcccggtatccgatgtatcgaaatttcgacttggtatgcgtcagcagtccggaagtggtatgggcttacgaagaagccatgcagctggagggagaaggaaatgttaagccggtgggtgtcagccgaacggatgtatttttccgggatgattatattgaagcagcgaagaaacgggtcatcgaacagattccggcagcggcggagaaaaagattattttgtatgctccgacattccgcggtcgtgtagcaaaagcctatggcccggatcggtttaactatgataagctctacgaagctttgggagatgaatatattatcttaattaagcatcatccactggtgaagaaactgccggatattccgctggaatatcgtgattcgtttgcatacgatgtatctcgtacgatggagattgaagatttgatttgcgcttctgatatctgcatttcggattattcgtcgttaatcttcgaatattctttgtttgagaaaccaatcattctctttgcgtatgacttggatgtgtactttgattggcgcgggttctactatgattacttcgaaatggctccgggaccggttttaatcagtaccgaagagattatcgattacattactcatattgatacgaaattcgatcgggagaagatgcacgcattccgcgagaagttcatgcgttcttgcgacgggcactctacggaacgaattttgaacgaagttggcttaaagctgtaaaaaagtctgggcatgatgagcaccatcgtgccctttttactaccgaaagctatacggttttggattcgaaaagatgttggacgtacggagaaaaatgtatgaaaaagattagtataattatccctttaattgacgagagatattgtgaagcgacgaatattcaagaaggaatgaattgcattctgaaccagagtttggaaatgagttcgatgcagcttgtttttttgccgcttcttaaccacccgatactcattcagcagttaaacgactacgctctgtcttatccggattccgtacatatccttccggctcccgataaaaatacggacattgtttcgatggtttccgaagccgtgaccggagaatacgttcttttctacgacatggggaaccgatgggaagaacatgctctggaggaggcttgccggcatttcgataattcttcaaattcctttgacctgtgcacatgcaacgaggttttccggaaaaaaacttcagcgaagagcacgttccgttttatgtacaaatccggtaacacatttaaagatgttcgagagaatccaagatatttggcggtttctctgaacaatgtgatttttcgaagagatgctctgtgccgagctgcgctgaaattagaaaaccaaattcgggcgtattcatacggttgggacctgatgctgattacggaaattctgaaagagaatccgttactgggaatcgcagcttcctccgatttcatctattacagttccgaagaacttagcggacagaagccggtggaagcgaatgaatatcccgaggcactcaagcacttgttctgcgtgctgaaagaaaattgcacaccggaattggattcctatattcaaaacttgaaaatgtacattatgcgccaatatttggaaggcacggatacccggggtgaattcagcgaagaatccagaacggagtatcttcggctactgcgtcaagaattgaccggaattccggatgatatcatcgataaagcaccggggacggtgcagcgtcagcgcctgggactgtatgtgctgaaatacggaaagcagattctccggaatctgaaagaatcctccgggcagcttgcatacaacggacatcgtctggttaatttgaaacatgattcatttcgtttctatacgatgacggtggaacatggtctgctccatatttgcggaaatatctgtgccggaacatcggaacagaaaataagtgtgcgtgcgcaggatcaaaccggcaagacttggaaagcgacgatgcaagactgttcgagtgaagatgtgcgaaatcgattaggggaagtgctggttgccggaaaatcgttctcgtttaccattccgcttcgggatgagataaagctgacgtttatgatttcctttgatggaaccgatataaaagtatatcctaaaatgatgaaggataccgaattaaagcataaataccgtcattcctacacggagaaaaatggatggctgattcgatataataacggttcactgttcacgaaaaaagcaacggcttggaatcgaatcaagttccatcggcactatcttgcggaactgcaacagaaaaagaacgaggaagatgaatctacctatctccgagactgtcattggaaaaagcaaattcggaagatgaagctgaagaatcaaattgcttttgtgacagcgagaagcaatgaagaattgcttccgaacatgcgggcagtatatgaccgaacgaatgggaagaaggtggtgttcacccggatgatgccttatgaaaaagaccggatggatgcggcgattcaagcggtgtattccagcaaagtcgtggtcacggatgattatttttacctgttccgaaaattcggaaagaagccgggacagaaaattgtgcagttgtggcatgctgccggcgctttcaagaaattcggcatggacggaacatcgctctttccggaggtggatcacctataccataaggattatgacttggtatccgtaagtggggagaacatacgggggatttatgctcgggctttcggaataggggaagatcgggtgaaggcctatggtgtcccgcgtaccgatgaatttctggattcggagtatgtgtcacaggtaaggaaaaggattcggagcagatatccgaaattagatgggaagcaggtgattttgtatgcgcctacttttcggaatggaaagggacaggataaacatgagttccgtccgaagatggattttgaatcgttaagccattccttgaaagaaaaacaagtgttcctaatctgcccgcatccggtgatgcagaatcgaattgtgccgggttcgtatgagaacatcattcaggtggaggatttcactactaacgagattatgtgcgttgcggacttgctggtgaccgattattcctcggtcatctttgaatattctctgctgaataagccgatggtattctactgttacgattatgatgaatacaatcgggatttctatttggactacgaaaaagatttgccggggcagttgttccgcaattatgcagagttagaaaaatatatcagtgcaggcgatttttgggaaacagatagggtgaaagatttcagaaatcgttatatgtccgcttgcgatggaaaaagcggagagcggatcgctcatgttttagagaagatgttgaaagaataattgaaaggaaaaaagttgttattctcaagtaatgtatttatatttgtctaccttccggtagttttgcttgtaaattacgcactcaaattcaatcgccgggcgcagaatgtttttctgtgcctggccagcttgcttttctacgcttggggcgagccacggttcgtgttggtgatgatggcatccattctggtgaactggttttttggcctgctggttgggaagtttaaagagtataaaaatgttcgatggttgattgcactggatgtttttatcaacttatcgattattttcatatacaaatacatggcgtttacggtgaaaaacctgaacctggtgcttcacgcacactggaaggtgccggaaatcgcactgccaatcggaatttcttttttcacgtttcaggcgatctcctacgtaattgacgtgtaccgcggacggggcgaggctcagaagaatcttttgaatgtgggtctgtacatttcatttttccctcagctcattgccggaccgattgtgcgctatgaaaccattgcggaccagattaataatcggaaggagaaccttcaggacttttccgacggtgtggtacgctttatcatcggattgggaaagaaagtgttgctggccaataacatggcgctgattgcggatcacgcctttgggttcggaaacggaacggtgcagtggttcggtgcggacatgccgctgacggcagggatggcctggctgggggcgttggcctacaccttccagatttatttcgatttcagcggatattccgatatggccatcggcctgggaaagatgttcgggtttcacttcgatgaaaacttcaattatccgtacgtttcccgttccattacggaattctggcggcgctggcacatctccctgtccagctggttccgagattatgtctatattccgctgggcggaaaccgagtgaagacggaggcaaggcatatcttcaacctcttcgtggtgtggcttctgacgggaatctggcacggagcgaattggaccttcatcctgtggggattgacctatttcgtgcttctggtgacagagaagaagctgggactccataaggaggcaaaataccgctggatgaatccgctgaagtatatcgcaaccatgttctttgtcatcatggagtgggtgctcttccgggcggacagtctgggagacgccgtacactatatgagctgcatgttcggaaccaatggctgggggatctccgcaccgggaatcttctatctaacccagtaccgatacttctggctggcggcgattgtaggatccctgccgtgggttccgtggcttgggaaatgcttgaagcaagaaggtgtttctgctaaaagaaaatgggccgcggatgtgatttccggtgtattcatcgtcagtatcctgttggtgtcggtatcatatatcgtcatcggaagctacaatccgttcatttattttaacttttagagaagaaaggagaaatcatgagaaatcgaatcattgcagtattatttctttgttttctgctgttcttcggggttcgcaccggaatgaatgtatgggattccattaacggtacggaaaaaagccaccagcctcagacggaggcattaggcagcaatggtcagataagtggttttaataaggaatccttggaggaaatctccaacacgataacgttgaatttagcaaatcgaaatcaatggattaatctaaatggtatatttcaaaagggaatgggaaaaaccggtgacttggaaaaggattggtatcgtctagaaaatggaatgctgatgtatagctttcggaaaagttccccggatgaactgaatacgtatgcgaataatgtggtgaaattatcccggtatgttgaaaaacagggaaagaatttcctttatgtagagcttccctgcaaggcacagaaagagggggaatatccggcaggagttccggagtacggaaatcaaaatgcggatgaaattctgaaggtgctcgataggaaatctgtgcagcgaatggatgttcgggacataatggaaaaagagcacataaaatctacagaatgctttttccgaacagaccagcactggaaaccggcaactgcactgtgggcggcaggagaaatttccaagaaattatctcaagtggattcgaagtggaaagatcatccggaatatcgaaatttgaacaattatcagaaagagcattattccaacttgtttttgggtgccattggaaagaaaatcggcagcacttatgcaggtatggatgatttcgacatgctgattccgaaattcgacaatcagtttcaatatcgtatgccgaaagcggaaaaatccgtagagcggaccggtaattttaaaacagcgtttattgtgcctgagaatttagaaaaagatccgtttcgggtgaatacctacgcgacatattccggaggagatcatccggaagagcgggtgacaaatgagaaggtgaaaaataaccgacacattctgttgatacgggattctttttcctgtgcgttgatgccatatttagccttgtatacaaagaatgtcaccacgttggatttgagacattataaaaccgagtctttatatgattacattcggaatcatccggaaattgacacggtgatggtggcctataatccaagtgccattacagagatacagtatacttttgataaggttgtaaaatgaaaaagataattaagataattaagacgacaattaaatctgttttgtatgttctctattatggaattattgcttttctgctgtattttgttgtagcaggacgaacgttgacggattggtatgatgttacattcggcacgcggttccgggaaatcgtgtacacctttaacctggggttgaccggggcggacaccagtttcatgaacgaagcacttcaggagtgccgaccggatttgattaaagcgacggccatcgtagtgctgttcattttggcggatttggttttgttccgaagagtgggacggagaaaggttcgggtggatgaagccaagggacggcacgatgttcagggaagagagacaaagcacgaaacggaaaaaaagaagacgaaatatcagtgggtgcgaagtaagtggggatatgcgcttcgaggtgtctatcatgtaaccattttgctgatttgcatttttttggcaaagccggtatatgcgtatgcagatcgggtgttggaagtgtcggactttgttcgctcgaaactaacatatacaaaaatatacgatgaaaaatacgtggccccatcatctgttcagattcagaacacacgaaaaagaaaacgaaatgttatcatcatatatatggaaagtatggagactacttatgcgtcgaagaatctgggaggctatcaagatcacaatttgatgccaaatctctataacctgcagcaagagaacatcgcttttggggatcgaaaaggaatggcaggaacgcacaatccgtccggaacgacatggacgacggcctctatcctgtcatcctcttccggaattccatttgcctttaacatgggaatgaataagaatgaaggaaatgatgcggatcagggaaaatttgctaaagggataaccacgctgggggatatcctggagaagcagggatacaatcaggaattcatctgcggatcggattccactttcggtcgaaagaagaaactgttccgggagcacggaagctacaaaattttcgattattactctgcaatcgatgccggatatatcgacaaggactacaaggtctggtggggaatggaagatttcagaacctatgaagcggcaaaggatgaaatcctgaagctatcggagaaggacaagccatttaactgcacgatgctgacggtgg

SEQ ID NO: 815 - DNA, 1957 bp, Unknown
  16S sequences of unknown bacteria
agacagccatgccagcagaaccgtctgctccccgctgctctgcagggcagcagcaaaagcccccagctggttggccagcagcacttttttggaaaggcccagcacaaagcgcgtcagcccctgtcccagatcctctgccgtggtgtgacgctccgtcagcgttctctccacatcgcggtagcgcacaatcggtccggcaatcagctgggggaacatggcaatataggtcgccaacctgagaaaggagcgctgaggcgccaccgtgccgcggtatacatccacagtataactcagggtctgaaaggtgtaaaaactgatgccaatgggcagcgcaatagacagcagaggcagttccgttttcagcgccgtattcacagtcgcgagaaaaaagtcggcatatttgaaatagcccagcaccgccagctccccagccacagacaaaaccaaaaatcccttcgccgcgccccggcctcggaaccggccgatcaaaaggccgcagacataggcaaaggcaatcgtgaagagcatcaaaaaaacatagcgcggctcaccccaccagtaaaacaccaggctggccagcagcagcacaagatttttgccccggcgcggcaccaaaaaatacaccgccagcacaatgggaagaaaataatatagaaaagtaatgcttgaaaacagcatagctccgctcctttgtgttgaaatcgtttttcgtcgtgcagcggcacacaaaccgacgcgccccgccgcagcgtttgtctatcatagcatggctgcggctctgacgcaactattaaggcttcattctccgccctgcagcgtgcacagccgccatacgccttcatagtatacggctacgccgctttctgtctgcgcaacaggcagctctgccgtgcggctgaaattgctttctccgtttttctccggaaacgtatccgtataagaaaccgtataaccgattatcgcatcctgccccacttccgtcggcacaggatcctgagagagcaaataaaccgtatcgtttagcatgaaagccgccggataatctccagccggctcagcccgcggcaggccgcacagccaggcgtccgcttcgttccccaccaaacagagctttccatccgcccccacgcagaggctgcccacctccgcagcatctgcggctaaaaatgtcaccgtccacacaccggcattcatatcaaactgtgcgcgcatttccttgtaatcctccgcaaacgcatccgatgcaacttgttccgcctcgctttgccgtgggaagccctcacccagcacggcgctgtcgagaatcgccgccaatggctgcccgtactgttccagcaacgtccggtcgccgctgaattccaccgcataagcccccggcgtatcatggtaaatcaggcagagccaaaacacatcattgatttgctctgcacatgcagtcgccgtctggccgcttgcaaaagtcacctcttcaaatgtcacgccggtgccgcatagcccgatgccgtcagggtaagcgcgcagcgtcaggcgcagctccggcgcgtcagcgggccagaactcgatgtggcatgcgtccgttccgccatcctccggcgtatccgccgtctcgccttcccagccttccggcagcgtcagcgccagattcgcgcagccgttttccgctgtgaacgtttcaccgtgcagaacggtttctgcgtcgtcgatgctctcttccgctgacaaactgccgcccggtgcgccgcagcccgccagcaggaacgccatcagcagcgctgcaattcctcttttcacgacatttcctcctgttcgaatacaattcatggtttatgccgtctccggtgcatcgcaccggcctaaaaacagcacggtgccctcgctgttccatacgccgtacaaaaacggccggttcaactccataaccacgggctcaccttccggcggggcggcgctcccggct

SEQ ID NO: 816 - DNA, 22239 bp, Unknown
  16S sequences of unknown bacteria
aatcgaatgacacatcttgagatacccaacaatatctttaactaagggaaacgggcagagctatccggacattgaattgctgccagtgctggcttctttttttgactgcacagtagacgagctgctaggctacgaaccgcagctatcacgggaggaggtgcaggcgctgtatgcaaagctatcggcggaatttgttagccaaccgtttgaacaagtatatcaaaaaagccgtgcgctgctaaaacagtatttttcttgctgggtgcttcaattttatatagcgcttttgtggatcaaccatgcagaccttcaaagcgatcagcaaagggcaaaaaccgtgtatttggaagcgctgtcagtactcaaacgggtggaaaagggcagcgaggatacggttttatccagacaagcgttgcagttgcaggcattttgtcatttggcggcggatcagccaaagtaggccatagagctattgggggatattgtggaaatgcctatgcagacagaaatattattggccaaggcatattttgcggaaggggataggcagcgcgtccgcgagctgcttcagcaatatatgtatgaaaatttgatgggtattttggatgcttcgccggatctattggctgcctatttggatgaacctctaaaggcggagcaattttatcaacgcatcttaactttggggcaggcgttgggggcggatacgatgcacccaagcaaattcattcccatttatatggtaggatgccagatgttcctgcaaaatggaaaagaagaaaaagccgcagaggcactggaacggtatttagatttggcctattatggcagcgaattgggatggcgcttgcagggcagcgatttatttgattgcttagaaccctatttccactccagactgctgggaaatatcgcgcctcgagacggacggtttattgaaaacattcttatcggctatatagagggaacgccgctgctgtctaagctatgtaaacgtccgaatctccaaacgaaactgcaacgattgaaggatttgcaaaaaaaaataacgaattttgtgggcaggctattttgtctatgcaatgactttaaaacaaaaaggccctgcgaagaattttcttgcagggccaaggcttttttaagcaatctttgcctcatgcttgatgcgaatcaaagcgtgcttcatacggggaaccaaaacaatggccaggcagatgatgagttcgggcacaagataggtggcgttgtatcccaaagagtaaagcagtgggctttgccctgcaggggcagaggaggcaaaataaatgacgccggataaaacatggatgataaaccgagctgcagagcccagcagaatgcccaaaggaagttggttatcctttcggaataggcctgcgatgcccagaacggcaaaggggagaatataatccagcaaaaattgcatgggatgaatcacgtaggccccctgcactagctgcatgataccatccatcgtaccggcggcaatgccggggatgggcccatagatccaggcaaagaccaggatgggtagcatggatgcgggcgttatgctgccgccgtttggcatacggtacaaggtaaggcaggacagcacaaatgccaatgcaacacacaaagcgccggtagacagcatttgaatcgtccatttttgccgccgaagcagcaaaacaatacaaacgacgccgagaattgcgacaagaatggaccaaaatataggggaatacaaaaaggctgcggctgtggaagccccttcttccggctcaatcgtaggcagtgcaaaagcaaatagcaccgccagcgccagcagcaatacaacgacaatgggcaatgctgcgccggaacgctttcttaatgcaaaaaacaccacggcacaaacgacgacgagcgcccacacgacccaggcccagacgggcagggccactaagttttccaaaaacgtagaaaaccacataaaccaaacaactccttttgaccgctccccatgaaaaaacccgcaacattgttgcgggaaacgctggcataacaaacatatgcgcgccgcttccctccgttggcatgatccagacaggttccaagggtcgggcagatacgccctctcagccttgcggcacccccagcggtactatttaatttttttatagtataggggcaaaggggaaggcttgtcaaggccgggcttgcaactgggagaaaaaggcggtataatgcagacaatcaagcgacgaccaaggccacgttttgtacggtgtagcagagagcccgttcttaggctgtaaagcgggtatgccgggaaaacggttcccaccttgcgagctttgcggtgaaagccgccgtttgccggacgttatcggcacaatgagtgggcaagtatatttgccaagtaaggtggtaccacggaagcatgtctttcgtccttgcagaaaagttgcaggcgaagggctttttttatgcccgcctgcgaaaatttgtttggaggaggaagatcaatggcagggaaaaagcaacaaggggcatttgtacaggcaattacgccgatggacgagaatttttccagatggtatacagacgttgtggtacgggctgagctgatggattattctgaggtaaaaggatgtatggtcatccgtccgtacggttatggcatttgggagctaatccaaaaggagctcgacgataggtttaaggcaacggggcataaaaatgcatattttccgctgtttatccccgaaagcctattgaaaaaggaagcggaacatgttgaaggatttgcgccggaggttgcctgggtaacaaagggcggccacgaagagttgacagagcccctggtcgttcgcccgaccagcgaaactatcatttgctcgatgtatgccaaatgggtgcagtcttatcgggatctgccgctgttgctcaaccagtggtgcaatgttgtgcgctgggaaaagagtactcggccgtttttgaggaccagtgaatttttatggcaggaagggcatactgttcatgctacctatgaagatgcgcagaaggaaaccatgcagatgctggaagtatatagggactttgcctataatgtgttggccattccggtgttgacggggcaaaagacagaaaaggaaaaatttgcgggtgcacaggatacctacacgatggaagccattatgcacgatggccaggccttacagatgggaaccagccacaatctgggccagcactttgccaaggtgttcgatattcagtttttggataaggatgggcagcaaaaatacgcttggcagaccagctggggcgttagcacgcgcatgatcggcggcttgatcatggtacacggggatgaccgtggcttaaagctgccgcctaaaattgcaccagtgcaggtcgtgatcgtaccggttgcaatgcacaaggaaggcgtgttggaaaaggccaacgaactatacgatgcattaaaggcggcgggcctgcgcgtagagctggatgacagggaccagtctccgggttggaagttcaatgaatgggaaatgcgcggcgttcccgtcaggctggaagtaggaccgcgggacattgaaaacggccaggtgatgctggcgcggcgggatacgcatgaaaaagcggcaacccccatggagggcttagagcaatccattcagacgcttttagaggatattcataaaaccatgctgcacatggccactgagcatcgggatgcgcatattttccaagcatctacgatggaagaggtacgggaagctgtggataccaaaaagggctttgcgctttcgccctggtgtggagagcgtgcctgcgaagagcatgtcaaggacgaatatggcattacgacgcgttgcatgccgtttgagcttcagaaccaggcagaagggcatgtgtgtgcatgctgcggaaaacctgcgaaaaaaatgatttactgggcgcgtgcctattgagaaaaagagaaagccaattggctttctctttttttatttcagggaaagagcgagaccgtccgcatttacttttatatcctgtttaggatataatatagattctggcagaaaatagaatcaatgatgaaaacgatacatgcatacaaattgtgtatgggggtgttaggttgccaaatacggagcagacgaggtttgtgcccagaagcgagctgcggaatcaagggcagagacctcggcacacacaaaaaaggcagatgccggcgcacggccgtcaggtccgcggatcggtgcgccataccacgcataaatcgacaaaggcatcgcagcatgcgctaaaaaccacgatggtggtcacgctgatcatcgcggccagtaagctgttgggctttgtacgcgagatggtcatggccgcctattttggccgtggtgtagaaagcgacgcttttgttacggcctacggcatattcagcatcatgacgctgctgttcagcgcaggtatcgcctccacttttattccgatttatacaaaaacaaggctgagggagggtcaactggctgcggatcggtacgccagccaggtagttacgctgtattttgtggcgggtttgattggctcgttgttggcatatttgtttgcacccgccatttgctcgctcatctaccgtgctgaggtaggggtagagcttacaatacagctgacaagaatgatgtacccatccttggcattttacgcggtaaccggcgtgctgtgcaatctgctgaatgctcgggaaaaattcattcccgaacagctgctgggctttattctgtctgcctgcttgattaccgccatcgttatgttccgggatatacgcatggtggggattgcagtatccgttacgggtgttatgcaaaccattattctgctaccctttttgcggggacattttcgctatcggccgtatctcacgatacgagagcccaagattcgcaggaccttcattctagccataccggcgctgattagtatggcgtttgacgagatcaaccatcaaatcgaccgcatgataggttcttcgttgggggttggcgttgtaacagcgctcagcaaatcttactcgctggttacaacggcgctgggcatcttgatcgttccaatcaccactatcacattcagcagactgagccgtatcgtagccaagcggaaaaagaacgagtttggccaggcggtacggcagagtattgagatcattgcgctgatcaccttgcctgttattatattgggcgttgtgatgcagaaggatatcatttcggttgctttccagcgaggagcttttactgcagaggatacggcctttaccgcaccggtttttgccatgtacatcgctggactgttcttctttggcctaagaaactttttaagccgcgtgttttattccttacaggatacacgtactcccatgcgcattggtattgtaagcgtatgtgtcaatattgtgttgaatcttacattatcccgtatcattggcgcaatgggcttgacgcttgccacaacaacagcggccttgacgggagctaccctacagctcattttactgcataaaaagatgggctcgttgggccttcgcagcgtggtagggcaagtgatccgcatcgtaatttctttggtggcggcaacaggggtattattgtttgtgcttggctttttgccggcgcacaatggagaaacgctgacagggctcttgcgattgtttgccggtgcggcctccttcctcgtcgtttacctgggcgctacgatggcgcttggggtccgtagcacaaggcagctgatccatatgatcaagagataaaaaaggacggaattccgtcctttttattttcattctttggcttttatataggcaaaccctacgcagccgggtcccgtatgggtgccgataacgggccctacatcgcagacaatatatggctctatattgcaatgagcggaaatggcggaaatcagatccggcaccgaatccggggcattggcatgcgcaaaggcaaagccaaattgcgggtcagcgggctcgcgctctaagagatgcactaagtgccggaaagcacttttgtaccccctggctttgcttacagagacaacggcaccgtccttgataccgacaataggctttaattttagcatggtgcctaccgctgcggcagaggcggataggcgtcctcctttgtgcaagtatttaagcgtatctaccataccgtacacagccaaacggtgcttaatgctgtctagagcttggcaaatctcctccgcagattttccctcatcacgcagtttggcagcatggcgaagcaaaagtgcactgccaaagctagcgctcatggagtcgataaggtgaattttatcgttttgcagatgatctttggcaatgacggcggactgaaaggtgccgcttaaccgactggaaagaaaaatgccaacgatttcatggcctttttccagctccgattgaaaatgagagatgaatgtatcaggattcacttggcttgttgtaggcagttctttgctttggcctaacttttggtaaaatgcctctgggctgagctctactttatccagatactgttcctggccaaaatatacggatagagggataaaatcaatgtccagatcttgaagctgagcaaggctgaggtcgcaggtactatctgtgatgatgcggatcgacataaaaagtcaatcctcctttccttccatagatttttcggaaaaatattgctgtatggtatccaaggctttaaccaaggcttgtaactcttcattgcttagcgcctgaatgacagaagaaaccatatcgtgatgaaatgtagcgtggatgcggtttatttccaatcctttttcagtagggcagagtagtacggaccgcttatccttttccccgcgctttctctgtaaatatccttttttgatcagtgggccgacggccgttgttaggctgccggcagtaataccgagaagaggggcgataacgctaggcctgctgtctccctgtgtgtgcgcttggcagactgcctctatgacatgtacctcacgaatggagagattctgaaagggaccacggcacaggacgcgcccttcgatgcgcaaaatttcattgaacgcacctacaagaaattcattgagcgccgtataagtcagatcttgcatacaaccgcttcctttttgtttgaacttcaaagtaattgatgggatatagcatagcatatggagtagaaaaaggcaagagtattttgaacttcaaagtaaaaagccccgcttgagcggggcctggtatagaaaagatcaagagcaagcggagacgatggcatcgtgcaaaaactgcgcggcgccgggggcaatggcgtcataataagcggtgaaacgttcatcggccaaatagagggcggccaatcctttatgcgcctgtttggagtaggatggccaatgataacaaagccattgtttatgtagcgtaaaggctttttgggccaatgtgccggagggatcgccctcaagcagcgctttttggagcgtggtcttcagctgtgcagacaaagcctgcgcctgctggtattgcgcctgtgtcatgccttgtattttggcgttggattgtgcgatctgttcatcgccgtatagagggcgaagctcatcaccatacagagcctcgttttcctggacaatcgtttgttttaggtcttcaaattggatggaattttgcataatgtagtctcctttcatggaggcaagggttgtttccacgcgatgaatcaaatcactaagcgcatcatactggctgcgtaagcccaaaagatgggcttttaacagcgcagactgctcggaaagaggcacgcacaatagatgacggatctcggcaagaggtacacgtaaagcatgatagaacaggatggtttgtaaggtgatgatcgatgcatcatcataatatcggtagcgcgtagcatcgacgcgtaccggctttaacagtccaatttcgtcataatatcttagtgttcgagcactaaccccagataactggcagagctcacgtagactatattccatggaaatccctccctgaaacttaggatagaggatgacgcagcggcagagtcaagctcttttttgaatgtagcaaataaaataaaaaatggaaagaaaaaacaagaagagctgtggtttttatgcattgaggtgcgaaaaaaatggtggtacaatcgtagtaaatgaagaaggaagggcaaagagatgatccaagacattgcaccgcatcagtttgacaatacgtatcgcatccaaacaccgcatgctcaggatattgtgctgtattttgaaaagcaaaatgcattgtttcagcatacggaacagggggatattttgcctagatttgagtcatttgacgaagaaatcagaaagcaggcacagtatttgttttgcatcgatgggattggcttttacctggtaaagcagctggaaatcccccaggagggagggttttttatgcagccaaccagggcattccggagttttgagccccagtggatggcttttggcggtatcacgggcagccagatctatcggtgggaacgagcacataaattctgtggtaaatgcggcagcatcatgcaaaatagcgagatagaaagagcgctggtctgtaccaactgcggatacacggagtatccaaaaatttcgccggctattatcgttgctatccatcatggggataagctgttgatggcgagaaacgtttcctcaccgccaggtaaatttgccttgatcgcgggttttgtggagattggggaaacctttgagcagacggtacggcgagaggttatggaagaagtggggatcaagatcaaaaacatccaatattataaaagccaaccctggtctttttccgataccgtgatgattgggtttaccgcagagttggatggagaagatgaaacattgtatttgcaagaaagcgagctggcagaggcacactgggttcaaagagaggatattccagagccggcttctttggcgagcattggcagtgaattgatcaacggtttccgaatgggaaaatattaatttgaaaatcatacaaaaatataaagcctctctccttatgctctttctatttgaatgcattgctatcggtttgtcgttggctacctccaatctattctacctatttaattttacatatattggagggtttattgcgctgggcctagcgctgtataccaaccaataccgctatgccaggcttgtggtgcagcttggtgtcggcctgtatatgttggtgtatctaggcttgctatgcaatgagaatatgcagattgagggattttggtattatctgtttcttggcgtatttgaagcggctaccatccactatgcggtggcaaaaatattcggaccgttgctgtttggcagaggatggtgcggctatgcttgttggacggcaatgatcctggatctgttgccgtacaaactgccggagggaccgcgcaaacgatttggatttatccggtatgtagtttttacgggctcgttggtatttgtgggggcgctgtttgtgctggccgtgccgaatctggaacgcgtaatgttttggagttttctgatcggcaatgcgatttattatgtcgttggcatagcgcttgcatatctttgtaaggacaatcgggccttttgcaaatatatttgcccaatcacggtatttttgaaacccgcgagctattattcttatatgcgtgttacggtagatccaaaggcatgcacctcttgtggaaaatgcaaaaaagtttgcccgatggaggtagaggtgaacaacaatgctcgtaacagaaaaaatgctacggaatgcatcctctgcatgcgctgcgttgaggaatgccctgtcaaggcattaaaactataagttcagaaaaagcgacccggccttttgggggctaggccgcttttttattaccggctagagaaaggagagacaatggataagctctttggccaggcaatttgtatatgtgtcgctttgttgtgaaaataaaagatcgcatcttccgactggaagatgcgatcttgaaagcggaccagatccgctggtggagcttaccggattcgaaccggtgatctctacactgccagtgtagcgcgatagccaacttcgccaaagccccgagaacgtttgttatagtaccataaaaagaaatttttgtaaaggggtttcttttgtttctccacaatgtttggtatgatagagcgaacaggaaaggaagagagcatgaaacacaagggaagggtcatatggctggggctatgttgtatcctgttggcgacgggctgtacacaaacggagagtacggtgcgaggatttgccatggataccgtaacagcgattaccgtttataaaaaagaggatgaaaaagcggcgcaggcagcgctgaataagctggaagaatgggaaacggaatggtctgcggacagggaagacagcgtggtgtatcggataaaccatgggcaaacggagacggtttcccagtctacgatggaaatgctccatctggggcagcggctggaaacacaaacacaaggggcctataccttagctgtgaggcccttggtagagttgtggcatatcaacgatagaacagcggaagagccgctgccggagcaaaccgagatagagcaggcaaagtctctttgcgggcaagcgaatctgaccatacagccgctggagaatggttcaggatgcgtggcggtccaggaaggggcgggagtggatcttggcagcgtggcaaagggaaaagcggcggagcttcttaaagcatacttacaggaccaaggcgtgcaggatgctttgattgacctgggcggcaatatctgcactgtgggggatagtacctatgaaattggaatacaggatcctagaaacgggcaatcgattttggccctgctgaaagtgcagggaaaaagcgtagtgaccagcggggattatcagaggtatgtagagataggccaaacgcgttatcatcatattttggacgcgcgtaccggttggccggcagacagcggactgatcagcgtaaccatcgtgggcgaggacagcatggtgtgcgatgcgctatcaacagcagtttttttggtaggagagcaaaagggcttggaattggtgaaggcttatggcgtagaggccgttttggtaaataaagataagcaagtcttagtgacggatggattgaaagacagctttacactacaaggacgggattataccctgcaatgaaacaaacaatgacaacaaaaaaactagcccagactgcaatgctggtggccatggcaacagcggtacactggttggagggtgtgctggttccgttgtttcctgggttgcccggcgtaaagcttgggttggcaaacctatttacgctgtatgcgctgcaaacgctggggcgatcttctgcgtttctcatctctgttttgcggtgtgggctaggcctgctgctgactggcgcgccggtggggacgttgtatgcgtttgcaggggctatgctaagctttgccgttatggtgctgatgcaagcgcttaggtttggcccattggcacagtccgtgatgggtgccttggcacacaacactgcgcagggtttgatggcggtcctcataaccggtacgagtgggttgctttattatctgccgatcctctggctggcagcggtgccgacgggtttattgatcggggcgttgtgcctggggatgcagaaagtatggaaaggacaaacgcatgacgcaggatgaaaaatggatgaaaaaggcgtggatgcaagccaaggtagcagcaaaaaaaggagaggtgccggtaggcgctgtggtggtcaaggatggccgcatcatagcacgtgcccataatctgcgggaaagtgctaaagatcctaccgcgcatgcggaaattttagcgatgcggcgtgccgccaaaaagctggggggatggcggctttccggctgtgttttatatgttacgatggagccatgccccatgtgtgcgggcgcggcggtcaatgcaagaattgagcgtgtggtatttggcgcctatgatgaaaaagcgggatgctgcggctcggtattggatctttccaggcaagaaaaatttaaccatgccttcgaggtgaggggaggcgttttggaagcgcaatgccgtgcggtattgcaggatttttttcgagcaaaaaggaaaaaacgaccgaaagaataaggaaaaggcaatgcccgaagggcattgccttttttagactaggtcgattggtctaatgatcatttattttgcgccgcataatagttcatcaaacagccagctaggatgatttcgcgttcttgctctgtcatttggggtagctgtaagacgatgtttttttcgccactcggctgaataagaacggcaggcacttctgttttgccttctttgagagcggtacgaatcccacgaagctttactctgtctcctggctggatgttataggtttccgcatctggcaaaatgaaaggaagcatcccccagttgacaacattggcgcgataccggcgtgtagcatattctagggcgatgttggctacgccgcctaaaacgcgctgacaggaggctgcctgttcgcgtgcagaaccatcgccgggacgcagcgcaaagactagggaaccctggcccggcgcatctggtgcggtggcccgccgttccagctccttggcatagactgccttggcacgccctacatactgcggatccttgcgggaaagagcgaactctgccaggcgcaagggattgcttcgatagctggaggtctctccggagggtatcagctcatcggtggtggttacgggatcgtaaatagcggacgctacagtgagatccagatcctccggcagcggaatcattgtcggccaatcggcgatgtttggccccttaatgagctcttcttccggatgcggatggcctacgccacgatagacgcggctttggtagggcatatcgttgaacacataatcggtgtgtgtaggctcttctggcacatgcgccagctcggtcgcggcggtcagaataccaccattggccgccgtggctgcgatggaacgcgcgtccatcaaagccacatatgcttcctgaccttcacccggcttgctgccttcacggttggggaagttgcgggtggtgtggcggatgcttagcccgccatggccgggcacgtcgcccgcaccaaagcaagggccgcaaaaggcgcttcgcacaattacgccttggctcatcaagttggctatgacgcctttgttggccagcgccatcatcataggctggctggcaggatatacggacaaagagaactcgccggtaccaatatggccttgttttagaatctcatctacacgcagcacattttgatacaggccgccggaacacccagcaaccaccccttgatcgcagaccagctggccgtttttgattttgctggataatgtcaccttgggcgcatgccccagctgcttttcgatcttagcatccgcttcgtgcaaaatatccgccaaattggcttttagctctgcaatgggataggcattggaaggatggaagggaagtgcgatcatgggccgcactttatccagctcgatatgcaccatgccatcataggtggccgtctgcttttgggccaggggcttgtactccgacacacggccatggcggttcagccaatctttgacgatttcgtctgtctgccagatggaggaaagacaggtggtttccgtagtcattacatcgatgccaagacgataatccatatccaaagaggctacaccgggccccacaaactccaatattttgttttttacaaatccgctttcgaaaaccgccttaaccaaagccagtgctacgtcctgcgggccgacgccaggctggggtttgccggtcaagtatacggcgatgatctccggatattttagatcataggtacggcctaaaagctgtttggcaagctccggtccgccttccccaacagaaatggtgcctagcgctccgtaacgggtatggctatccgaagctaaaatcatcttgccgcagcctgcatagcgttcacgcatatattggtggatcaccgccatgtgaggaggcacaaactctccaccgtattttttggctgcagaaagcccaaataaatggtcgtcatggttgatggtgccgccgacagcgcacaggctgttgtggcagtttgtcaacacatagggaagaggaaacgcctgcataccgcttccacgggccgtttgaatgatgccgacataggtgatatcgtgagaggccatggcatcgaaacggatggcaagctgctctggattgccagagctgttatgcgcctgcaaaatgtcgtaggcaatggtgcccgttttatcctgcacggcagcgtccgtagcggggcggccgccaatgaaggtgacgggagatggatgtaatgtgatcaaggagaacacctccgctatgaaaatacatcaaatttgattcttttttattatacagaaattagcattctttgcaaagaaaaagagcatggagacccatgctcttaaacatgatggtttatttggtcgccatccaaaatccattgtcccattgtggctgaaaaaccagcgtcggcatactgcctttttttgcctttcctaccaaggtggtctctacatagccgccctcgcgaaattgtgtgagtgagggatcggtactctgagctaaaacagggcattcatatacagttgtgccatcctcctggacaaaggaaaaagacaaggtggaaaaatccaacactgcatcagcgtccttgcatttggttaaatttaccttaacgcgtgccaaaaagtattcttcatcagaagcaaggtcaggtagatccatactcccctcctgcaatgcggcttccgcatcagccccttgctttacatctgtcaaggtaagatcgaacacatagggaacatcgggcaggttccaggtaataccatccagcgtgcccaactcaccgaagggaaggggggaggatttggttgcgtaatcgcctctttggcttattggcgtaggcgagggcgtatcgctgggcgcaggcatctctaccgtggcttgcggatcgttggtatccgtggttggtgttgtatccggggaggattggctgcaccctgcggcaaaacaaagacacaggcccaagcagaaaatcgccgacagaagttttttaggcataaaatcaccttttcaatataaaggatttttttctatgataacagatgcggtgttatccgtcaaaacaggtcagcaataagtgatattgacggtttttcccatttgttctaagcactgccttagctcgtgcaccagcccgatcttaaaggtatagccaatctggaggctgggatcctggtgcgctggattgatggccttgccgacaaataaatggatatccgtagcggattcaaataggagatgagagatttgcgcagccgcatccgctttttgcgcctgcggggaaggaagccaaccttcactgagccgccgttttgccatttccagcaccttggatactgtcaagacgccctctgtaacgaggtctacgccttccaatcgataggcgggcggcaggtctgaacgatctggatccatttccgtttggatcaaggggcgacgcagataacggctgaccatctgagctgtgctgcctccacaaacgatgcgcttgcccgccttcccgaaaaacaggcggaggatgcgttcatcgtcctctttatgctctggaggaccaaacaacacattgacagcctgacgggcgcgaatcttgtatacggcgaccgttacatcgtcatctgtatgatccatatacagtgaattgcatgcgtctaggatcctggtggccattctctgcggagaaagatcgggcgtatagaaatcttcaacaaaggaaataacgtcctccagtggccagccatctgtcagcttgcccatgccggcattgattacgccgtcgctcataaggatcagcatatcccctacgcgtagctgaaaacgactttcggagatttccttttctccgataatacgtttttgaatgggataaggcaccgattttccatcccgcagcaaaatggcgtttggattatcatactgtgccagatatgccatggctgtaggcgtgacctgcaatagcgtgaacgtagcatacgccaaatgacgaacagagcaaaccggcagcgtttgcgcaatggtatccacgctttcctccatagaaacgccatgagaggaaagcgtagaaaggatttttccagtcagcgtggacaggatattggcctttacaccgctgcccagcccatcggaaagaacaatggtagtcatatcatccttttcaatggtggagataaaatcgccacagagatcctctccgtatttattgcagctggcaacgccgctttccaaaagtaagtttctcatgactccagatcctcttccatcatgactgcctttttaagttccagcatagctaccttggtttccgcggcggtttcccctagcagagaggccagctcgtgaaccacgcgcatctgcttttcaatgatttgatctgtcatatccgcagcgttgatcttggcggtacgcagtctttcgcggctttgttcctgtgcggtacggtcgtttaagatgcagattacaagattactgttcctttcatacaaaaaggtttgatccatatatttttgatattctggcagatatacttttttgcgagtaatgcgttctcgcccggcaaaaacgctgacaaaatcaaattcatccatcaagctgccaatgggacggccaatcatatcctggggagatacgacgccaaatagcgcacaggccgcagggttgatcaactggatattcaaatgaatgtctacggtgatgaccgcattgggggaggcggtgatgacctcatcggccacggattccgctcgctccttcatataaggtagacacatggaaatatccgccttgccaaaatagatggccacggccttatcacggcaggtagaatagccgcaggtgccgcagtttaactcgtcttctttggttttctttcccattttcaaaaggatctgcgcaagctcttcttccgtaggcccttgtattttatattgcagatcctcaaaggtctgtacaaggctaccgaccggggctaaggtaaaatcatcataaggcggggtagatccggcagtttctgcgatccgggctacctttttttgcccttccagcaaaaggggctttgcacggcctgtggcaggcccttggatgcagctgcccttgcaggcactcatttcaacaaagcaatgcgcaaggcctccggataagatttcttccagcgcctgtatacagctttccacttcatctacacaaacatactgatactccgcatccggagccatggttttcaaaatgccgccggatacagggaaaaaacgagagagtcgcttagaaggctctgttttttcctcggtagaggcaaaggagatggatgcattggagagccaatggttgagctcatcaaaggtgagcacataatccatatagccgggatagcgctggcattcatcctttttggcaatgcatgggccgatgaataccaaaattgcaccgggatactgcttgcgcagcacctgaccatgggcttgcataggagaaagaacgggggccagatagggaagggcctttggataatgtttttcaatgagctgtacgatggtgggacagcaggaggaaatgatggtatggttccaatgctctgccaccaggcgctcatattccgttttcactagataggccccagaagccgtttcctgggcatctaaaaacccaagtgattttaaggccgcagcaaacgccgcaaaatcctgcacaggataatgcgcgataaacgaaggcgccacgctggccaccaactgttttccctctgccaaaagggcgcgaacagtctcaacgtcgctacgcacatttttggcattttgaggacatacctgggtgcatttaccgcaatagatacattcccgctcgatgatctgggcttggtgatccttgacttcgatggccttaacaggacaattccgtatgcacttatagcaatttttgcagttggcttttttgaactgtaaaacgctttccatccttgtcgtctcccttatgataaacctggtaattcattatacaatttcccctatgaaaccacaagaaaacgcccgaattctttgcaatggagggtatttacaaaggtaggatgggttgttatgctgaaaataacaaatggtaagggagcgggatggatggactgcattgtatacaacgcacacatttttacgctggatggccaaacaccccatgcgacggcgatggccatcgaaaaaggaaagattgtagcagttggggatagcagcttgttggctgctagaacccagaataccaagatgattgatgcccaaaaccgatatatatatccaggctttggggatagtcatatgcatgtgctcaattatggggagacgctaacgcaggtggatctgtccggtttggactccattgaagcgctcattgcacgcgtgcaggattttctgcggcaacatcgagtgcccgacggcgtgcttgtatacagcagcggctggaaccaagacctttttgcagaaaaaaggattccgacaagaaaggatttggatcggatctctaccgttcatccgatcgtattgtccagaatctgcgggcactgtacggtggtcaatacaaaagcattagagcaatacggcattacggaacatacgccgcagccgttcggagggcggtttgagttgggatcggacggcaagccaaacggcattttccatgaaacagcccagcaactggtgcgccgtgaacggcctgtgacgcgggcacaggtaaaagccatgatccagacagcgctcaagcaggcggctgcacacggccttacctgtatccacagtgacgacctggcaagtatccctgggctgggatggctggaagtccataaggcctatttggaattagagcaggaaggtaagctgcctgtgcgcatagtagagcaatgccgctttgccagttgcgaagaattgcagggctttttggacgagcaagttttttatggacagggaagcgatgtatatcgtttagggcctattaaaatcataggcgatggttcgctaggcgcccgtactgcatggctgagggagccatacagcgacgacagcagtacgcgaggcgtatccgccatccaagaagaggaattggaaggcatgatccgtttggcgcatcagcatgattggccggttgcggtacatgccatcggtgataaaaccatacagacagtaatggattgtatcgcccgcgtccaaagcgagcagccaaagcctatccgccatggcattgtacattgccagattaccgacagctccttgttgaaacggtttgcccgcgaagacattgcaacttacattcaaccgatctttttagaatacgatctgcatatagcagaaaaaagggtgggggcacgcgccaaaaccagctatgcatggaaaacattggtggagagcggcgcgcttgtatgcggcggctcggattgcccggtggagcctttggatgtattgaaaaatatgcattgtgctgttatgagacaggatttttatcggcagccggcagaggggtggcatcctgaacaaagattgacgatgcagcaggcgttgccgctgtataccacaaatatcgccgttttggaagggcgccaagcgctacgtggcagcttatccatcggaaagtgggcggactttgtcatattagaccgtgatattctgcaaaatccaaatgaacttttgaatacgaatgtttgtatgacagccatgcaggggcaggttacctatcaaagtcagcgataaatagggggagacagaatgaaagatgcaggtaagtgcagcctttgcacactattgtgtatagcaatgctaagcacatgcgccgcatgcgggcaagagaaaccaatacagatggatgtgccgacggcaacacctgtgcacacaaccgcggcggccacgccggctgagacatccgcgccaacaataacggcgacgattaccccgacgcaaaagccggcaaaagctacgacaaagcctaaggcaaccgcagcgccaaaggaaaagacaaaacaggattacttggccatggttccacacttttctgcggatgaggaagagcgcttgaggcaaaagtgggaaatcagcgccaaaggaaagtattataatcatccggatctgaactattattacgagcgtatgctagggatcaccgatattaccaattatgataaggaattgtacagcgatgccaaggtgttggatatggattttcttcgaaagtgccctaaggaggtgctgcatttgggaagaaacacctattacgcggtacatggtagaatgtttgataataaggatatcttctatcattttttaggaaaaatgtggtatgaaccaaaatatacgccaaaggaatacgatgaaaaaataggaacaaaggtgctcaacgatgtggaaaaggaaaatttgaaacgcataaggcaggtggaaaaggaaaagggatactagagagaaaccgcaaaaaaatagcgtaaaaaagcgcttgcttttaaaattcttttatgctaagattgctaccgttcggtatcattttgccggagggcatgtcatttataagcaatgataagctggataaggcaacgggatgaaccctgttgattatccggctttttattttataggaggtagacaatggatcttttgcaaggaaaagtgaaaaacatctatttcaagtatttggtggctgcttttggaagtgctatgatcacgtctatttacagcattgtggatatggcgatggtgggccagtatcaaggccccacaggcacagcggcactggcggtggtagcacccatatggaatattatttacagcctgggtttgcttacagggattggcggctctgttttatacagccatgcaagaggaaaaagcacaaaggaagaggccaatgaattttttaccgttgcctttatcggcaccgtgttgtttgcagtggccagctgggtggcgattgtgttttttgaagagcctttactgatgctgtttggtgcaaacgaggcactgctgcccctggcgcaagattatatgaagccgatccgttttgcaatccctctgtttgtgtttaaccagatgtttgcagcgtttttgcggaacgataaccggcctgccctggcaacaggcgcagtgttggccggcggtattttcaatgtggtaggagactatgtattcgtctttacctgcaaccttggcatctatggtgcagggcttgccaccgcattgggttcgttgattacttttcttgtcatgttgtcacactttttctccaagaaaaacaccttgcgattggtattgccgcataaagttttttggaggagtaagcgcatcctgacgctcggattttctacattttttatcgatattgctatggggattttgacgatgatgttcaaccgtcaaatcatgcattatttcggaacagatgctctctccgtatatgggatcattgtgaacatcagtactctggtacagtgctgtgcatacagcgtaggacaagctgcccagcctattatttctatcaatcatggagcaaagcagggcaagagaattcaagaaacactaaagtatgccttacagacagtggcaatttttagcttgctgtggacagcggttatattggccgtgcccaatctattcatttatatcttcatggcgcctacggcgagtgttttggccattgcaccgggcattttgcgaagctacgggatatcgttcctattgctgccactgaatattttctctacatattactttcaatccattatgaaagcgggcgcttcgttctttgtttcggtggcgcgcggcattgtcatcagcggcatcatgatctatatgctgccacaactgtttggcggctcggcgctgtggtttgccatgccaatcacagaggtaatcgttgcggtggtcgtagtgttttggatgatccgatatacgcgtagattatcccatataagataaaaaagagcccttaatagggctcttttttatagattggttttagcttaagcagcagcggtgagatccatgatcggcttgatcaggaagccgccg

SEQ ID NO: 817 - DNA, 2682 bp, Unknown
  16S sequences of unknown bacteria
agtttagcgcggcgcgctaaactcgcggacacggtaaggtaacgtgaaattacagactaatgttataccgtgctcggcttcgggattacgttgaagtttagcgcggcgcgctaaactcgcggacacggtaaggtaacgtgaaattacagcttaatgaaataccgtgctcggcttcgggattacgttggagtttagcgcggcgcgctaaactcgcggacacggtaagataacgtgaaattacagcttaatgaaataccgtgtccttttgccggcggagttctttccgtatgcatctccgcgcacggttgatgtgcctttcgaaatcaccgctgttcaaaagctccgtcagtacaaactgctcgaaggtcggaacggtgcaggagtaaaagccgagcttttcacggaatgtcccgatgagctttttcggaatgaccatgtacccgatgcgcatcgaagaggagatcgttttcgaaaacgtgttcagatatatcacattgtccttgtccgaaagcctgaacagcgtctctgtcggctgcgcggatacggaaaattcggagccgtaatcggattctacaatgaagcgtcccgctttgtccgcccagcggatgtattcgtaacgcttggacgccgaagccgttatcccgctcggaaagctctgatacggcgtggtgtgcagcacatccgccttcgacgccgaaagggcgctgctgtcgatcccgtccttagataagggcagcggctcgtatttcactcccgccgcagcgtagatctgcccgatcttctcgtaggacggggattcgatggcgaaaaccttatccttgccgagcagaccgacaatgagagtgtacagatactccgcccccgagccgaccacgatctgctcgatatccgcattcatccctcggttgcgcagaagatactgccttatcgcactgcgcagctccgtgcgccccgtgttcggggatttgtcaaggatcacatcgtaatattcggtgatgaccttgcgcatcgttttgctcagaacggaaatagggaaccccggatacgatgcggggggtgccttgcgttctttcggcagaacgggcaccggcgccgacgaagcaaagccgtctgccggactgaatatgacaaagtatccgcttcgctcgcgggactccgtgtacccctcgtcgcataaaagagaatatgcgtgctccacggttatcgtactgacgccgagctcgtcggcgagcagcctctttgacggaagcctgctgttgtacgggaacactcccgacgtgatgtcgtctcttatctgccggtatatatgtagataaaccggtctgtccgtattgttgactgtgtaattcatctggatatattattttctccgtttctggttattttgtatcatcagtttatattatatgatattgttactcaaatagcaaggagaaaatgaaaatgctgaaaaatacaaaaagaagaacggcaatatggctgtgcaccaccgctgtgcttacggctctcaacatagccatgagttccttcggagtccccgtccccggcggacatctctatatgaatgatatcattatatgcaccgccgccattctgctcgatccgctcgccgcgtttacggtaggcggcgtcggcgctttcctcggcgacctgttcttttacccgacgccgatgttcgtgtcccttgtcacacacggtttgcaggcggtcgtgatttccgtgttttcgcattacgttctgaaaaagcatccggtgctgtcttcggggatcggagtcgccctcggcgcggtgatcatggtcgtcgggtattcgctcggcagagcgtttatctacagtacgcccgagtacgcacttctcaagttgccgtatcagattctgcaggcggtcgtcggtgccgttttcgggatggtgctgtgctggaaatgcggaatacacaggctttacaacagaggcgccgcaaaggaatgacggcgcggtgaaaacaaaaaaacggtcggattttccgaccgttttttcttggaaggcgcacggtgatgaggggggagatgtaacatatctattgtaatcataccctcgctgcccgccgggaaaaattcaaattcttgcaaaaatgcagaaaatatgatataatgggcagcagaggatcggcaagcggatttgtcggcagagtaacattctcacggcaacggacgtgagacgcaaggcaaaattcagaacggattgtcgaattgacggaggaaagaccgatcaacgttttattacagcgtatagaataggggtgaaccgaaaatgaaatatgaattaggcgacagagtgcgaattatcgcaaacgggcagacaggctctatctgtgatgctgaggtagtggacgggcgtcccgtgtatattgtggactgtgcaggtgagtgtgaaagtgaagagacacaagattgtgttattaccgtggaagaaaatgaaatagaagcgatctaaagacaatcacacatctttgccgtcagcggctttccgctggcggtatttttatgcccaaaggaggcgttttgaccgcgacacccggcggaggaggcaaggcagatgcggcggaaaagactttttgccgattttgcataggatactttttctgttacggctcttcttcaaattatgtgtaaagtccaaaatacggtataaaaaagcaacgtg

SEQ ID NO: 818 - DNA, 29410 bp, Unknown
  16S sequences of unknown bacteria
tgcttcgggcggttttcgtttataaaaaagaaaaaggggaaaaataggaaaggaaaataggaaagaaaaaataggaaagaaaaaataggaaggaaaagacgaaaggaaaagacgaaaggaaaagacaaagacttgaaggcgggagggtatgttttttgaaagcgcccgcgccttttcgacgacaaaactattttttgcgaacgcgggaaaaattttcaaggcaacgatcggaagccaaacatctttcttttcgcaatacgccttttcccgccgttctttttcatggagaaagaatttcaaaaacgacaaaagcagaaaaacggagtttccgtctttctgcttaaagagaaatgccgcggggcggacgctcagaaagcgggagccgcctttttgtttcctttcagccataaaatggtgtcgcgcagagtttcgtataaatcgcgcggacggtagccgagttcgcggctcgccttttcatgggaaaacttgtcgttgctggacagcgtatagagggaatatttggtgtaaagggggcgcttctttttacatttggaaatgaattccatcaggggcagcgccagctttgccatccacatgggcagaatgggaagtttttttccgcccgtgatggatttgacgatcgccaatacttctttgatttcgtaatggcggttggaaagaatatagcattctcccgctttgcctttattcgcggcggcgagagtcccttccgcgacgtccctgacgtccacgaaatcgtatccgcccttgacgcaggcgggaagtttgttttccacgtaatcggtgacgagctgcacgagatgattccccgacctgtcgtagggtccgagaatgccggacggatgcacgatgaccgcgttgagtcccttttttacgtattccaggaccgcctgcgtcgccagcgctttcgtcttggcataggcgccgtgcacctcttcctccgaaaagctgtccgtttcttcgagaacgtgtaaagggcgctcgggaatggcgtgtaccgaactcacgtatacgaacctgcgcaccttattttccagcgcgagcgcgagcagatttttcgtcccttccacgttgacctttaaaagcgcttccgtcacctcgtcggctatactgatgatgcctgcggtatggatgaatacgagctccgcgttgtcgggattggaaaacagcggacgaagggaatcgacatccgtcacgtcccccttcacatattccgcttcctcggggaaaaaaggagattcggcgggcaggatgagcccgcgcaccttttcgccgctttgtatgagttttcgcaggatggtgctgcccaaatgaccgtttgctcccgttacgacgtataattttttcataaatatcactccttttttatctgcggtattgatttttctttgtaaaaccattataatatagaaaaggaaaaatagcaatcatcaattttttccgaagtgaaggcttttcccgcaatccgctcttatcggtaagatattcgacgtttttgaaaaaattgtcgggcggcgtccggcgaaagcggggcgcggattttgggaaaaggcgctcggaaaagcaaattttcaaggagggaggacatggcaaacgactatcgggtgcgggtgacgaaaatgctcatccgcaaagaatttaccgagcttttgaagacgaagcccgtgcagtctatcaccgtcagggagatctgcgaacgcacgggcatcaaccgcagcactttttataatcactacacggacgtttacgaccttctcgaacagatcgaaagggatatgcttgcggaattgggagaaaatctcaaaaccatcgagccggaagacgatctcatgcccatctcgctctttaaaggaatcttcggcttcctcatggaaaactcggatatgtgcgtcatcatgctgggcgagaacggggacaaacggttcgtctacaagatgctggaaatggggatggaaaactgcctgacgacttattcccgctattttccctccgcttcgcgggaacagatcgaggatttttacgtctttgtcagcaacgggtgcatcgggctgatgtcccgctggatcaatgcgggaatgaaaaaatctcccgacgagctggcggcgaccgccaaggagatcatgacgaacgcgctccgctatttcgattctttgcagccgaaaaagtaaagacgggaaaacagggcgaaagagagggacggcgcataaaaaggcgcaggcgtagccgacgggggcggcaaaaagagcaggaggtgctcggcgggcggcggaaagcaatcaacgggggcggatggctctttcctaaaaggatttcgatgcgcggaagaaatttgattttaacctaaaaagacggcaaaaagacggaaaagggcgtaaaaaggcgggtggcttgacgggctactcgcttttttgacaaaatcggaaagaaaaaattgacttttttacattcgggacgtacaatgaagccgtaaaagatccgtagggaggtcgaaaagatgaaggacaaaaaatcgttcggcagattcattgccgaaaaaagaaaggaaaaaggcatgacgcaggcggaagtcgcgcaggcgctatacgtcaccgtgaccgccgtatccaaatgggagcgcggcgtcacctacccggatattaccctgatttccgatttatgtgagattttgggcgtgagcgaacacgagttgatcacggcgggcaacgacgccgagtatcggcgcatgaaagcggaagcggaacgatatcggaagatctccgacgcgtggttttacggactgacggggacgtatctgctggcgctcgtcgtctgttttatctgtaatttggcaatagataagaccctgtcgtggttctttatcgttttgacttcgcttctgacggcgttttcgctctttccttcctgggcccgtttcttcaaaaagggaaagctgctggcggtcagcgccagctttacggcgtctttgctgctgctccttctcgcctgctgcgtctatgtgcgcggggattggtttttcaccgctttgacggcgattttattcgcgtatgccgcggtgtttctgcccatccttctcgccctgtatcccgtgccgcgcgccattaagaaaaataaccccattatcagcgtcggggtggattttctccttctcctcaccttgattttttcctgttgctacgaggatatgagcgaatttttaaaaggcgtaaaaatcgcggcgttctgcttcgcacccgtgttcgcatcggctgccattctttcctatttgaaaggaaacggctggataaaagcggcgtgtatgtgcgttttgtggggagctttcactttcggggcgaacgcggttatttctttgcttttaggggattcctacgcctttaaaatggagctgacggattggagcgaaacctatttgaacgggaatatcgtgttcgtcgtctggctggtttcttttctggtcgcccttgcgtttttggtcgtgggaatcgtcagggaaaggcgaaaagcaaagaggcagggctgagaacaacgcatgaaaacagagatggagaaaagggaacgtccgaatgcagggcgttcctttctatttttttcgccgcgttcggggcgggggggagctgcgttttgggaaagaaaggacatttgaatgtaagggaaaaaacggcgtcggcttagcgccgcaggactctgcgggaaagaagggggatttttatgcgaaggacaacgcaaaaacttgaagggagggaaacggacggggcaggggcggcgcggggacttcgcggggaaaagaacgattttgtacgagtgggaaaggcgcggaaaatttgaataaacgaaaaagagcgaggcgattgcggagtaaggaatccgcagaaggcggggattttgtacgattgacaaaaaacggaaaaaatggggggaagacgaaaataggaagggcgcagacggagccttggcaatagggaaattcgcgcggaaagcggacgccatgcgcgaccggcaaaggcgcggaaaaagcgggaaaaagaaaaacaggcgggaaatttaggaggcgggcagcaaaaactgccgttttgcgccgctcagaggaagggaaacggaaagaaagcaaaaaggcgtgcggacgtctgaacggaaaaccgcagcgagagcggggaaaatgcagccgccgcaacgggagaaacctctgcgcaaataaaaacgcccgttttccgatagggaaagccgccgtgaaagcgacgtgttttcgatctgcgcgggaacagaaaaagaatagaaatttttgcgctgattcgattgatggcgcctttttttactgcccgcgagagggaataaaaaagatttcgtggggagcagaggaccgaaaggggcgggaaacgtcgaatcgattttgttccgggacggcgaaaccgaaaaaaagtttttttaaaaggcaacgcttggcaaagcaaagaagatgcgtattttcgggcggaaaacggaaagggggaagggcgcgcgaaaggctttcctttattcataaaggcgcgtggtcaagcatagaatgaaacgtatcacggctatttattacaaggagagaatctaatctatgaaggaacagattttgtcccaaacgggcaaaacgacggggagcgtcacggcagggctgacggaggaacaggtgctcgcttcgcgccgcctgcacggcgccaatgtcctgaccaaacgcaagagaaaggggttttttcggcagtatttatcgagtttcggcgatcccattataaaaattctgctggcggcgctcgccatcaacgtgctttttctcttccgaacgtccgactggatggaatccgtcggcatcgccgtcgcggtgtttttagcgacgttcgtttccaccctttcccaatacggcagcgagtccgcttttctcgaattgcagcgcgcttccgccaatatcgaatgccgcgtcaagcgcgcgggcagcatccgctctattcccgtgtccgaactggtggtgggcgatatcgtcctgctcgaagcgggagaaaaactccccgcggacggcattctcctttcgggaaaactcagcgtcgatcagtcggcgctcaacggcgaaagcgcggaagcggaaaaactgcccattgcggcgggcgaagaatgggacttgatgcacaagaatcaactctttcgcggcagcatcgtttccgcgggcgagggcgtcatgcgcgtcgaacgggtgggggataagaccttttacggcggcatggccaaagaaatgcaggacgaaccgcccgaaagccccctgcgcgtcaagctggcggggctggcgggaacgctcagcaagctgggctatatcgccgccgtcctcatcgccgtcgccgacctcttcaacagctttctcatcgacaacgccatgaatttcgcgcgggcgtgggcggatatctgcacctggaacgtctgtttgccgcgcctgatgcacgcgctcaccttagccatcgccatcgtcgtcgtggcggtgcccgagggactgccgatgatgatcgcggtggtgctgtcctcgaatatgctgagaatgctgaaagataaagtaatggtgagaaaacccgtcgggatcgaagcgtcgggaggcgtgaacatcctgtttaccgataagacgggcacgctgacgaagggggagctggaagcggtgaaaatcgtggacggcggggggcaggtattcaacgacgtgcaggactgcggcagaagcgtaggggagcttttgaagctgtccgcctatttcaatacgggcagcgccctttctgcgggaaaggcgctgggcggaaacgcgaccgaccgcgcgcttttgaaagcgattctccccctcgacttcaaaacggacaattataggaaattatccgcgtttcccttcgacagcgcctataagttttcggcggccgcggtgcgttcgcagcagggcgcgatgcccgtcttcggggaaaagtgcacgtttatcaagggcgcgcccgaaaaaatcctgcccttttgttccgattacgtggacgagaacggggaatttcgcgctttcgattcggcgcagatcggccgcaaacagcgcgcgatgacgcaaaaggcgatgcgcgttctggcggtggcggtggcaaggcacgacgtcgcgggagaaaaggatctcaaagacctcatcttcgtcgcgctcatcggtatccgcgacgatatccgcaaagaggtgcccgccgcgatcgccgaggtgatgggcgcgggcatacaggtggtgatgatcacgggggacaatatcgaaaccgcgaaagcggtggcggaagaagtcggtctgctcgcgcatacgggcagggacggcaaggaaacgccgctcgccgtgacggggcgggaactcgccgcgatgacggatgcggaagtcgtgaaaattctgccgcggctccgcgtggtggcgcgcgccctgcctaccgacaagagccggctggtgaggctggcgcagtcgcagggactggtgacgggaatgacgggggacggcatcaacgacgcgcccgcgctcaaaaaagcggacgtaggctttgcgatgggtacgggtacggaagtggcaaaagaggcgggggacatcgtcatcctcgacaacaatttcgcctctatcgccaaagccatccgctacggcagaacgattttcaagaacatccgcaaattcgtggtctttcagctgacgatgaatctctgcgccgtcggcgtatctttgatagcgccctttatcggcgtcgacacgcccgtgaccgtcattcagatgctttggatcaatatcatcatggatacgctggcggggcttgccttcgcgggagagcccgccttgcaggaatatatggaggaaagaccgaccaaacggaacgagcccgttctctgcaagcgcatgatccatcagatcgtctgcacgggcgcctatacgatcggcctgtgcctcgtatttctcaaagcgcccgtctttaaggggctgttccgctatgaggaaaatccgctctatttttacaccgcgttttttgctctgttcgtattttcgggcgtattcaacgccttcaatgcccgcacggagcggattcatctcttttctcacctcaaaaacaacaagctgttcgttgtgtttatcctgctcgtcatggcggtgcagctgctgctgatctatgtgggcggaactatgttccgctgcgcgggactcaccgcgggagaacttttcatcaccttactgctgtctttgacggtcattcccgtcgacctcctccgcaaggtaatttccaaaaagcgcgcgaagcggaaaggggaaacgaacgagggattctgcggggaaaaggcgtcgggaaaaggatatgcccgtcccgaaaaagcgaaagttttggaaaaataattttttgccgcggcgtccggtccttcttttcgtgaaggcggacgccgtttttacgggcgcgtcataaggacgagataaaaagaggagattgcagcggaaaggagttgcctttttgcggatcacttgcgaaaaatacagagaaatgagaataaggcagcgccgttttgcgcggacaaaggcggggaacggaaaaaaagatcgtttttaagagtaaaacggttttggcctgcgaacaaaggggggaaagaacgggactttttaggaagaaagggggagtttattgcggatattttttggaaaaagatagatttttaggcgatttaagcgggcgacggttaaggagaggatgaaaaagcgggaaaggaaaatataaattgcgtattcccgatttgcgataaaaaggcacaaggtcggccgtaaagcgcaaaaaggaacgcgaatccgcgtccgaaaggaaattttcacaaaggatttacaaaacacgcacaacatatcaacgaattaaattgacttttttcgcaaataatagtacaatcaaggcatgagtaagatttgtttgcattgcggctatacgaatgacgatcaggcgcatttctgtgtccgctgcggcgcgcgcttttccgaaaatgcggaaaacggcgcgaatccgaatgtccgtttcggggagaacggactgccgagcagggaagcgggacaggaacaacagccttccgcaattacgggggacggggcggccgccttagacgaagagaagacggaaacagagcttaaagacagggacgcgggggagttttcccgttcgtttccttccgacgcgccctcgggcggcggagaggcggcggacgagaacaagatcagcgcggaatggcaaggcacaaactgccgctgcgccttcggaacaaatccgtcggcgccggcttccggcgctgaaaacgcgccctacaacgcgcccgttacgaccgctaacggaacgccttaccgccctgtcgcgggaaatcgttacccgccctatgcgcccaatgcggtctattcgcctcaatactatgccgcgcagcgccaaaggtatgaagaggcggcaaaaatcgcgcgcgtcgccaatacgaaaaagacgctctttattttgtcgttcgtcggactgctgctggactttctctgcggcataggcgctttgatgtgcctgcccgcggcgattatttcgtccgtatattccgtccggttatacagggaagaaaaaaagacgagcactcagctcgtctgggcgatgatcgtcggctatgtcggcgctgtcttcggaattttattccttgtcctcatgataagatagccttacgcggcgatttgccgcggtgcgatttcacaactttatacgagcgcacggcgcggaggttacatatttcggcatatgaggagtgcatatgttagataagcgaacctccgcgcttttgcagacaatcaacgatttttgttcctcgggaacctataaaattttttccgaagaggattttctcgcggcatttcccgaaagatggggagtgaccgcggaatcgctttgtcaaatgctggattatctgtcggaaaacggctacataaacattaagtattcgggcggcggtatgtactgcatctgcccgcttccgctcgggcgcggctactgcgagcaggaagcggacaaaaagagcgaatgcattttgcagcttaaatattttatgtcggcggcgtttttcggctcctttgcgggcgccgtattgggcgcgttggtgtttgctctcatctatatggcgatgcggtaaattgaccgatcgccgcggcgaaaaaggaagataaggagggtgtatgctcagcaaaaaagaaagcgaagtgatgcaggcggtgttttccctctgctcgggagagggacgatgtcttgtcgcgcccgccgaccttctcaatcagcttcctccgaaggaaaaatatacggaggaaaaacttgaaaaaattttgcgcgcgctggaactcgacgattatttcgaaatcatctcttcggacagaaaaggggaaaaaatgtatgtcatcaccctgcacccgaacggatttgcctttaaacgctccaccgtgcagatgcggcgggatatgtttttcaaggtcggctggaccatcgcctccgccgtcctggcgtttttggtgggcgttttgctgaaaaagatattttaaaacgtataggcgcggcggtatgacggtaggatcggaacgaaacctttttgcggcggataagcgggatttttgccgaaaaatatcggggaacgtgccgccgcgacagcggaaattcgggaaacttttttgcggcgagcagggagaaaaggacgccgcgggtttctctttttgtcttttactctataaaagaaaaaatagatttttcgcggcgaggaaacaagtgcggcgacaaggaagaagaggggggcgagagagcaaggacggcgggaagcggggcgacaagaaaacagggacaacgagaatgcaaaggtaacgacaagaaagaaggtcggcgccgggaagtcgagggcggcgggaaggcaaaagggctttaaagaaaagataggggaacagagagcgttcgggggcgcggaaaaaagaaaaaagcgtcgggagaagacgggcgttcgaagaaaaagggagaaggcgggaagaaaggaattctgagaaaagcaagggcggcgggaggataagaaggacgaggaaaattttgcgttggagattctctttaaagacgaagttttttcaagacagtgcggcgatttgacaaaataacgcccgggcgtattaaacaattttcgggaacggcgaaggcttacagaagggcgcttccatttataaaaaagcgttcttcgttaaaagccgcaagggatgcttttgcggggagaagactgcaatcgtctgccgaatacacgcttcttttgaagggcgtcatgcggaggagactcgctcgtttgcggaaaggactcacgcggcccttcctttttttacaaacggctgcgattgcgcagccgtttccttttggaaggaaaaaaccgcacgctttcttgaaatactccgtcgataaatgcgccgaaaaatagactgaaaggcgcgattcgggcagtgcgacaatccgtactttccaattttgacagggctttccatccttcgcgcgtatttgcaaaacggatgttttagattcttcgaataacgccgataattatcgttgaaatcagtttacatttaaaaaatattgtgttataatattccttgcaatgcaaacgaatgttcgtaaaaaaagatggatagcgaaggaaaaagtttcgaggaggaatcatggaatttaaactgcattctccctttcagccgacgggcgatcagcctcgggcaatcgataagctcacggaaggagttttggacggcgtccgcacacaggtactcgtcggcgtgacgggcagcggcaagacgttcacgatggcgaacgtcatcaaaaacgtcaatcgtccgacgctcgtgattgcgcacaacaaaacgcttgccgcgcagctttgcaacgagttccgcgagttttttcccgaaaaccgcgtcgaatatttcgtatcttactacgattattatcaacccgaaagttatatcccgtccacggatacttatattgagaaggacctgagcctcaacgacgaaatcgataaactgagaaactctgccacctgttctttgatggagcgggaggacgtgatcgtggtggcttccgtgtcctgcatttacggcctgggcgcgcccgaggaatatttccgcctgtctatttccctgcgtcccggcatggagctggaaagggactggctcctgcgcaaactgatcgagctgcaatattcccgcaacgacatcgattttaaacgctccactttccgcgtgcgcggcgacgcggtggagatctttcccgcgtcgaattccgaagttgcggtccgcgtggagtttttcggggacgaagtggataagatctacgaagtggaggcgctgacgggaaataaaatcaacgagcttgcgcacgtggcgatttttcccgctagtcaatacgccgtcggcacggaaaaactcagaagcgccctttccatgatagaagaggatttgaggggagaggtgcgcgcctttgaggaagagggaaagattttggaagctcagcggctcaaacagcgcaccgagcacgacctcgaaatgatgcgggagatcggctattgcagcggcatcgaaaattatagccgttattttgacggcagacatcccggcgagccttccttcacccttctcgattatttccccgcgggaaaatttctcgtctttatcgacgagagccatatgacgattccgcagatacgcgccatgtatcacggggatttttcgcgcaagaagaacctcgtggattacggctttcgcctgcattccgcttatgacaaccgcccgctcaccttcgacgaattcgacgaacgggtgccgcagctcatctgcgtttccgcgactcccgccccgtatgaattgggggaagcgggacagaaagtggaacagctcatccgtcctacggggctgttggatcccgaaatcaccgtcagacccaccaagggacagatagacgacctgctctccgagatctatacggtggtcaaggacgggggcagggttttgatcacgacgcttaccaagaaaatggcggaggaactgaccgactatttgaaagaacattccgtcaaggtaaaatatatgcacagcgacatcgacacgctggaacgtatcgacatcgtcaacgggttgaggctgggggagttcgacgtgctctgcggcatcaatctcctgcgagaaggactggatttgcccgaggtaaaactggtggccattctcgacgcggacaaagagggatttttgaggagcgacaccgcgttgattcagacgatcgggcgggcggcgcgaaacagcgaaggcagagtcgtcatgtacgcggacgtcctcacggacagcatgaaacgggcgatcggcgaaaccaatcgccgccgcaggattcaggacgaatacaacaaagagcacgggattattccgcagacgatcatcaaggaagtcaaatccactttaaacatcaccaagaaaaagtcgtcggacgacgatatcaaactcaaagatattcccgaggagatagaaaaactcaaagcgctgatgaaagtggccagcgctcagctggactttgaaaaagccatagagatccgggataaaatcggtcagctgagggcgaagatgagaaaggcggaacggcagggaaaagcgtaatcgggcggggcagggcagaggcctattgcccgatacctgccgatagcccgcgcattgacggcgcgaggctgcaaaggcgttttttcaaagggcggaatttgtgcctctcccgcgtctgcgggcgaaacgggaggaaaattcggccttgcggcgtaccgattccccttgcgggcggaaattcgcaggcgcaggagcgcggaaagaaaataaggagtcaatatgcaggaagaaatcgtaataaaaggtgccaaggaaaataatctgaaaaatatcgacgtgcgcattccgagaaatacgctcaccgtgttcacggggctttcgggcagcggcaagtccacgctggcgttcgataccattttcgccgagggacagcggcggtatgtggagagcctgtcctcttatgcaagacaatttttgggacagatggaaaagccggacgtggaaagcatcgacggactttcccccgccatttccatcgatcagaagaccacttcgcacaatccccgttccacggtgggcacagtgacggagatctatgactatttccgacttttgttcgcccgtatcggcgtgccgcactgtcccaaatgcggccgggaaatccgacgtcagacggtggacgagattgcggaccgcgtcatggcgatgcccgagggcagcaaaattctcgtcgacgcgcccgtggtgcgcggacgcaaaggggagtacgtcaaagagctggctggctacaaaaagagcggctacggcagggtgaagatagacggcatcgtctacgatttacaggaagaaatcaagctcgaaaagaacctcaaacacaatatttccgtcgtggtggatcgtctggtcgtcaaagcggggattcagaagcggctgacggacagtttggaaaacgccttgaagctcgcggacggattggtcgtcatcgactgcgagggcaaagaggaactctattccatcaactatgcctgtcccgactgcggcgtgtctttggaagagatcgagccgcgcctcttttccttcaataccccctacggcgcctgtcccgaatgtctgggactgggctttcgtcagatggtggatcccgatctcatctgtcctgacaaaaataagacgctgcgcgagggcgccatcaaggtttcgggctggaatctcgacacttccacgcagacgcagatgtacctttccgcgctttccaaacattacggattttcgatggacgtgcccgtcagggatttgcccgcggacgtctacgatatgctcatgtacggcaacggcggggagaagatcgatctgagctatcacacccgttcgttcagcggcagctataagacggcgtgggagggattcgtcacgaacttgcagcgccgttattctcagacctcttcggacggcgtcaagtacgacatcgagcgctatatgcgcacggcgccctgtaccgcctgcaacggcaagcgcctgaaaagagaggctctgtccgtccgggtgggcggcaggaatatctgggatctgtgcgaaatgtccgtggacaaactgtacgattttgtggacggcttggtcctcaccgaaacggaacacctgattgcggacgcgattatcaaggaaatcaagaacaggatcgggtttttgaggaacgtgggactgaactatctcacgctcgcgcgtacggcgaacaccctttcgggcggcgaatcgcagcgcatccgcctggcgacgcagatcggcagcgccctgacgggcgtcctctatattctcgacgagccgagcatcggtctgcatcagcgggacaacgaaaaactcctccattctctgcaagggctgcgcgatctcggcaatacgctgatcgtcgtcgaacacgacgaggataccatcaaaacggcggactatctcgtggatatcgggccgaaggcgggcgtgcacggcggcgaagtggtggcgtgcggaacgcaggcggacatcatgagggagccgcgatcgatcacgggcgattatctcgcggggcgtcggaaaatagagattcctaaggtgcgcgccctgccctccgaaaaatggctcaccgtgtacggctgcaagcagaacaatctgaaaaatatcgatatttccatacctgtcggcctgatcacggcggtgacgggcgtttcgggcagcggaaaatcgagcttcgtcaacgagatcgtctatcccgtgctcgccaatcaactgaacggagcgcgccaaccgctcggcaatttcgataaaatggaaggcgtggaatatttcgacaaggtgatcgccatcgatcagtcgcccatcggcaggacgccccgaagcaatcccgcgacgtatacgggcgtattcaacgccattcgcgagctgtttgcgatgacgcccgacgcgcaggagcgcggctataaagcgggcagattttccttcaacgtttcgggcgggcggtgcgagcactgtttcggcgacggcatcatcaagatagagatgcattttctgcccgacattttcgtgccctgcgaagtgtgcggcggcaggcggtataaccgcgaaacgctggaagtcaagtacaagggcaagagcatttccgacgtcctcgatatgaccgtggaggaggcgtgcgagtttttcagacccgtgccttctatattcaataagctcaatacgctgaacgaagtggggctgggctacgtaaaactcggacagagcgcgacgacgctttcgggcggcgaagcgcagcgtgtgaaacttgccaccgaactttccaagcgctccacgggcaagactttctatattctcgacgagccgacgacgggattgcacacctacgacgtggataagctgatcaagattctgttgaggctgcgggcgggaggcaacacggtgctcgtcatcgaacataatctcgacgtcatcaagaccgccgattatatcgtggatttggggcccgagggcggcaacggcggcggtacgatcgtctgctcgggcagtcccgaagaggtggcaaacgtcccggaaagctatacggggcagtttttgaagaaagtgctggaaaacgcctgacgaaatttcccctctttgtccctgtcgaaaaacgcgaaagggagctttttcccgcgcgcggagagggacgcttttcccaagagagcgcgaaaatagaaaatcaggtataattttccaaaaaatcgcgcataataagggtatgattaagcctaccaaaaacatagcggacgtcaaacaaatggtaaaagactgctcttataagcacgtcgcggtgcgcgtgaacctgggcagaaacaagattttaaactattcgggcgtgttgtcgggaatctatcccgcgctgttcacggtgaagccggacgacgacgactttctcggaaagaccgcttattcctactccgacgtgctttgcggaagcgtcaagataaagaagatacaataagcttttttcccgtcggatcctccgacgggatttttgtaggtaacgcttgccttttttctccgtaaacggtataatagaaacggaggaaaaatatgggagaaaaagtttttttggcgaaaaattcgcgcgcgcaatgtttcatttttctgactgcggggatctgtacgttcctcgtttctctcctatgcatatttttcgtgagtctatggataggcgttgccgtttccatcttaggaggaatacttttgggcttctttatatatttttatcgtcagcctcgaatcgcgatagaaatagaatccgagtgtttaaaactttataagaggaatcaagaatggagtttttctttaaagtccattgaaaaaataatcattctcgatcagggcggctctcttgattttaccgttcatttaaatgatttttcaaaattcggctttcattttctaatagagaacagcgaaaaaacgaaaagagaatggatacgctgtttagaggaatgcggcgtaaaggtaataatggaaacttcgcccgtataattaaaaaccgtattttccatataaaagatttaaaagcctacaatgacccgcgggctttttcttttcgacaaaaatcgcttaaatcctttgacaaaacttttcgcctgttcgtcataaatctttttaacggcacatacaatgataaagcaacagaaaacaaacggggtaaaagcaatgtcaatcaaaccgcattttgaaacttatcgctatacgacttgcgtctgtcggacgggcagccagtcgattgtcgaatgtcgtcttcccggcagcgagattacgagcatccttgccatttacgccaaagcggtgcccgccgagtgcgtttgtgcggacggcgaagtccgctataacggcaagctttttttgaatatcgtctatgaggacgccgatcgcaaggtatgtcgtgcggaacgcggcgcggagttttcgcaccgcgcggaaaacgaactcgttacgcccgcgtgcttcgccaaagccgaactcaaaacggacaacgtttcctatcgccgcgagggatcgggtctatatatttccgtcatcatcggcgcggatatcgcggtgtacggaacggcgcaggcggagtatctctcggacggcgagggcatcgtcgccaaaaagagtccgcaggcgatcgtcaaaaccgtctgcgtatcgggcgaggcggaaacggacgacgaattcgaaacggattacataggcgacatcctcatgcacaccgaaaacgtcaatatcggctacgtgaccgccgaagcgggacagatcaccgtgtcgggggagatcaacctgaatatctgcgcgctcaaaagcgacctttcgctttgttcgtacgagcggctgatccctttccgtctggaaattccctgcgacgaatcgatgccgaagctttccgcttctgcgaaagtgcaggtcaagtcggcggtgctgacggcgggtacggacgaggaaaagggaaaatgcaagatagacgcggaactcattttaaacgccgactgcgaactgtatatccgcgacgaattgcccgcctgcgaggatattttctcgcccgcctgcgagcttacatataaaaaggaaacgaaaaaaggcagatatttgagcgatattctgcgctttaccgagcgcgtgagcggctccgcctccctttccgttcccatcgattatgcgacggctttgcaggcggcggtgctgcccagggcggaaatcacctgtaaaataggggaaaacggaggcgaagcggagggcgcgatctttgcggacgtcctcttgtgcgacgcggacggcgtgcatagaagcgcggagctttccctgcccttcctcttccccgtcaaatacgaggaaggctgtatcgccgaagcggaagcgacggtgtgcgggctgagcgtgcgccagcgccgcgaaggggaagccgaggcggaagcgaccttgaaagtgactctcaaactctataaggaaacgaaggcggagtatatctccgaaacggaggagggggaggcgtataaggaaaacgacagcgccatatccattttcatcccccgcgcgggcgacggcctttgggaaatttccaaacagctcaaacgccctcctgaagaagtggaaaagagcaatcccgaactgaaattccccgttaaagaaggcgagcggattttcatttacagacagaaaaactgaggcgtaccggcaaccgccgaacggcgttgcgggaagcgtttttcgggaaaagccaagggcggctttcgttttcccgcccggaaaaaatagtctttctgactccctctgccttttcagcgttttaaaaaaacggaaagcctttggaaaaaaatgaaagcgatccggcaatggaagcgggcggcgcggcttaaaaaaattacgaccttttaaaacgtttatcgattcatcccaatagggtgcaactctctttgtcgttttccgtgcggttcgttccgcacggaaaacgtgtcgttgcgccgcgaacgcctcggagccgacttttttaggcgcgattgtaaaaattgcgaaaaatattgtctaaaaccctttaaagtcttgaaatttgaggaaaagtatggtacaatagaatcgaaaaaatcggcggcggggcttcctcgccgctaaaatcggaaaccgacgatgaataccgcgaaaatcaagtcttacgcaaaaatcaatctgacgctcgatatcgtgggcgaagcaaacgggtatcatctgctcgattcgtttgtggcaagtctggatttatacgatctcgtcgtcgtccgaaagcgaaaggacaagttgatttccgtgacgatgcgcggcatgggcagcgagggaatttcccccgaagagaacaacgccgcaaaggcgggcgaggcgttcgttgagcgtttcggcacctcgggcgcgaatatcgccgtctataaaaatatccccctcggagcgggactgggcggctcttccgcggatgcggcgggagtgctgaacgggatggcgaagctgtacgggatttccgattcggaagcgctcggcgcgcttgccgatcggttgggcagcgatacccgctatatgcttaaaggcggattttgccgtatacaggggagaggcgaaaaactttttccccttcccgcaaaaggaaaaaaactgtacttttttctcatttgtccgaaaagttcggtgtctgcgggcgactgttatcgggaatacgacaaagggggcaatttatatgcgcccgaggaaaaaaatacgcagaagtgcatcgacgcctttttagacggaaagacagaggacgtgggcaggtatttgacgaacgcgctttacgagcctgcggcacggctgaacgaagaggtgaaaaaggcgctttcggaagccaggagcttttctccgctcggcgccgcgatgacgggctcggggagctgcgcggcggcgctatttgaaacgaaggaactctgcgaatgggcgaaaagccgatatcggggaaaatttcgcacctatgtggcgggaacggtgattcccgaagaaaaaagaaaactttttcgttccccgttctttttgagcaaagaggaacgggatggaacggagcagtcttaacggatgaatttcggggcgctatgccctcagaaacaggagcattgatttatggaagagcgaattatcgacgacgagtatgcgagaggcattcgactgaaaaagaccaaagacggctatgtggacgtcacggacgagcttgccgaagaggagcgcaaagcggcgaaggacgaagcggcggaggactcgggcgaactttgcgaaacgcccgaagaggacgccgaagcggcaggggaaacggaagaagcgctgatcgtggaaggcttggagaaaacgttggaaagcctttccgaagaggaggggacggaggaagtcacgtttgaatttcccgaactcgaagaggacgacgaggatctcgtcaatctgacgcccgaggaagccatcgccctccgcaagaaaaaggaggcggaagaagcgcagcgcaaggccgattacaagcgcctctgcgaggaaggggaggaattgctcgtttcgggcagttttaaagccgcggaactgaaattcgaaaaagctttgaatctggcggaagacgcttcggaggcggcggtgggttactggcgttccaagacgtccgatttttccgaccccgacgcgctgatggaagactatctcgaaacgggattcgagagccttgaaaacgacctcggggaagacgccaccctgcgcatcaaagaacgttataaggacgtctttgtccgccgtcttgcaaagttgcgggaagaagaggcgcctttggaggaagaggtgacgaaaaagcaggaaaaccgccgcgccattttgaaaaaacgcatctcctcgacaaaaaagaagtttatcggcacgctgttgccgactgtgatttttttgattctcgccatcgtctttgtcacgatgatcaccacgcgcaaggacgggctgttcgtatatctgacgacgggcgcgggaatactgtttgcggggttttttgtcgccttcggggtgtttaccaacaagtttgtcaacgcgctcagaatgaaccgcgccaatgaggacctctcttccaccgaggacggggaaaaattgttgaagatccgcgcctataaagaactgtacgagcattttgtcggctgattttgcctatcggagatgaaaataacgaaatcgctctctaccgaaaaagagatcctgtaaaaagcggatctctttttcttgtaaagtgaaccccgcgtctaacgcggggtttaaaaaatgtggaacatagaattcttgaaaaacaaaactcctcgttgaaagaagataaactcagggaacagttacggatagatgattcggatagcccgttcaaggcataatgcaaatggcagacctcactacccttgtcaggatcgaccggcagcatagggcttcgcccgcataggaaataccccgcgttttacgcggggatagttattccttaacgggactttgcggacagggaatatcgggatgcgggaaaatagtcgttcggcaaaatcgcaaagggcggaagcggaaggtcggctctgaaaatagcggcgggaaaaaggcgtaaaattttttgtttcccggagagccgcaaaaaaagggcaatggaaagcgtcgggcgttcaaatcccgtttttcgatggaaaaacgggtcgtaatttgttttacatattcgtgcggatgatgtataatgatatatcatttgtggatttcggaaaaaacgttttttgcgtaagggaacggagtttacgctttacgggaggaaaaaatgtcttatgaaaaggtgaaggagtatttccggcaggcggggcttgaagaacgggtggaagttcggcggcagatcggcgacacggtggaacacgccgctgaggcaatcggctgtcttccaagacaaatcgcgaagaccatgtcttttttggtgaacggagcgcccgtcctcgtcgtgatggcgggagatgcgaaaacggataacgccaaattcaaggctttttttcacgagaaagcggtgatgctgcccgccgatcaattggaggagcgcgtcgggcacgcggcgggcgccgtctgtccgtttgcgatacgcgaaggcgtatccgtctatctggatatttctcttaggcgtttcgacgtcgtatacaccgcgggcggcagcgtcaacagtacggtgcgcctttccgtggcggagcttgaaaaattcgcttcgccctcgggctggacggatgtcgggaaaggctggcaggcagaggtttagcgctagggaaaacggcgttttgcggagaaaagggagtttcgggcaggaaatttaaccgaaaaagcaacgctgcgaagccgaaagaggcgggcagagagcgtttcgaggggtaaaagagatgttttcccgcggagaaagcggggaaacatctatcggataatgaagcggcagccagagtttgtccgcggagaaaagggagcgcggcgggcgcagaaatgcttttatcgggcgcgaaaaattctctcggaaaagccgcggggcacaaggctccttgaaaagagttcgtcggctcaaaagacttttacgataagacagggggaatatgggaggcgccgaaagagctgttctatgcaaaaaaattttttgcggagaggaagcgcgcgatagactttgtcgccgaaaaaaagatcgcggcttaggcggagagatttttgcggaatgcagaaggaaagattctccgccgaggaaatacaaagacagcaggcgccgaaaagattttagcgagtgtaaaaaagagtttccgaggaaaagaaacagcgtcgattgccgcgagttttgcacaccgtaaatcgttgattttttccctttgcgcgtggtataataatcaacggtatacaaaaggaatatatagaagtaatcatcgacggcgtacaaaagcgccgacggagagaaaaattcctgcggcggcagtgtacgcctcttgaaacgcggagcgttctccgcgcataaataaggcgaaggacatataataaaaagcctatgaaaaaaattttaccctatttcaaaccgtataaagtacagagcattttaggcccgctcttcaaattgctcgaagccaccttcgaactcatcgtgccccttatcgtttctctcatcgtcgacaagggattgggaatgcaggcggcggacaaaacttatcccgacgcgaacaaggcgtatatcgtgcgtatgtgcatcgttttgggcgtcttcgggctggtggggcttctctgcgcggtgacggcgcagtattttgcggcgaaggcggcgacgggcgtttccacggaggtgagaaaggcgctgttcgtcaagctgcaatcgctcagctattcggatatggacactctgggcacttcctctatgctcacccgcatgacgggggacgtcaatcagctgcaatcgggcatcaatatggcgcttaggttgtttttgcgttctcccttcatcgtattcggcgccatgatcatggcgtttttcatcgacccgccctcggcggcggtgttcgcggtggcgattcccattctcagcgcggcggtattcgccgttatgctcttctgtatgcccctctataaaaaatcgcaggcaaagctggacaaagtgctgctttccacgcgcgaaaatctgaccggcgcgagggtactgcgcgcattctgcaaagaggaggacgaaagggcgcagttttccgagcgcaacggggatctaacgaaaagtcaaaagttcgtcggcggcatcagcgcgctgatgaacccgctcacctacgtcatcctcaacgccgccatcatcgcgctcatttacgtgggcggcgtccgcgtcaatctcgggcatctgtcgcagggaaaagttctggccctttacaacctgatgacgcagatcctcgtggaactcatcaagcttgccaatctcatcgtcaccgtcaccaaatcggcggcctgcggcagccgtatcgagagcgtgctggatatgaaaagttcattggaactgttttcgggcggggaaaagggaacctcggacggcgcaaacgaagaggagaaaacttccgtcgccgcagccgtgggggactgcgattcccttaaaacccaaagcggcgccgaagcggacgccgcgttcgtcgtattcgaccgcgtgagtatgcgctataaagggggcggggcaaattcgcttacggatatagatttttccttgcggcgcggggaaacggtgggcgtcatcggcggcacgggatcgggaaagacgacgctcgtcaatctcgttccgcatttttacgacgtgacggaagggagcgtcaaagtggcgggcagggacgtgcgcgcctatgatcccaaagcgcttcgcgataagatcggcgtcgttccgcagcgcgccgtgctgttcaaggggaccatccgcgaaaatctcaaatggggcaaggcggacgcgacggacgaggaactgatggaggcggcgaaaaccgcgcaggcggagaaagtgatcgcggacaagggcgggctggacgcgcccgtggaacagggaggcaaaaacttttcgggaggtcagaaacaacggctgaccattgcccgcgcgctcgtccggcgccccgagatcctcattctcgacgattccgcttccgccctcgattacgccacggacgccgcgctgcggcgcgctttgaaaacgctggattattccccgacggtgttcgtcgtttcacagcgcacctccgccatgaacggcgcggataagatcgtcgttctcgacgagggcagagcggtgggcatcggtacgcacgaggagctgttgaaaacctgttccgtgtataaggaaatttacgattcgcagtacaaagcggaggacgaggaaaaggaggcgcgggcatgaacagcgagaaaaaacgcgaaaaaaagccgcctaaggcgaaggcgaaagtgcgcaagggcacgctgaaacaggtgctgcgctacgtcggaaaatatcccttttccctttcgctgactttggttttggcgatcgtcacggtgggattcacgctgtacgtgcccattctcgtcggggacgccatagactgtattgtggataaagggcaggtggatttttccgccctgaaagtcatctttttcaaaatcggcgcttcggtggcggtcaccgccgtcgcgcagtggctgatgagcgtattcaacaacaagatcaccttcgaggtggtaaaggacattcgcgcggacgcttttgccaagatctcgcggctccccctcaaatatctcgattcccattcccacggcgatacggtgagccgcatcatcgcggacgccgaccaattcgccgacgggcttttgatgggctttacgcagttttttacgggcatcatgaccattctcggcaccctcgccttcatgctggcgctcagctggcagatcgcgctggtggtggtgttcgtcacgcccctgtccctgttcatcgcgaaatatatctcctcccacacctatacttttttcaaaaagcagtcggaaacgcgcggcgaacagaccgcgtttacagaagagatcatttccaatctgaaaacggtgcaggcgttttcccatgagaaggcgaacgaggagaaattcgacgaaatcaacaagcgactggaaaaatattctctcgacgccagtttctattcctctctccccaatcccaccacgcgcttcgtcaacaacatcgtgtacgcgctggtggcgctcatcggcgccctctatatcgtttcgggcaggggcttttcggtgggaaatctcaccacctttctttcctatgccaatcaatacaccaaacccttcaacgaaatttccggcgtcgtcaccgagcttcaaaacgctctggcgtgcgccgcgcggattttcgagcttttggacgaagcggaacagccgtccgacgcgggcaatcgcgtgctgggcagggcggaggggaacgtgtccctcgaaagcgcgtgcttttcttacgtcccgggacaaaagctcatcgaggacttttctctgaaagtgaagccgggcgaaaaagtggctatcgtgggaccgacgggctgcggcaagaccaccctcatcaacctgttgatgcgattttacgacgtgacgggcggcgccgtcaaggtggaaggggaggacgtgcgggagatcacccgtcgatccctccgctccaattacggcatggtgttgcaggaaacctggttaaaaagcggtacggtgcgggataatataaagatgggaaggccgtcggctacggacgaggaaatgtacgcggcggcgaaagcttctcacgcggacggattcatccgccgcctttcggaaggctacgacaccgtgctctccgaggagggcgggagcctttcgcagggacaaaaacagcttttgtgcattgcgcggatcatgctctgtctgccgcccatgctcattctcgacgaggcgacttcttccatcgacacgagaacggaaatgaaaatcagcgacgcgttcaataagctgacggagggcaggacttccttcgtcgtagcgcaccgcctttccaccatccgcaccgcggataccattctcgtgatgaacgcgggacagatcgtggagcagggcacccacggggaacttttggaaaaacgagggttttactacaaactttacaacagtcaattcagttgatttaccgccctgcaaaaaaatccctttggagcgcggacacaacgcccgaaagggaaagacgggagccggagctttttaggcggcaaagtcgggacgccggcattctgtcgtccatgcgagaggaccagcggcgcagaaaaaaaatcgccatggcgcaaagcggaaaattttgcgtcgggcatggggacggagcgccgaaatacgcgccgcgggaatcgaaaaattttgagtttgcagggcgagaacggcgtttttcaggacgtgaaaacgccgacgtccgtccccgccgttttcttcccgattcccgcttcaaacgggcggcttatgaaagatcttgcctaaaccacaaacaaggaaaccggacgaaaaatatgaaggaaaaaagcgcggagaggaagagagggagcgtttatcgcaatgccgtgcagctggtggctgtgggcggcgtaacgggaatttttgcggggagcgtggtgacgctttatcatttttgcgcctcttacggcgaggagtcgtcaaagggcgtttacgcttttttaagggggcatcccgcgtttatcccgctgttgtttgtcgtgctggcgctcggcgcgtttttgttgagcgtagcggtgcggctggtgccgatgatcaagggcagcggcataccgcagacggagggcgcgacgcggggcgtcgtccgttttcgctggtatcgcgacgccgtcactatgtttgccgccagtcttctgagtatttttctgggtctttcggcaggcagcgaaggacccagcatcgagatcggcggagcctgcggggacggcgtcgcttgcgtgtttcggcgcagcgagatggtccggcgctatcaggtgacgggcggggcgtgtacggggcttgccgtggcgttcaacgcgccgttgacgggaatggcgttcgccttcgaggaagcgcacaagcgctttacgcccgaggtgtttatctgcgcgttttcctccgtcatcgcgggacttctcgcgcgtacggcgatctgtgccgcggcgggagtcccgtccgcaaacgccttcgagtcctatcgcttttccccgatgcccgtttccgtatacggctttgtttttctttcttccgccgtgtgcggcgcgctcggcgttctcttttataagctcgtgtttttcctgcgcggaagcttcaaaaaaatccgcccgccgaagccctggtccggagagtttgttcgcattctcatcgcggtgcttttgggcggggcgctttccctggcgaccgtcaacgtgatgggcggcgggcacggactcatcgagtcgctgggcactttcggaggcacggcggaggaaaccacggaaagcgtattcggtctgccgctcgtctggacgctcctcctcgtctgcgcgcttaaatttttgattacgggcgtgaacatgggcgcgggagttccgtgcggagcgtttattcccatgctggcgataggcgcgtgcatcggcgcgctgttgaatcgcgcctggctttctctcggcatggacgccgcgcacgccgatttgatggtgatgatctgtatggcggcgttttttacgacgattgtcaaagcgcccattacgggcatcgtcatggtctgcgagctgacttggagcttcgcgcccctgcttcccgtcgtcatcggcgtttcggtggggtatatcatcggcgacgtttcgcgcaccgagagcatttatgaaaaaatgctcgatttgttcgaggaagaaacgggcgtgaaagaacgggcgcggcgggaaatattctccgtcgcggtgcagcctcgctgcattgcggacgggcgcgccgtccgcgacgtgctctggccttcgggcgccgtggtgacggaaatcgggcgaggcacggaaaagatcctccccgacggggatacggaactaagggcgggagatacgctcacggtcgtctgccgtaccgattcgcccgagaaaacgcgcgaggatttacagcatatcacgggcaattaaagcctgcgcgctcttttttcgtccctttggcgaggcgtaacaaaataaaacgttgcgcgtttccccgcgcccgcggacgcctcttttttccttgtgtatctcgcgcggcttaatgagtttctaaaatgtcggcgacggcgcctcgatgcttccgcgttatatttttcccgcgcgctccataaacgaatttgtctttcgcttattaattttttctgcctgtccttgcaaggcggggcgaagggaaaaaagaataagtttcgcgcgccgctgttttcgctgtacgctgcgcgcgatagggggcgacggcgcggaaaagctttctcgcctctattctcccgcgcggtttccgcatactttcagaaatgcgagaaaaaaggagtcccgttttttgaaaagagtggtccgcctgcaaatttttttcgctttttctctgagatttctgctgccgttcccgaaaacatcccgcgctttggcgggacgctgtccgaaaaggtggctcttttgtttttcataagtttgcatgagcgcttttacccgtttgccgcgggctttttcatatcttgcggcgcttcggcatacaatagaaggaatcgatttttaaagaagggcgcgcggagtatgcggttatataacgaaattttaaaaaaattcgacggcggcgaggcgggggagctgtttgcggggacgagatataccgtcctgcccggtcgcggcggttattttcagggcgtaaagacggtgagcgagttttctccctgccgcatcgtcgtatgtttccgtcacgcggttctggaaatcgaaggaagcggctttgtcatcgaaaaatactgcgacggcgatctcgaactctcggggcagatcgtttccgtgcggctcgacggcgcgtaagactggctttttcttccccgtaaccaaaaaaggcggaaaggagggacacgaaaaacgtgcttcttgaaaaaataatcatcgagggaattatgcccgaacgcgctctctccaagctgcaaagagagggaatctgcgtctatcatgcaaaaaaactcaaaaaaaaccaaatacttttgagtgtaaagaaaaaagataccgaaaaagtttttgcaatttgtcc

SEQ ID NO: 819 - DNA, 3187 bp, Unknown
  16S sequences of unknown bacteria
tcaagcggcgaaacaataaaaacggggaatttaacatttttaaggcgtgcggggtcgagtatttacttaatttaatatcttaaaatcctctgccgcggcggaggattttttgaattgaagatgaccgaaaagcgtggtataataaaaaaacaaatcgaaaggggacgtgacttatgtcggaaataaaatgggcggtgctcggctgcggagttatcgcaaacgaggcggccgccgctcttaaagcgcagggaaaaagtctttatgccgtgggaaacagaacccgcgaaaaggccgtttcctttgccgaaaaatacggaataagtaaggtgtatgacgattttaacgatatgtttttcgacccggcggtcgacgtcatttacatcaccaccccccacaacacccacattgatttcataaaaaaggccgtggaaaacggcaagcacgttcttgttgaaaagtcgataacgctaagcagcgccgagctctccgaggcggtggcgcttgccgagaaaaacggcgtcataatagccgaggcgatgacgatttatcatatgcccctttataaaaagctcaaggccgttctcgacggcggaaagctcgggcgggtcaatctcataaccatgaatttcggaagctttaaagactataacatgagcaacagatttttcaacagaaatctggcgggcggcgccatgctcgacatcggtgtatacgccctttcctttatacgtttcttttttgacggaaagcccaccgagcttttgtcgcaggtcaagagagcgcccaccggagtggacgagcaggcggggcttcttctcatgaacggtgaggggcagatggcctcggtcatgctgtcgctccattcaaagcagcccaaaagagccgtgatctcctgcgaaaagggatatattgaggtcatggaatatccgagggcggttcgcgccgacataacctatgccgaaacgggaaagcgggagacggtgagcgagggcgacggctcaagggctcttgaatatgagctggccgacatggaggccgcaataggcggcgaaaaccgtatgcttttgaactatacgacagatgtcatggacatgatgaccgaatttcgggagcaatggggactgaaatacccggaggaagaataaaagaaagggtcttttaattttaatgacaagcagtaaacagcgcgggcaaagcgtttcgcagcggctcggagagggaaaaatacttccgcttatcatccgcctttcggtgccggcggttattgcccaactgataacctttttatacaacatcgtcgacagaatgtatgtggcgagaattgagcagtcgggaatggacgccctggcggctctcggtatcgtgcttcccataacgctgataatgcaggcctttgccaacctcgtggggctcggaggggcgccgagagcaggcataaaaatgggcgagggaaattccgattttgcgaacggggtgttcaacacctctttttcgctgcttcttctcatcggcaccgttctcggaggagttacattcgcctttgcgcggcccattgtcgagctgttcggctgcccgcaaagcgcggcggattttgccgtttcctatctcaggatatattcctgcggttcgcttttcacaatgctgtcccaagggctcaatccctttatactgacccaaggctattcgctgaccgccatgggctcggtgctgctcggggcggtgataaacatagtgctcgacccgatatttattttcgtgcttgacatgggcgttacgggctcgagtcttgccaccgtcatttctcagggctgctcctgtatttttgtggtttcgttctttttcagggaaaagtcggtgtttcgctttgaccgaaaaagcatgaaaatctttaccgacaaaaccgcaagcattctctccctcggctttaccccttttgtcatgacggtgaccgagtgcgccatacaggtggtgttcaacataaatctcaaccgcgccacgggaggaaacagggattacaccgccgccctgaccgtcatgctgacggctcttcagcttatatcgctgccccttaacggcctcggaaacggggttcagccctttgtcagctataatttcggcaagggggacgagaaacggcttaaaacaggcataaaatatgtgaccgtcatagggttttgtttttgtctttgcatttggtcggtgtcaatgctctttcctcaaatttatgccgcagctttttcggcaagcggagaggtgcggcaaatcgtcaaggattattgcccgcttttcctcatgggctcgataatgttttttgtgcagatgacgctgcaaaacgtcaatgtcgctctcggtcaggcaaagcttgctctcgccctcgccgtcaaccgaaaggtgataattctcattcctctctgctttgccctgaccgaggttttgggcgcaaagggtgtttatctgtcggagggaattgccgattttgccgccggaatcattacgtcgacggttatattcacatcccttccgaaaatttttaaaaggcgggccgagcagatcaaaatgaccgagcaaacggaaaatagaacaaaataatttttaaggaacgtattttctgtatggcgtcatatcttcccaaagccaccgttcaggcagccatcggctcggttcctctcgccgcggggcttagctgcggaaataccgtgctgtcgacagcggtggtcggcattatcatcaccgctcccgtcggggcatttctcattgactttttgagcggtcggctgctgcaaaggggcgggccgcaataaaggccgccgccgtcagcagcgttgtgacaagccacgaaagaggaaaggcgcggtagagcagcgaaagcgacgggttggcggcaaaaaccgtgaatatccacacaatacggaaaaggcaggtgccgacgacggtgcaaagggcgggaagagttgcgtgtcccgagcctctgagcgttccgccgggaatttcgtaaaggccgcacatcggctccaaaagcagtatgcacattgttctcaaaacggcattttgtatgacggcggggtcggaggaaaaaagcccggcgaaaaattctcggaatactatgatgggcgccgttgccgcaaggctcaaagcaaccgaaaaaagcaggcacagccccgtgattttttgcacctcgaaaaatttt

SEQ ID NO: 820 - DNA, 3974 bp, Unknown
  16S sequences of unknown bacteria
gtcagatgtgtataagagacagatacggaattgttccggcttatagattatcggtattcaaataagcgagtgacgatatttacaagcaatatatccatgaatgccttgaaactaaatgaaagaatagtggaccggatatttagtatgtgcataaagctggatctgccggaaaaatcaatcagaaccatacaggcgcacgatgaaaatatggaatttttgaaaggagttattaaatgataggaaaaatgatacacgggttagagacaattagagaacattttttgctcaaggactgcaagaaaatgttgaaaaagtattatggaaagaaagcagcggagctcggggaaaaatacgggaaagatgcggataggctcatcgataagtacagtggttcaacaatagcgatgagggtacttgctcatacatttgaacttatcgaatcttacgataaagaagcatttgagaagcagatggcagattttgaacgtatgcttaaggatgccttagcaaagaaaaacgccccggatggtgcggcaacaccatcacagggcaagtaaccaatcaacccacataaagtccggttacgtctgcattgtagcagattccggcggaaaggaaaagacatggaaagagaaaaaatcatcaaaattaaagaagaggagctggataatcagccaatggcaagccagagagcaatagaagcacgagatgctcttgatgatgcgctggaagaatacattgttgctgtgcaggaagatgctttttactggggatacatgacagctatgaagcggtgcaataaacaggagggttagctgatggataatatagaatttagaaacttggtggatgaactttataataccaacaattttctggaaatgtgctacggatatgcacagtcagacactccgtgtatgaaggcattgtctgaatcattgtacacgctgaaaaataagtatgaagaaatatatgcaaggttatgctgcattgatgaggtaaaataagcaatacataaccagagcggtatgctccgaatgaaacaagcccttaacccattagacctacaccaagacattgtagaaatgcagtgccagagtgtgggtctttttggttgtaaaaatggcacaaatattttgtgattcgattttataatagaattgcaaatgatgaacgatttcctacttcatacgtttattgtttgcagtctgcaatttaaaattcctcttgatggctcccgttcggcttgtccagggagccaaaaaaacaatagtccacctgggacgttaaaagaaagggtataagaatgattaaaacatcagtgaaacattgcggttacggctttattgaggaaacagcgaatgatcttttggatcacatgaaggaaaatgagcgatatgttgatttaaagattacgccattaagcgatattatggcggttgtggtgctgatttacgaaagagaggtataagcaatggataatgagaagaacacagccaacgggggcgaaaataccgggaaaacattcacgcaggaagaagtaaaccagattgtgagcaacaggttgaaagaagagcgtgagaaaatgaagaaagaacaggatgcgtcttttacggagcgtgagcagaagatcaccgcacgggaaatgcgtatgaatgcattagagaagctgcaggaaaaagggctgccgtcctctctggtggatgcaatcaactgttccgatgatgaaacaatgacaaaaagcattgatattttaatgcaaacatataaaaccgagccgcaggggcaccgggagccaagttacacgccaaaggacggtagcggcgtgccacatgatactgtacgggaagctatgggcttgtagaaaggataaaatatggctatcaatttagtaacaaaattccacccatacgtggatgagatgttcaaaaaagaaagtaaaaaggcacttgtgaccaaccaggattttgactggacaggtgcacacactgtaaaggtgtataagatcagcacggggagtatgaacgattacgacagagcaggaaccggcagcgggacaacaggttcgcgctatggatctgttgaaagcctggacgctacaacggaagagttcacactcaaaaaagaccgctctttcacattcgcaattgacaaactggacgctgacgagacagcgcagcagcttgcgggcgcgtcggctctggccagacagcagcgcgaggtagttattccagaagttgatgcgtatgtatatggagtgatggcagcgggagcgggaaccaaaccggcggccgtgacactgacagctgataatatctacgatgagattaccaaggcgacaaatacccttgataatgcggaagtaccggacgaaagccgcgtgatcatcgtatcgccggatgtataccgtcttatgaagaaatcaaaggatattgtcatggaaaccgacattgacagcaaccttaggaaacagggtgttgtttccaatctggacggtgcagcagttattaaggtaccggcggcaagattaccggagaattgcggcttcatcttatgccatccgtgcgcaacggtagcacctaccaaactggaggactacaaaatccaccaggatccgccgggaatcagtggatcactggtagaagggcgcatttgttacgatgcgtttgtgctggagaataagaaaatggcgatctattaccaggaactcaaggcgtaggatgcaaagggggctaaagcagcccccctttttgtatatgcaacgttgcaataaaaaacgttgcaaacgttgcgataaaatgcttacaaatacttacatttcaagcgctttagatgctgatatttgctaacgttagacactcagaaatgctaggggtttacaatgcttggaataggaaaactatagggaatctatagggcaaaaacaaagagaaaatacaaccagatacaaaccagatacaaaccagaaccaccccggagacaccccaagatttcctagggtgaaatgttcggatttgttcgggtgcatgatggaaaatgatggagtaaatgcaaaggcaggggagcacatggagaacgaggaacttgttgcccggataaaggcgggaatagacacagctgacaatatgctggcattgtgggaacagaacaggggcatgatcggtaaattagcgcgtcggtatagtgcatacgctgatatagaggatctacagcaggaaggctaccttgcactgtatgatgctatagacggatttaaaccagataaaggcgttaggttcctgtcctatgctaccacaatcatagaacggaaaatgcggcgttatatttacgataacggttcttccgtgcggataccggagcatgagcaggcaaaaatgtacgaatataagaaaatggtcaatgcatttcagacgtaccttggtagaaagcccacacggcaggaaatagcctataatatgggtttatccgataaaggggttagggaattggaaaagaccgtcagaatggggcagatagcaagccttgacacaccattgactgatgaaaacggcgcggacacgctcattgatataattccagatgaaaataatgccatgttagctgtgatggatgatatgcagcgggaagaattagaatctgtaatctggggcatggtcgattcactgccggggaaccaaggcgcggtgctccggggaagattcctgcaggggcagaccttgaaagaagttggagataaaatgggcatgacagcagagagaacgcgaacgatgcagaataatgcttgcgggagctccggcagggcgagaataggcgtgtactgtcctcattttgggaaggaagcgtgtataacgccgcccttcatggctccggtgtggagcggttcaatcagacatggacaagttccacggagcgggttgcattggggctttgagtgggaaatccgtgatactattttgatactaaaataatatgta

SEQ ID NO: 821 - DNA, 3990 bp, Unknown
  16S sequences of unknown bacteria
cttcgggccgctttttttgtcattccccttgtgctatactgtaagaaaaagcaaggaggcatggctatgaaagggaaaaagatcctttgtgttttgctggcgctgcttctgacggcgtccctggccccggccccggcctgggcccagggcgaaaagcaggaaatccaggtgaccatccagaccggaacggggacagctgcccaggtttcccttttctgggaggacagctggtttgcccaggagccttcccaataccagcagggcctggcccaggcgtctatggtcctttctgccgccgcctattcccagggccagggggaggagctggccaatgccctgaccggcctgggctttgagcaggtggagctctaccactatgccccggaggaagaagaggcggaagatcaggtggcctatgccttcggctgcaaaaagctggcggacacggacaaaaccctggtggccgtcgtcatccagggcaccgacggcagcgcccaatggcggagcaatttccgcatcggcgaagggacggaacaccagggctttgccctggcccgggacgaaatgatggagcagctggacagctatcttgccaccctttcggatgatgagcccctgttctttctcaccggacacagccgtggggccgcggtggccaatctggccgcccagcgcctgacggaagaaggccagccggtgtattgctatacctttgccaccccggccacggtgcaaaaagaggccatcacagaagaaacccctggcatcttcaacatcattagcccccaggaccccattccccggctgcccctggccgcctggggctatggccgctatggtcaggaccggtttctgccctcccaaagctcccgggccgattacgcccagctgcaggaggaagcgtcgcccttgtaccagaatctcaccggcctctctcttcccgatgcagaaggatgccgtaacaccgaccggctcatcgccctgttggaagagctggccccttccctcgcggactacacccagcggcagttcaccctgggttcgctgatcccccggcagatcactctggcggaatatttccagcatctgtccgacattctgggcggcgccgccgatcagacccaggccacctttgtctttctttcctccctccagggtgatctggccccgctgagccaggccctccgcagcctgcaaggagaggacagcctgttttacagccacagcatggcctattacctgagttggctgtccctgggggaaaaggccctggacacccagtgcgcctatctgcgtctttccagcgaaacccctctttctcccgctttccaagaggacgaagagctggggtttttctgcgacttgcccctgggagagagcctgaccctcaccggggaggaaaagggcctgctgaaagtagagcggtaccagaagggggcccggcaggatgcccttctgtatgtcctgcccgccggagagacccagctgacggcctcctgggagccggagctttccggcccggacggtcccctctcccccgctcccagttttgccgatgtggccgaagaggcctggtattatgaagatgtgtcctggtgcgctgcccagggcctgctggaaggggacggacagtccttcttcccccagcaaacggtcaaccgggccatggcggtgacggtgctttaccgcctggacggaagccctggggtgtctcgcgcttccttctccgatgtggcagaggacgcctggtatgccgccccctgtgcctgggcccgggaaaatggcattgcccaaggggatgaagcgggcctgttccatccggaaagcccggtgacaaggcaggagatggccgcctttttctgccgcttcgccggaggccaaagccagggggatgctcttgcggcctttgccgacgaaagccaggtgagccaatgggcccgggagcctttgtcctggagtgtggagcaagggctgatggaaggggtctcccccaaccttcttttcccccaaagctctctcacccgcagccaactggccgctctttccgcccgatttgaaaaaatgggatgaaaaaacagccctccggcatttttgccggagggctgtttgtcattgggcctgtttctcatcccaggttccataggcgatcaaaggctcgtttttccccacgcccagagcggtggtgtgatagagcaccactccatccgattccgcctgtacccggcagatatccgagccttccagattttccaccacgcccagcagctgcccctttttcaccatgtccccggcctgcacctggggataccagaagccctcttcctctccttccacataccaggcttttgtgatctccctctggaacggcgcgggaacggggccggagcagattcccaggtggcaaagcaagcccagcacatcctcctggcaggccttcacttcctcctctctccaaagcccctggcatccccgttcaataaggagcgcgggaatcttctgctgtactgcccaactatacaggccatttttggcagtggaagctacccgatagggcacattcagcacctgagcggcctgacgggcggcccggcacacttctttttccccttcccgcgggaaaaagaccaatggctgcaaactctcattgcaatcgccgctgtgaagatcggccaaaaaatccgctcccggataaagagtgtgctccagagcccaggccagacggaaggcggcgctgccctggagcgagccggggaaagcccggttcagattgaccttatcttccggcaccacctgtttggccccggcataaaagccttgaggattggccaagggcaacagaaaaacgctgcccttcatctctcctggctccagctctttgatcagacggcgaagtgcttctatccccacatattcacacccatgaacaccggcggtgaccaccagccgggggccggaagacgctccacgcagacacatcccccgcagcacttcgcctccgggcaccgggatctccacccattttttctccccgggagaaacatccttttcccaaacagtcatacaagcaagctcctttggttagtttacgctaaccaaaggatagcacactttccccataaaagcaaggggaccgagatatgctcccgctccccttgttatggtttctggttttcttccggttcttttgtgggcaaaagggtcaaagaaggttctctttggttgagatagatctcctcacactggcgctgggcctcgataagaatacggatggccttctcgctggcctgcatcatggtatagtacatggttttataatcggcgtaatcgctcaatgccatcacctcggaagtattctaacaaatatgcattgcaaatgcaatgcatatttttaacaagaaatacggtacactaggagcatagtccaagcgaacaggtgataccgatgaattttaaaataccttccaagccgcctaccatcaataaaaccattcgtttcccatccactttggtaagcgaagtagaaaaaatgattcaaaaccaggattgtaccttctctgcttttgtcatcgccgccacacaggctgcggtggaaaatctgcaaaagcaagaaaagaaaaatcctcatccatgaatctccgtatccgggatttgcgggaggatgccgacctgacccaaaagcaggtggccgatatcctgcaatgcgatcaatccctatattccaaatatgaacggggccttcggccgttgcctctggaggccgctgtccgtctggctcagttttatcaggtttccctggactatcttaccggcctcagcgataccccctgacacacaaaaaaccgccctcttttcggagggcggttttttgtgtgtcgaaaaagtggcttaggccactttttcgagtttttgcaaggggctgcgtgcacgcctttggcgcacacttgccccttgagaagtgcaaaaagccacgcacaggtcgcggctttttgc

SEQ ID NO: 822 - DNA, 30962 bp, Unknown
  16S sequences of unknown bacteria
aaacagttttgaggctttcacgacatagggtcgtgaattttgaaagacggacgagccgtctttcaaaaccgcctcaaaactgtaagttagtacgaaagggtatggtcataaacatggaaatcaacaaagacataaaaaacatacttgtgtcagaggaagagctcgacgggatctgtgagcgtctcggggagcagataagccgcgactatgagggaaagcgtctgcttctgctctgcatactcaagggttcggtggtattcatgggggatctcatgaagaagatgacgatcccggtcgagatagacttcatgcgggtatcaagctatggaaactcgacgaagtcgcatggcgcggtcaatataatactcgatcttcaccgcactgatcttgagaatacaaatatacttatcgtcgaggatataatcgacagcgggaaaacgctcagttatctctccggatatctgatgaacaagggcgcgaagagcgtgaagatcgtgactctcctcgacaagccggagcgccgcgatccgcagatcacactgacgccggattatgtcggtaaggtcatcccggacgagttcgtcgtcggctacggtctcgactacgccgagaattaccgcgctctgccgtatataggcgtccttaagccgtctgtctacggcggtaagtgacactccggatcaccgatacggcattttgcaggagaaaaggaaatcttcgccgcgcgcgaagatgaggtgtttataaaataatgaaatccaattacaaaattatgattttctacgccgtgctgattgcggtcatactgatcgcgaccgcggctctgttcggcgggacgcccggtgagaagatcatgtacagcgatatcgacaagatgttctatgaacagcaggtcaaggcgttcgagatcgactcgaacgaccgcctgactatcgtgaagcgggacaacactaccgtgaccttctcgctcagaagcctcgactccttctggaatcagttcggagacacaatcgaggagcagttccgcgccgggatcattgaagagtacaacatcgccgagccggtggagataccgtggtgggtgagcctgcttccttatgccattgtcataatcctcttcatagtgttctggttctttataatcaatcagttctccggcggaggcgcgaagggcggaaagatcggcagcttcggcaaggcgagggcaaagctcggctccgaggagaaaaagaaagtgtacttcaaggacgtcgccggagcggacgaggagaaggcggagcttcaggaggtcgttgaattcctgaaggatccggcgaagttctcgaagctcggggcgcatatcccgcacggcgtactgctcgtaggacctcccggtaccggtaagactctgctcgcgaaggcggtcgccggtgaggcgggagttccgttctattcgatttccggttcggatttcgtcgagatgtatgtcggcgtcggcgcttctcgtgtgcgtgatcttttcgacaccgcgaagaagaatcccgcgagcatcatattcatcgacgagatagacgccgtcggacgtcaccgcggcgcgggtctcggcggcggacacgacgagcgcgagcagactctgaaccagctgctcgtcaagatggacggcttcggcggcaatgacggggtcatcgtcatggcggcgaccaaccgtcctgacatccttgacccggctctgctgcgtccgggacgctttgacagacagataacggtcaattacccggatataaagggacgcgaggatatcctcaaggtgcacgcgagagggaagccgtttgaacaggatgtcaacctccatacgctcgcgcagacgaccgtcggcttcaccggcgctgatctcgcgaacctgcttaatgaggctgcgctcctcgccgcgcgcaagggcaagagcctcatcggaatggacgatctcgaagacgcgaccataaaggtcatagtcggtccgcagaagaagtcgaaggtcatcagcgagaaggaaaagcgcctcacggcataccacgaggcgggtcacgcgatcgtgacgaagatgcttcagcctgacactccggtgcatcagatctcgataatcccgtccggacgcgcgggcggctatacgctctcgctcccgaaggaggatcgctcctatcagtcgaagaccgacatggagaacgagatcgtgaccctgctcggcggacgctgcgcggagaaggtcattctcggcgacatctctaccggcgcgtcgaacgacattcagagggcgacacagctcgcgagaagcatggtcacgaagtacggtatgagcgatctgctcggcccgatcgtttacggttcagagcacaacagcgacgaggtgttcctcggccgcgacttcaatacgacgagaaattattcggaggataccgcgacgctcatcgacaacgagatcaagcgtctcgtcgagaccgcgtacaacaccgcggtcaagatcctcgaggacaatatcgacaagctgcatttcatcgcctccttcctcatgaagaacgaggtcatggacgaggtgcagttcaacgccgctatggacggtgacccgacgatcgaagagctcgaggagctcctcgccgagaagcgccgccgcagcgccgatgaaaaccgcgaaaaggcagcaagggacgccgaggaagcaaagcgccgcgaagctgaggaagccgcaaagaaggatcatccggatgacaacggcagtcacgacgatttcccgccgaggatgaaagaataaagtctgaaaatgaattttcagaccaaacagttttgaggcttccacgacaaaggggcgtgaattttgaaagccgggcaagccgactctcaaaaccgcctcaaaactgtaagcttgtacgaaaggcatagtcataaaaactataggggcgttccgcagcactccgaaacgcctttttcaaaacgaaaggacgatataatcatggacacaaaaatgcacaccgcgcacgctgaggctgtcggcaatacgctcggcggcgagctcgtttcctataaactcgacggacaggagtatgtctggcaggggcttccggagtactgggcgagccacgctccggtgctgttcccgactgtcggcgcgacgattgacgagactgtgaagttcggcggtaagccgtatcccctgaagaagcacggcttcgcgagaaagcaggagttcagactgattgaggcgaccggcgacaagctcgtctatgagctcgttgacaatgatgaatcgcacaaggtctatccgtacaagttccgcctgctcatcacgcataagatcgatgacaacggcttttccacgacttatacggtcgagaataccgatgatggcgatatttgtttctgtatcggcggtcatccgggatttgtctgcccgatgaaggacggcgaggctttctccgattacgagctggtttttgaaaaggtcgagaacgaggatgtcatctatacgacaaactacggcggaggatacatagacgcgtctctccccgcggtcgataagctcaggaacacgaacgtgtggccgcttgagtacgacgattacgatgttgacgtccttctgacaaagaagctgaagagccgccgggtcaagctcgtgaacaagaataccggaaagggacttgagcttgatttcaccggctttaacgcgctcggtgtctggacgccgccgaaaaagcacgctccgtttgtctgcctcgagccgtggaacggtcttccggcgcatctcggcgagaccggaaactttgaggataagccttacgccatcacccttgagaagggcggaaagtattccgtcggatacaaggttacgataatcaaataattaatggaatcgcaacgggacgccgcttttttgccgcgccctgttgtctttttggggagaatattatgaagagctttgacatatcgtcggcaatgcttccgacaagcgaggaatacggcttcggcatggatggatactgggtctggtgcggctccgcgatgaagggggcggacgggctgtggcatatgtattcggcgagatggccgaagtcgcgcccgttctttaccggatatattgtgtcgagcgagatcgttcacgcggtcgcggacagaccggagggaccatatcggttccgcgaggttgtgctcggcgcgcgcggcgaggagttctgggatgggaggatgacgcataatccgtctgtcgtgtgttctggcggcgtcacggcgctgttctatataggagcgacgttcagcggcgagacgcctgacaggaacgcgctgtgcggctctgtgagacccgccgcagtcgatgagtgctattcgtcgataaggataggcgtcgctgtcttgggttcgtctgacggggagtggcggcgttttgacgagccggtctttctgccggatcctgacggatgggacaggacggtggttacgaatccggcgccgtgcgtctgcccggacgggagcgtgcttatgtattaccggtcgaactgcccggaggggatgagaataggtgtcgcgaggtgtgatcggctgacggctgatgagccgccgaagttttatcggtttatcgaccacccgctgtttgaggatcacccggagcttcatgtcgaggatccgttcgtctggcataacggggagaatttcgagatgatcgcgaaggacatgaacgggaatggctgcggcgttgtcggcgggggcgtgcatcttgtgtctgaaaacggcgtggactgggactatgccgcaaagaggcttgcgtacagccggacactgtcgtttactgacggcacgtcccgggaggtgtatcaccttgaacgaccgaatattctcttcgataacagaagaccggtcggtctcgcagccgcgtacggaacggcgggcggtgagaagcagccttacggcggaaagttcgatgagatgagggattcgcggacgatagtgataccgttcggaaactgatcattatcgttcatccggtttgggtatcagttttttaccgcgcagcttccccggtgatgtgccgtattttcttgcgaagaccttgtagaaatactggacggatgagaagccgcagacgtcggatatccttgccacggtcatgtcagtcgtgacaagcaggtttttcgcgtattcagctctcaggtcgttcaccttctctgtgaaggtcatcgagtagcattcgcgcattatccggctgagctgccggcggctcacgaatagggagccggcgagctcatcctcgtcgatactgtcgaggaaggagcgcagctgccggtctatctgccgttgccggttgaccgcgcgggaggtcatatagtcgtcactgatgagctgcgtttccggatctgagtccggagagccgtcgatcagccgtccgacgcggatcagaagtgaggccatcatagcagatacccgctcacgccagccggcatggcggttcatggcttctgtcaggaggatcacgaattctgcctccgcgtccgtctttccgcatattcggaaggggtggcgcgagatcgtgtcgatcagttccgacaggtcacggcagtcattccttttccttcgttgttttgttatcgtgacgtttatgcagtattcttccataggatcgtccagcccggaggtctgtgcgtggaggatgttcgggccggtgattatgacgtccccggcagtgacatcatagtttgcgcccgccacggtgaaccgaccggtcccggacgcgatgaagtgtatctcgtagctgttgtggtcgtggagcggtatgtcccatggatggcgcggcggttcatggctcgcgttgttgagggtcacgttgaaacagtccatcttcagatgtacatccgaaaaatcaaaggtgtaccttatgtcttcccgatatttcatgctctgtctgcctttcagacttatcaatttgtctctgtgctttgattatatcacgcacggagacttttgtcaagcaccagtatcataaaaaaagacacattcacacggatcatgtccttatttgaaatttacatgacctgtattatgatgtataatgttgatataataaaccgaaaggcaggtaatcaaattggcaaaactgtttcccgaactcaaaagcgcggcgtgtgtcaaaaggcacccgtcgaatcctgtgctgtccgcgaaggacattccgtatccggcggatcttattttcaacgcgggcgtcgtgaagcgcggcggaaagtattatatggtcttccgcaatgattacggatacgcggacgggcggttcgccggtacaaatatcggtgtcgccgagagtgacgacggtgttcactggatcgcgagaccggagcccatggtgcgcgcggaggatgtccgcgacggtgagatcggacggatttatgacccgaggctgacgatgatcggcgacgagctattcatttgctttgccgtcgacacaaggcacggcatacgcggcggaataggaaggataaagggagatttcgagggaatagagttcatatccctgagtacgcctgacaaccgcaatatggtgttgttcccggagaagatcggcggaatgtacgtgcggctcgagagaccgttcaccgtctacagccggggaagggacaggtttgatatctggatatcccgttctccggatcttgagttctgggggaagagcgagctgcttctcggggtcgagaacgtgccgttcgcgaacgacaagataggtcctgccgcgccgccgataaagacgaaggacggatggctgacgctgttccattcggttgacagagatgacagccgcggaaagaacgggtgggagtcttcctggaagaagcgttactgcgccgggatcatgctgctcgaccttgagaatccgtcaaaggttatcggaatctcaaaggagccgttgatcgcgcctgagacagcgtatgaggcggacgagggattcagacagaacgtaatattcccgggcggaatgatagcggagccggacggcagcgtgaagatttattacggcgccgcggatacagtcgagtgccttgccgtatcgactatcgacgagctcgtcgcgctctgcgggaattaacggagggtgtcatgaaaaaaacaagaattgaagcgctttttctcgcggctgcaatgatagtgccgacgatactgtccgggtgtgggaataccgcggcggatacggatacgacgtccggtgagggcagtgtgtcgtcatcagatgagacgacattccgttatcgtgacagtctcggcgagtacgatttcggcggggaggacttcaccgtgctctgccgcgagacgcagaacggacagttcttcgatgaagtcgcggtcgacgaggagagcggtgatctggttgatgacgcggtgtacaagaggaacgccgagataggggcgcgattcaacgtgaatatcgtggcgaacaaggcgaacggaagctggccggacagggaatcgttcaattctctgctcaagacttcggtcatggcgggcgacggggcgttcgaccttgtgctcggttatcaggcgtattcggcgaatcttgacgtcgcggagtgcctttatgacttcatgaaggtgccggtcatcgaccttgacgcggagtactattatcatgatatcatcgatgagataacggtgaacggaaagctgttctatcttgtcggggattatacttattcggtgtggccgtcgctgttcgtctattatttcaataagcagatcgcggaggataacggcatcaacgggctgtatgatcttgtgcgtgaaggaaagtggacggtagataagctctctgagctgtgcgccggggtgtatcgtgatctcaacggaaattcggagaaggacgaggaggatatgttcgggctcgcgacggattatgagaatgtcgcggacgcgtattattcggcgtttcaggtaaggataaccgacaggggcgaggacgggatgccgaggataaatacggacatagcgaggatggaagaggtcgtgacgaagctcagcgctctttatgacaataatgacggcgtgtatgcgttcaggacgcattcttccatgacgacgaatccattgactgagatgttcgtggaggacagggcgctgttctatccggatatgctgaggagcgcgatatcgttcaggagcatggagacggatttcggagtccttccttatccgaaatatgaggagtcgcaggataagtattttactcagcctcataacggttacagtgtcatgatgatcccggcggatgttaagaatattgagaagacggcggtcatggtggaggcgctgaatgcggcgagccttgacagtgtcataccggcgttctatgacaaggcgctcaaggtgaagttcacgcgtgacgaggattcggcagagatgctcgatataatacgtgatggcatttgtttccagttcgggtattattatacggtgacgctcaatgagggcgcgaccgactggcgtatacgagacgtgctggcgctgaagaagaatgttgcgtcgacattcgctgcctgcgagggtcgtcttgagtcgaatctcgaaaagatactcgctttttacagagagtaacgaaaaccgggtcggacagagcgttccgacccggcgttaatagtgctgtaatgttatccctgtccgtaaaactgttttttgaaaagtttacggaagagagggggtgcagggggagaggaaccgcttttcaaagcggttcctctccccctgcaaataagcaattatttctcaagcgatctgaggaagttcatgcagcgagtgacttcttcgagaccggtgggctggaggccttcgctttcgacgaccatgcgcataccgagttcgattgctttagcgcgcactgcggttacgggggcttcgccttcgccgagtgctttgccgtgtttgtccttggtgccgtccttgaggtgaatgacgttgactctgtccttgaggcgggtgatggtttcgaccgggtcgcggccggctacgaatgcccagtaggtgtcgatttcgaagttgatatcggagcgtttttccatttcttcgtgggctatctggccgtctttgttgggtctgaattcaccgtcgtggttgtggtaggcgagggtgatgccttcagcggcgagcatgggcttgtatttgttgagcttttcgattgtggagtcgagaccttctttggtgtcccacggagcgccggggactatgtagttcttgttgcctattgccttgtggtacttgacggtgcccgcgaagtcgttgtcgaggtcgccgagaccggagtgggtgccgctgacgatgaggccgtattcgtcgagcatggctttgacttcttctgcggggtggccgaagaagccggcgaattcgacgtatttgtagccgatttcggctacttttttgagggctccggcgagatcatcgtttgtgatgtcgcggacgctgtacatctgaagaccgtattccatgattgtgattcctttcgatttcacggaggcagaacttccgtgttatttttcggcttttgccgttttttgtgttcagcggaacatgtcgtgacagatctccggcggcgcggtgaagaccgtgcggcgggcggagatgagtttgtcgatgagatctgtgttccggtaagcatagtctatgccgtcgttgtgttcgaaaccgggaaggagcgtgagtccggcgtgtccgccgctcgcgttaatggcgtttaccatcagttcggagtagaccgggggtacgacggagtcgatggctccgtggtacgcgaataccggcgtcgtgccgagctttgaggctctccaggacattccgccgcccgcgaccggggctatcgccgagaaaaagtcgggatatgtgattcccatcgaccatgtgccgaatccgcccatgctcgagccggtgagcgacacgcggtcgcgttttatcccgagcaggactatcgcgtcgtctatgagggctttgagttcccgcacgacgttgtcccagaccgcccattccggacactgcgggacgaagacggcggcgtttatctctttgccttcacgtatcagcttcggtatgccgtggcggaagatgtggtcgcgaacgagaccgcgttctccggcaccgtggaggtatactatcagcggaagctctcccgacgcgttgtccgggtcggcgtccggggtgtagagaaccgcgttgagagccgacgcgagcctcgcgtcataggtttttgtgagcttcatgaattacttctcgagagagcgcaggtagttcatgcagcgggtgacctcggagagtccgtcgggattgaggttttcactctcgacgatcattctcatgccgagttccttcgcgcgcgcgtagacagcggcgacgggagcttcgccctcaccgagagcgcggccttcgtgcttgccctcagcggttttctttatgtccttgaggtggatcatatggacgcggtccttgagagcagtgatggtctcgaccgggtcacgacccgcgacgtatgcccagcaggtgtcgatctcgaagtcgatctttgtgcgcttctgcatttcctcgtgcggaatctgtccgtccttgttcgggaggaactctccggagtggttgtggaaagcgagagtgatgccctcggcggcgagcatcggctgatacttgttgataccgtcgatcagagcgtcgagcttttcctttgtgctggtgtcagcccacgggatgatgaagttcttgttgccgatggtgtggtgatacctgacggcagccgcgaagtcagcgtcgagctcaccaagaccggtgtgagttccgctgcatacaagtccgttcgcgtcgagcgccgccttcacatcctcggcgctgttgccgaagaaaccggcaaactctatgtacttgtagccgatttcagcaaccttcttaagcgtcccgagcagatccttctcggtgaagtcgcggacgctgtacatctgaagtccgtattccatgattttgtctccttaaaaaacaacgattttttctgacgcccggcaccggacccggggagccttttcacgctccgtttgtagactgccgacgacgtcaccataattatacaacacctatcgaaaatatgcaagaggtatcgcaaaatttctttgaaatttttttcacggagcggaaaaatccgcgcatagaaccccatgcgcggatgactatatattacttatagactctgacagtcccgtagaactccatcagctttatgaacagaccgccgatgacggatctgtgctggaagcccaccttcgcggaggtgacggtatcataccagtcggtcatcgggacgcgggtcggcatcgaattgtaagcctcccacagcggctcaacatagctctcgaattcagccttgtctgagcagagggtcgcggtccacacgagccagtcagacttcgtgtaagtcttgcggttgtcaagcggcattccgtatttgccgaagtggcggcggttcgcccaggtctcaccgtcgaagacctcgtgcgggatcagcttggttccgaacagcttgtcccagacgacgttgtacttcatgctgtaagtgcccttgcggtcgaacgcgaggcggtagcttccgtcgccgttctgcgctctcaggagccagtttatcgagagcttgcgcgcggagtcgaagtaggacgcggacatatcgctccgtccgagcttctcgcagatgatgcccataccggcgataccggatatcgctttgagcgacaggttgcagttgtgcgcgagatgacccgcgaagtcgtcggtgcagagctggtttgccgggtcggcgccgttatccgtgagatatctggtccagttgacaagcgtgtcaaaatgcttttcggcatagctgaagtcgccgctcgcgacagagtacgcggcggtcatgacgagcatattgccgcattcctcgaccggcatctggtagtctatcgcgttctctccgtagacctgaccgttgacgagcgggtaggttccgacgtcatgcggcgcgaagtcgaactcccacgcgtcgctctcggcgaatctgaatatcggacgcatcataccgagaacgagctccggattatagatgaggaacatcgggaccgacggatagctgacgtcgacagtcgccgcgcagccgttggagaagcactccttcgagatgaacaacagctcgccgtccttgtcgaggacagccttgtgcgccgcgatagcctgtctgaacgcgagacggagcatatcagagtacttttcgccgcccgccttcacagagtcgagaagcagcttgtcgtcaagctctaccgccttctccgcgagctgctcgtagtcgccgaaagcctcgcttatcgcggtctcaatcgtctttccgtccttgttccagacagacttcagcttttcgccgaaatattctatcgaataaatatcgtcataagcgaacgcgatcagcgcctcgtccgcaatgtccttttccagtgtgatgacggtcatgccgcactcttcgcactttttcgcgtcaaccttcgcgtcctttgccgcgagatagaaatatccccagtcaattcgcaggtcgtcgcccttcctgccgagcacaggctgagatttgctgccgatcctgacagcgttgatcccatcgaattcctcggtcgaggtctccacttcaagctcacccttcaggtttatgcagagctcttcagacgcgatgatcttcaccttcatcgtgtgagccgcgccgtctgtcgactcggtcgagagagcgagatagctgacaggtctcgtcattatcgcgaggctgtccgggaagagcggcgtgaagaatttcgccttcagtctgacgccagccgcctcaaacgtatactctgatgtgagagccgtgatatcaagcccggtctgggtcatgggctcgccgtgcttctcgcccatgaaacggtagtccttgccgtctatcgtgagaagaccgacgatggtgttcggtttgcctgtccagtggacggtagtgccttcattgagtctgtcggtgtccgaccagacgctgaaataggggtcgaccgtgatgagcggtacggccggtgctcttaaaatcattttgattatcctccgaatcattgaatccgccgttcggcgtttacacatattataatacattccgcgccggatgtcaattgaaaaaaattgcaagaaggtatagaaaataagcagaaatcagcccggcgatattttcgccgggctgaaatagttgaatttattgctgcttcagtgatcagttggatgcgagcatcttcgcgacgtccatcagaccgtcgaactcgacgcgcttgtcgtcgcagaacttcttcgcggacgcgacctgctccgcggtgaacttgtcgagatcgccgtccttgagtttgttcttgtacatacggtcgagcatgagcgcgtactggatctcgacctcgacgagctcgctcttctgctcgacgacgacgaggttggacatacccttgaggataagcttgaccgcgtaatcacccattctggtagctgtgagtctgtcgcggagggacggagcgccgccgcggacgatgtgaccgagtctcacgaaccggctgtcaacaccggtctcagccatgatccgtttggtgagagcctcgccgaactcgccgcccatagattcggagatcatgacgatgaaggaacgctgaccctttgcgcgctgagcctttatggtcgcgatagccgcgtcctcgtcgaacggaagctccttgatcgcgatagccacagcgccgacagcgagaccgcagttgagcgcgatatcgccggctccgttgcccatgacttccatgaccatgcagcgcgcgtgggattcgccggtatcgcggagattgtccgcgcaggtgacgaccgtgttcatcgcggtgtcaaagccgatcgtgtaatcggaggaggttatatcgttgtctatcgttccgggaaggccgatcgtcgggatgcccctgatggagaggtcggtcgcgccgcggaaggttccgtcgccgccgatcgcgacgatgccgtcgatgtggttgtcacggcaggtctttatggcctttgccatgccctcttcggtcttgaactcagggcagcggtcggagtagaggatcgtgccgctgagaccgcttatgttggcgacgtcgcggggagtgagctccttcagctcgccgctgatgaggccggtatagcccttcatgatgccgacgacctcaactccgtgagcgtaagcggaaagtgtgacggcgcggatcgccgcgttcatgccgggtgcgtctccgccggaggtcaggacgccgatttttctgaactgtgccattgtatttatcatccttttttgaaaatttttatcttgatcagaatacccgcggtgttgtcgtagcttaaaatgctcctattatatattctaatatattttctcgcaaaaatcaagggggtcagcgtttatttatttatttgttcatattttttgccgacataccctgtattatattctatcatatcacatccgtgttgtcaataaactgtacggacgaattttccggtatcatgtccaaacagtgcaaaacccatggatctcagcgaaaaaagaaagaccgccagtcataagacggcggccatgccttctggagcgaacggcgggaatcgaacccgtgcaatcagcttgggaagctggaattctaccattaaattacgttcgcacattcaacactgatattatacaccattttgccgggtttgtcaagaggtttttgaaaaaatattgccgccgcgtttattttcaccgtctctgggcaaaatactgaacagaggaaagtctgataacaaattttcagacttgatagtttcgaaaggaatgatcattaaaatgaccgtcaaacgcggcgatatttattatgcggatctcagtccggtcatcggctcggagcagggcggactcagaccggtgctgatcgtccagaacgacgtcgggaacaaatacagcccgaccgtcattgcggcggcaatcacgagtcaggtcgggaagacccgcctgccaacgcacataaacgtgatagccgacagattcgggctcgcgaaggactccgtgatcctgctcgaacagatacgtacgatcgacaagcgccgtctcggtgaaaagatgggacacctcgacgacagcgtcatgagacaggtgaacgacgcgataaacgtcagcttcggactttaataaatgcggaacgtccggatcagaagtgtccgggcgtttcttgcgaagatggtagatttcttcatgtttttctgatataatttacttgagggtatactgatcaaatcgggttttcgcggaaaaaaggccccggatttatgggcttttttcgtgaaaacgaccttaaatcagtgtttccttggataaactatggtttcagattgaaggagacgaatcatgtgcctgatatgcgacagaatcgaaatgataaaaaacggaaccaatccgtattttgtcaaagaattagagaccgggtacgtagtgataggtgataatcagcatttttacgggtatactctttttctttataaaaaccatagtaaaacagagctgttccagcttgatatgccggaacgcaaaaagttcttagaagagatgtcaattgtcgccgaggctgtttcaaaagctttcggggcggagaaaatgaactatgagctcctcggaatgggcgacgctcatttgcattggcacctgtttccacgcagaaatggtgatattgaaaactacgggaataacggcaaaggtcccgtctggtggtatccgatggagaaaatgtattgtgccggcaaccgcccgtcggatactgagctgagcgaaatgaaggcaaaattgctgatggaactggaaaagctgctgcggtgaaatttccgtaatttatcggactgataaacaatcctccgtatgacccggacgatcatacggaggattccgctgttttatggacacactgccgcgcgcggagattttttcccgctttccggacacgcgaaaatcagcttaaattgtataagttgttgaaatttgtcattagattttgtcagttgaatacaaaattcagcatattttgatatttacataaagcgaaaaaaatgctacaatatatattggtgcgcgatgaggggattgctgtccctcggaggcgcatgaaccgacggcggcgcgggtgattatattttccggaacgccgcttataatatgttttttatgattttggggtgtttaagatagaaacgaacaatatgtacagacgggtcggaattatgacgctcggctgtaaagtgaaccagtatgagagtcaggccatagccgaggagttcgagaagaacggattcattatcggccgcttctccgagaagtgcggcatttacataatcaatacatgcacggttacggcggagagcgaccgcaagacgcgccagatgatccgccgcgcggcgagacacaatccgaaggcatacgtactcgtcaccggctgctactcgcagctgaacccgggcaagaccgcggggatcgacggcgtcgatttcatttgcggaaacagcaacaagatgcgccttgtcgacgcggcgctcggactcatcgcttctggtgagaagaacggcgccgcggatatcaaggttgacgacatcatgtcggcgccccttgagaagatgtgcatacactcgtccgagcgtacccgcgcgtatgtcaagatcgaggacggctgtgacaaccgctgctcttactgcatagttccgcaggctcgcggtcatgtcaggtcgaagccggctgaggacgtcgtcgaggaagttaagggactcgtcgcggcgggttattacgagatagttctgaccggtattgagaccgcctgctggggaaaggatctcggggatgaagacctcgcggatcttctcgaaaaggtcgacgccatcgagggtattggcaggataagactcgggtcgcttgatccgtcgctgatgaagcctgagtttgtcgacagaatagcgaagctcagtcatctcgcgcctaacttccatctttcgatgcagtcgggctcgtcgcgcgtgctcgcggcgatgcgcagacgctataacgccgagaccgctgaaagcaacatagcctatatcagggagaagataccgggcgtcaccttcactgctgacattatcgtcggtttcccgggagagaccgaggaaatgttcatggagacggtcgattttgtgaagagagtcgggttcatccacctgcacatcttcccgtactccaagcgtccgggcaccgaggcagccgagatggaggaccagattccggaggagacgaagaacgagcgcctgaagcgtcttgaggacgcggagcgcgaagcggctctgaagattgccgagaattatgtcggcagccagaaggacgttctgttcgagctctgcgaggacgggcgcgccgtcggacacaccgccgagttccttgaggtgacagtgataactccggaagatctgcacggagagataaaggccgtgaagctcaacggctttgacggatcaacctacagcggcttcattatctgatcgttgatgacgattgtccccgaagaaaaccggaaagatctttccccgtcatccggacgcgcggagaagccgcgcgccgtgtccggcgggagatgagaagatgctgtcgcgtcagggcacagcattccatgaataattgaattgaataaggagtcggaaaatggtatacagaatatacgtcgaaaagcagcccgcgcacgccgtggaggcgaggagcctgttcgcggacatacgcgagaacctgatgataagcgggctcaccggtctcagggtcctgaaccgctacgatgtcgaaggcatcgatgagaaagtgttcaactcagcgaagaacactatcttctctgagccgcagagcgatatcgtctatgacgaggtaagggcggacggcgtcgtcttcgcggtcgagtacctgccgggacagttcgaccaaagagcggattcctgcgcgcagtgcattcagctgctgacctaccgtgagcgtccgcgggtcagaaccgcgcgcgtgtatatcctttccggcaatatttccgagagtgacgtcgggcgtatcaagcattatgtcatcaacccggtcgagagccgtgaggcgtcgcttgacaagccggaaacgctcgccgacaacttccacattccgacgaccgtcgagactatagacggcttcatctctatggatgacaaggcgctccatgagttccttgacaggtacgcgctcgcgatggatttcgacgacgtatgtttctgtcagaagtatttccgcgacgaggagaagcgcgaccccaccatttccgagatacgcctgatcgactcctactggtcggatcactgccgtcacactacattcctcacctcgatcgaaaacgtgaagatcggcgacgagtacgtgaaggagaccttcgaggattacctcgagaagagaaagttcgtctacggcgagcgtctctcaaagaagaacgtcacgctcatggacatggcgacaatcgcggcgaagtacttaaagaagaccggcgtgctgaagaatctcgatgagtcagaggagatcaacgcctgctcggtgaagatcaaggtcgacatcgacggcaagcccgaggattggctcttcatgttcaagaacgagacgcacaaccacccgaccgagatcgagcctttcggcggcgcggctacctgccttggcggcgcgatccgcgacccgctgtccggacgttcatatgtctatcaggcgatgcgcgtcacaggatgcgccgacccgcgtgttcctgtctccgagacgcttccgggcaagctcccgcagtcgaagataactcacggcgcgtcgagcggctattcgtcctacggcaaccagatcggtctcgctaccggcgctgtttatgagctctatcatccggattacgtcgcgaagcacctcgagatcggcgctgtcgtcggcgctgctcccgcgaagaacgtcgtgcgtgagcgcccgatccccggcgacgagataatcctgctcgggggacgcaccggacgcgacggctgcggcggagctaccggttcctcgaaggcacacaccgcgtcctctctgacaacctgcggcgcggaggtccagaagggcaacccgccggaggagagaaagctccagagactgttcagagacgagaaggtcacgagactcatcaagcgctgcaacgatttcggcgcgggcggagtttcggtcgctatcggtgaactcgcggacgggcttgatatcgacctctcgaaggttccgaagaagtacgagggtctcgacggcaccgagctcgcgatttccgagtctcaggagagaatggctgttgtcgtcgcgaaggaggacgcggagaagttccgcggatacgcctcccgcgagaatctcgagtcgacaattgtcgcgcacgtgaccgaagagccgcgcctgcgcatgaagtggaatggaaattacataatcgacctctcccgcgagttcctgaactcgaacggcgcggagaagcacaccgatatcgagatcgagagcgtgaataccgctggtctgcttgacggcttcatggagactgtcgacatgaccgacaggatgagcgcggtcagaaagatcatcacatcgctcaatatctgctccgagcgtgggcttgtcgagaagttcgacagcacgatcggcgcgggcaccgtcgtgatgccttacggcggaaagtaccagatcaccgaaccgcagtacatggcggcgaagatcccggtgctcaccggcgagacagacacgacctcgctcatggcatacggcttcgacccgttcctgtcgtcgaagagcccgtatcacggcgctgtctatgcggtagtcgagtccgcggcaaagctcgtcgcggcgggtgctgattaccataatatatatctcaccttccaggagtatttcgagaagacgagaaacgatccgaagcgctggggcaagccgatggcggctctgctcggagctctgaaggctcagtgcgagctcggcatcgcggcaatcggaggaaaggactcgatgtccggcaccttcgagcatatcgacgttccgccgacactcgtttccttcgccgtcgcggtcgacgacgcgaagaatcttgcaactcccgagttcaagggcgctggtcactatgtgacgatgctcgttccggcgctcgatcataacgatcttccggacttcgagagcctgaggcacctgtttgaccgtgtgcatgagctcatctcgtccggaaaggcaaaggctgtttacgctgtcgatatgggcggcgcggctgaaggtctcgtcaagatggcgctcggaaaccgtatcggtttcaaagccgctgacgatatcgacaacaggtcgctgttcgggctcggatacggcgcgttcatcgtcgagaccgaggagaggatcgacggcagacttctcggcatgaccacagacgacggcagattcacgctcggcggcgagtcggtcgacgtcgaagctctccagaatgactgggagttcacacttgagaaagtgttcccgaccgtagttccggagatcaagccggaaaaggtagaaaagttcacctgcgcggagcgctccgcggtcgtcgcgaatgagaagtttgcccgtccgagagttgtgattccggtattcccgggaaccaactgcgagtacgacacaatgaggcgctttaacgccgcgggcgcggagtctgagatatgcgtgctcagaaacctcgacgcgaaggcgctcggcgagtcggtcgacgaacttgtttcgctcataaacggcgctcagatattcatgcttcctggtggattctccggaggcgacgagccggacggctccggtaagttcatcaccgcggtgctgagaaacccgcgcgtcaaggacgccgtcacagacctcatcgagaaccgcgacggtctcgtactcggtatatgcaacggcttccaggcgctcgtcaagtccggacttctcccgtatggaaagatcatggacgagatgacgcccgactgcccgacgctgaccttcaacacgatcggccgtcaccagtcgatgatggtccgcacgagaatcgcgtcggtgaagtccccgtggctcgccggagtgaatgtcggcgacattcacactgtgccgatatcccacggagagggacgcttctacgccgacgaggctcttatcagaaagctcgccgcgaacggacagatcgcgacccagtacgtggatctcgacggcgacccgacgatggatatacgcttcaacccgaacggttccggcttcgctatcgagggcatactcagccccgacggccgcatcttcggaaagatgggtcacagcgagagaatcggcaggaatgtcgccatcaacattgagggcgacaaggaccagcatatcttcgagtccggagtaaaatacttcaagtaaaaaacgcggggctgttgtgtttcggcatgacagccctgctttgaaagtttttcataaaaaagaaacggaggcggcggaatgaacagattacgcgtcggaatatacggcgtcagacgcgctatgaatattatgcgccgcggtctcgcgggaaatttagcgcagatcgtcgccgtgaccgaccctgacgccgagcttgtgcggaacgcgtcggacgagatatcatctctcggcgccgccgcgtacactgagttcggacggtttctcggcgtcggtcttgatgcggtcatcatcgccggaccgccgggacggcaggcttcacccgccatcaaggcgctgcggcatggtattgacgtgctctgttatccgatgcccgtgtcaatgcttgacgaggcgttcctgcttgagcggactgtccgggagggcggacgcatcttcgctttcgcggagccgtattgctacagacgcggggtcatgacggcgagggagatgtaccggaacggcgacatcggaaagctgctgtcggtcgaggcgactcgcgtcggaagggaaccgctcacgaccaaggtgccgaaggacgaggcgtatcttccgtcgacctttatgtgctcggcgagcgtcggaccgatgcttttcgcgaccgggttacgtcctctccgcgtcatcggcatggagacgccgcgcgccgggttcacctcgtcgaagggggctaagcacgcgagcgccgcgacggagcttttcgagttcgacggcggcgctgtcgggcggagctttcacggggagctgtcctgtccgccgcggttcacgctcactatgtgcggcgagaccggaacgatagaggtctgcggcgacagactgcttcaccatgactattcgagcggaaggcgggtcagctcggatctcaggcggagcgcgccgcgctttccgggcgcgaattattacgcggacgatctcgagaacgctgaagcttcggctatatgctgttttatcggaaaactgcttggagacgtcgattcggcggcttgctcgattgacgtctggagggcactcgacatatcactttccggactgctggcgtatcgctcggtgattgacggcggaagggcgttcattatgccggatacgagaaccgacgacgggcgcgagttctgccgaggggaccgctttacgaccgatccgaacgctgacgcgaagtacaggctcccgccgaacaagaaccgaggcgcgggaaaacaggaaacactgatttaaggttgttttcgcagaaaaaagcccataaatccaagactttttttgcggaaccccgatttactcagtgtttcctcaaaattatccgtgaccggaagacgggcacggatattgtttttcgcaaatatacttgaaaaaatcctgcggctgtgatatactatattataatgaagattattcggaggacgggtatgtactataagtatgaaactcacgcgcatacgtcggagacgagcaggtgctcgcatatatccggcgcggagctggcgcggttctataaatcgctcggttataccgggatgttcgtgaccgatcactttttcaacgggaatacgacggtaccgtcggatcttgcgtggagtgagcgggtcgacaggttcatggagggctactttgcggctaaggctgagggggacaggatcgggcttgacgtgtttttcggatgggagtatacgctttgcgggaatgattttctgatatatggactcgggcgggattggctgctttctaatccggatcagctcgggctgtctgtcagggattatatgaagagggtcagagaggacggcggattggtcattcatgcgcatccgttcagggaggcggggtatattgatatgataaggctgattccgcgggacgtcgacggggttgaggtgattaacgcgagtatgaaggatgagtataattcgcgcgcggagtggtacgcagggagttatgaccttctcagatcagcgggttcggataatcatgccggacagcgtccgagactcgcgggcgttttcctgccggagcgtattttctctgagcgcgattttgtccgtctgatgaaatctggcgcgtctgagttgttctgtgaccgttacgatgagaccggcgtcagattgtaaaagtttagcgaaggaggggtgcaggggaggaggtgccttttcaaaggcatctcctcccctgcaaagcgagggtatatgaagcacgttgatatttacactgacggagcctgtaagcataacccgggcccgggcggctggggcgcgataattgtctataagcagactgagaaggagcttgcgggcggcgaggagcggactactaataaccgaatggagctgctgggcgcgataagtgcgcttgaggcgttgaaggagccttgcgaggttacgttgacttcggattcgaagtatatgattgattcgataactaagcgatgggtgtatggatggaggtcgcgtgggtgggtgaaatcggataagactccggctctcaatccggatctttgggagaggctgcttggtcttctcgaggtgcataaggtgacgttcgtctgggtcaagggtcatgccgggcatccgtataatgagcggtgcgatgcgttggcggttgaaatggctgagagtttcaaggcgctcgggaatcattaaattaaatgtttcctgcataaaggtaatatatttatttatggaagaaagatttgtatacgcggacaatgcggctactacgagtgtgtcgccggcggtgctcgcgaagatgatgccgtatttcgctgaaaagtatgggaatccgtcgagtcttcattcgaagggcagggaagcgaaggaggcggtcaccggcgcgcgggagagaatcgcggcggcgctcggcgcgagaccgtccgagatatattttacgtcctgcggctcggaggccgacaatatggcggtcaagggcgcggcacggctcgggaatgggaaacatatcgtcacgactctgatcgagcatcacgcggtgctgaattcgatgaaggcgcttgagcacgacgggtacgaggtgacatatctcgtgccggacggagagggctttgtcacaccggagcgggtcgcggcggcggtgcgcgatgacacggctcttgtcgcggtcatgctcgcgaacaacgagataggcacaattgagccggtatgcgagatagcgtccgcggtgaaggcgaagaaccgatcaacacttgtctttaccgacgctgtgcaggcggtcggcgcgataccggtcgatgtacgggagctcggcgtcgatatgctgagcctttcggggcataagatacacgcgccgaaggggatcggagcgctttatgtcagaagcgggctcagacttccgccgcttattgacggcggcggacaggagcgcggcatgcgcgccggaactgaaaatgttccatatattatcggactcgcacacgcggtggaggacgccgtaaacgggctcgatcggatgaagagagtcagcgctctgcgcgaccggctgatcgacggaatactcgccgcgattccggacacgcggctgaacggcccgcggacggacaggcttcccggaaatgtcaatgtgtctttcggcggcgtcgacggcgagagtctgctgcttctgctcgatatggcggggatatgcgcgtcggcgggttcggcgtgcgcttcggcgtctcttgagccgtcgcacgttctgggcgcggtcggaacgccggagaaatactcacacggggcgataaggttctcactcggggacatgaacggcggcgaggacgtcgattatattctagaaaggctgcctggcataatcgacagactgcgcgcggcggggcggagctgagaagacgtgttgttcgtcatgtgaaccaaataaaaacgccgttccggagccggagcggcgttttgggacacgtgacgcgaccgtccgaaaggttcacatgaccgtcacaatggatgcacgtcgataattcttcgaaaacctgtattcattttgtgtgcaaaaatcattacacaatatgcaagtgcttccactaaatggtataaatgtctgaatttgcgatgaaattgtgcacttcgtataggtgtagaaaaatcgacgcgttttttgtataatatgcataaatctgctaccgcttttttgagtcccggaagtccggacatggggaaaatatgagtaattataagttacactatcatgaagcggcgaatctgtatattgagatattgcgcataaatcagggaaattcaggatttacgtgtaaaatataattacattataggaatgtagtaacaaaaaaatcaccctgccgcaggataacgccacgtccggaaaaatgtgaacgtgctgccgcctgttcggagtcggctctgtgacgggaatttgaaaagcggatgaaaaaacatactattgacttttgtcggatgttatgttattatatttgtatgaaaaaatcggcggaagtttgcttgtggacgaaacgtcatgaagtgatttgctatacggaacaacgcacggcggtaagaaatccgcggacggcgttctgttccgtgaacggggttcgtggatctgactgttcgacttgcttggaacaggatgttccgtgtgaacagggtgttccgtgcggcaatccacttcatgccgcggactccggcggctccggatgattggctcatagctttgtacggaaggacctgagcggcggcgcgaaagccacacctcgcgcgcggcggcggtccggacggacccccaaaagctgatgcctccaaggctgacgccccggaggcaggttaccctcaaagtaaaattcttggcaggaggaaaggttttaatgaagaaaacgaaattaacaaggttaattgcggtttttttatcattgatgatgctcggatccacgttcggggtcggaagctatgcggccgatgcctcgtcggatgacggctcgtccacggtcagctacgatatagccgacgttcaggatctcttgaacgcggaaagctatactgactacgctgcccgtacggctgacgttccgaagggcagatcagaggtaaagatagacgcggttgactacaacaaggacgaaactgacgcgaaggttgaggtcgtctcgaactacaacggcgcgtccggaagcgctctgctgactccggcggacggtaccaccgcgtgggatattgaggtcccggcgaccggaaagtacgcgattgatatcgagtacacgttcccgacggacggcaaatccaccgctatcgagcgcaagctcaggatcgacggtgagtacccgttcaagggagtgagatatctctcgattaccaaagtgtggcgcgatgaataccagacggcagaggacggaagtcccgctttcaagaccgatatcaacggcaatgacataaagagccagaagtccctgtcttccgagtggcgtacatataccgtgtgcgactccaccggctatgatatcaacccgtatcagatagttcttgaggccggcaagcacacgatctcgctcgaggcgagccgtgagatccttgtcatcaagtcgataaagatctatccgtacaaggatcttccgacatatgaggaagtcaaggcggaatatgcgtcgaagggctatcagtccgcggatggcgccgagaagatcgtaatccaggccgagtatccggacgcgacttccgaccgcaccatctatccgcagaacgaccgcacctccgcgctgactcagccgcagagcccgtcgctgtccaagctcaacgctctcggaagcacgaagtggcagaccgtcggacagtgggttgaatattccttcacctgccagaagtcaggtctctacgagatcgctccgagatacaagcagtcggacctcagcggtatgtacacttcccgccgtatcagaataaacggcgagatcccgtttgaggaagcaaactactgccagttcaacttctctgacgagtggcagtcagaggcgctcggaaacggaaaagagaccttcgagttctatttcgaagagggcaagacctacacgatccagctcgaggtcgtcctcggcggaatgagcgagatcatcggacgcgttcaggcgtctcttaccgcgatcaacgccgattacctcaagatcctccagatcaccggcgctgacccggataagtatcgtgactataacttccgcaacctgattccggataccatcaaggatctgtacgctcagtaccttgagctcaccgcgatctccaacgagatcaccgaggtcaacggaataaagggttcgcaggcggcgtcgctcgataatatcgcgcgtgtcctccacaagatggctaccgacgaggatgaggtcgcgagaaacatgtcgaccctgaagacccagatcggtactctcggtacatggctcaacaacgttagaaaccagcctgtgcttcttgactacatcgcgattcagcctgtcggagagaagctcccgagagctgaggcgaacttcttcgaggctgccggcttcgagatttcgtccttcgtgatgtccttcttcaccgactactcgaacctcggcgctaccatcgagctcaacgaggatgacgtcattgaggtctggaccagcgcgggccgtgaccaggctcaggtcatcagatcgatgatcgataataacttcacgtcagtcaccaacatcggtgtatcgctgaagctgatttcggcgggtacgctgcttccggcaacactctccggaaccggtcctgacgtctctctcggaaacgcgcagggcgatccggttcagtacgcgatacgtaacgcgacgcttccgctcaatgatttcgataccttcaaggaagtcacgagcagattctcgcaatccgctatggttccgctgactctgtacggaacaacctacgcgctccctgagacgcagtcgttcaatatgctgttctaccgcaaggacgtcttcgcagagctcggcatcgacattccgaagacatgggatgacctgatggccgcggttccgttccttcagtacaacaacatgatcgtcggtattccgaaggagcttgccggctatcagctcttcctctatcagatgggcggagagctttacgccgacaacggcatgagaatcaacgattcgaacaccgcgcttgaggcgttcgatacgctctgctcttacttcactcagtattccttcccggttacctacgatttcgctaaccgtttcagaaccggtgagatgccgataggcttcgctgactatgtcgcgatgtacaaccagctgtcgatcttcgcgaccgagatcaaggacctctgggagttcgtcccggtcatcggtatggaagatgagaacggcaatatcaacaacacttcgatatcctccgtcaccgctatgatgatgatgaacggctgtgagaagaaggataacgcatggaagtttatggactggtatgtctccgctgacactcagtcgaactacgcgaacgagatggtcgcgatcgtcggtcagggcgctatgtacgctaccgcgaacaaggaggctctcgagagcctgccgtggtcgaccacagacctcaacaacatcctcgcacagtacaacaaccttgccgctatccccgaaatgcccggtggatacatcatcacccgttacgtacagtttgcgttcctcgacgcttacaacaacaacgctgacccggttgagtccttcctcggatatgtcgacgacataaacaaggaaatcaccagaaagcgtaaggagttcttccttgacaccctcgagctcggcgagaccctcgctgacagagaggctgcgcagggcggaaccgatactaccgcggagcagtaaacgaagcggtaaatcaaagttacgaatctcccgccaagagatgagttttctccggtcggtcagaccgaccggagaaaacgttaacgcggcgggaatcaacaaatctgttataaggagagaacgcacatgtcacagaatgcagcggctgttgaaaacaaaccgaagccgaccgcccgtaaggacatgacaaaggcacagtggacgctcaaggaaatcgcgagaaacaagaccgcgtatttcatgctcgcgcccttcatgattctgttcctcatcttcacggtcttcccggtcgtgctctcgatcctgcttagcttcacacagtttaacctgctcgaacttccgagattcatcttcatggataactatgtaaggcttttccttgatgatgatatcttccttctggcttgccagaacactctcattttcgcggctatcaccggaccagtttcctacctgatgtcgctcctcatcgcatggttcatcaatgagcttactccgaagatcagagcgctcgtaacgctggtcttctacgcgccttccatttcgggttccgtttaccttatctggggcgttatcttctccgacgactcttacggttacgcgaacgcgtggctccaggagctcggaatcatcacagacccgattctctggttccacgatgaaaagtacgttatgggactttgtatcgtcgtcgctctctggacctcgctcggtacttccttcctttccttcatcgcaggtcttcagaccatcgacaagtcgctctatgaagcgggcgcggtcgacggtgtcaagaacagatggcaggagctctggtatataactcttccgaccatgaagcctcagctgatgttcggtgcggtcatgtcgataaccggatccttcggtttcggcggcgtcgttaccgcgctcgcaggtttcccgtcggtcaactacgcggcgcatacgatcatgcaccaccttgaggactacggcggacagcgtttcgaggttggttactcctcgaccatagcggtcgttctgttcgcgataatggtcggcgcaaacctcattatcaagaaattattatcgaaggtgggacaataatatggcaagactcagaaccagaaaacataaagttgtcctcaaccgttcggtcggaggcgatatcggaatcaacgtgcttctcatactcatgggcgcgttcatgttccttccgatgctctacgttatcatgcagtccctgaagcctcttgacgagctgtggatgttccctccgcgcttctacgtggtgagcccgactctcaagaacttctccgaccttttcaagctcatgtccacatcgtgggtgccgttctcgagatacatattcaacactgtgttcatctcggtcgtcggtactctcggaaacctgctcttctcctcgctcgcggcttactcgctcgctaagatcaaattcccgggccgcggctggatgttcgagctcatagtcctctcccttatgtttaactcgaccgtcaccggtatcgcgaacttcatcacgatgagtacgctccactgggtcgatacttaccttgccatcatcgttccggcttggtgtacttcccttggtctgtacctcatgaagaacttcatggatacggcggtttcggacgctgtgcttgagtccgcgagacttgacggcgcgactgagttctacacgtt

SEQ ID NO: 823 - DNA, 18342 bp, Unknown
  16S sequences of unknown bacteria
tttcgagcgttccttgtcaagggcaagaatgtggcgtttcatctccttttcggtcagcttttcatcgtctccgctgcgctccatgcaacgctttacgcggctttcgatatcggcatagacgaaaattctgaagggattgtaatcgcggagaatatagtcggcacagcgcccgacgataacacagtcggatttttcggccatgctttttataatttcgctctgagcgccgtaaatcgtctgaacctgctgaaaagcatattcacccacatatgaaatgctctgccccgttgttatgggatagagatagtggggacggtgctcgataacctgctttacatactcctccgaaagggaggtgtgcttggaaatttcggtgatgatctccttgtcatagtagtcaatattaagctcctcggcaaggcggcgggcaagctctcttcctccgcttccgaattctcggccgacggtgattattttattcataagatcaactccttttgtattcacattatatcacaattttttcgctcggtcaaaggattttttatactttttggttaaagatttttgagttgttgacattttgtcctcacgctgatataatcaaaccgaacagaatattcgacagagcggctttaaaacaaagccttaaagggaagttcggtgaaaatccgtcgcaactgccattaccgtcaaagtcggaatacttgctctgtcggcggcgtccggttctccgcgacatttttgggtaaagaaaaatgcagccaatcgcttaaagaaaagagtttctttaagtttatttgggttgcattttttgtgttttacaaaaagtgcttttttattttggaagtgaaaaaatgaaggaccgtctgacaagggacgactgtattgctctgcttgtcaaaaagcaggatgaacttaataaaatcggcgaaaaccgtttgcccaagcgttcggatttttccgacagagaaattatggccgtaaaatcctttttcggtccctttccgagggctctcgaggcggcgggaataaaggaaaagcggccggatgccgagcaaaagcgcagggagaaaaggctgcgcgccaagaaaaacaggctgaaatacaagcttgaaaaggtaaaaaactgcgaaagcagaaatataaaggagaaataaaaatgaaaaaattgctgagtattctcacaaccgttgcggttatatgctgtcttttaggcgtatcggccgctgccgacgcatcggcaaaggtctatgtcaccgttgcaaacggcggccttgagcttgccaacagcgaggttaccgtaaccgacatcgacggcgacggcgccctcactatcaacgatgccctttatgccgctcacgaaagctactttaagggcggagccgcagcaggctatgcctccgaaatgtccgactacggccttatgctcaccaagctttggggaatcgaaaacggcggcagctacggctactatgtcaacaacgcctctgcctggagccttgccgacccggtcaaggacggcgattacgtcaacgcctttgtttatcaggacactaaggcattttccgacagatattgctattttgacaaggcagttgccgatgtaaatcaaggcgaaaatcccgcttttgttttgaacggcgtctactttgatgaaaactacaccgcatattcggctcctattgccggtgcggaaatcaccgtaaacggcgaaaagaccggaatagtaaccgatgaagaaggtcgtttttcgggtctgacctttgccggtcagggcgtatataccgtcagcgcagtatcgagcaccgagactcttgtcgctcccgccctcacaatttcttattccgttcccaaaacctctacctccgagcccgacaccgaagtttccgaggtttcgaccgtctccgaaacaaccgaggttgcaagcaccgccgatgtcacccgcggtaccgtcgaaggaaaccttgccaaccccaaatcgggagacagctctgccgtcgtgttctcggccgccgctctcgtgatttcctgcggcgctctgcttgttattaaaaagaaataaaatgagaaagtttgctttatcgcttctttcttttctgtgctgtgcctgcatactttttgcgggcacaacctgccttgccgtcggagagaccgaaagtctcatcgacggtattgttgattataggcttaaagaaagcggctgttcatcggttcaaagccttgcccaaaaaggtctttcctcgggcgcgggaaagggagcaagcgaatggtatgccataggcctttcggcatactataaaaatctcgacctttcgggatattcatctgccctttcgtcctatctttcttcaaacaaaatttcctctgccacgtcgagacagcggtgcgccctttcgctcatcgcctgcggaaagggcggcgactcttttgtctcctcaaccgccgccgattcggtgggaagtctcgggataatgagctacatattcgggctccagcttgcaagcaacggcgctcccctttcggtttcaaaggacggcataatttccgaaattctgtcccttgaaaacgccgacggaggctggtcggtaagcggctcaaattccgatatcgacgtgaccgccatggcgcttgccgcccttgccccctataaaaacggttcggcggcggacgccgtggaaagagggctttccttcctttcttcaaagcagcttgaaagcggcggatttatgagctacggcaaggaaaacgccgaaagctcggctcaggttatcgttgcgctgacagccctcggaataaatcccaaaaccgacggcagatttgtgaaaaacggatgctcggtcttttcggcgctgtcgggatttcgcctttccgacggaagcttttgccatataaagggcggagcctccaacggaaccgccaccgttcaggccttctattcccttgtggcgctgtggcgatttgaaaacggactgccctcccttttcaccctttcggttaagggaacaaaggccctgccctcctccgattcgggcaaaagcccgtcggaaagcccccgtgaaaatcacttcgactccaaacccggcgacgcccccgccgaaatttccggcaccgaggcggagagcaaagaaagcggcggcgacatttcttcggacgcgcagagtgatgagttcgcagagcagaccgaagactcggcaatttcctcggccgactcgaaatccgaaacaatttctccttcaaagggaacggaaaaatcgggcgaaaaaggcttttttaaaagctataagccgtggacaatactcggcatacttctgatttgcgccgcggtttgccttgtcatgcgcttaaagaagcataaaaaccttaaaaattatctctttgtcggcgcgatcggcattgtgctttcgctggcggtcgcatttacaagcttttcgtcggtggacagccactatgcccccgtttcaaaagagggttcggcgggaacggtcaccgtctccattcgctgcgacacccttgctggcaagtccgacagcagctttgtccccgaaaacggcattattctcgacagcaccgaaatccccctcgaaagcggagaaaccgcctttgacattctcggcgatgtttcaagaacctacggaatacaggtggaaagcaccggcaccggcggcgacaacagccttgcctacatcaagggaataaactatatttatgaatttgacggcggcgatttgtcgggttggatgtatcgcgttaacggcgaatttccgtcggtgagctgcggcgccttcacgctgtccgacggcgacaaagtcgaatggctctacacctgcgacctcggcaacgatttgaactgacataatataattcctttatttcgctctgtctttgtaaaaaggcagagcgtatgcttttttcaacaaaaatttataaattattaaaaatatatttacatttatgacggtttgtactaaactgaagtcggaatcaattgatcgcaacgttttttgcaaaacagaaaggagaaaagataagcaaggaatgtaaaaaaaagcattatttttttacttttacactcaaaaggggagaattttatgtttaacaaaaaacacacggcgattatacttgtttcactaatgatagtttctgttttttcgtcctgcaaagcggattctaatgaggtttcaagcgatagtattgtcaagaaaacaaacaaggtaaacgacatttctgtcgttgaatcttacatggattatatgcaggaaatggctgaaattgcagcggaaccgaaagttgttgttttgacggttaacggacttgaaataaccgatttcaacataaagggtgagcttttagcaaaaaacgaagccgttaaaaatgagcttgacgcaattgattcggaggaaatatccgatgaggaaaaagcaagcaaaaaagaacaatatcactatataacaagagaggacgcaataaaaaactgcatcgacttttgggctcaggtatccgaagccgataagaggggaattgtaaagtctctcgacgattcaaaacaatttgcaaaggacaatcttgacatgataaaggagggcgcgcaaaacggagattccaactgtattgaggaattgtcaaaaatcgagaaatacaataaaacaataggacaaaccgaggaagactatataaacaacggcgccgaaatgttggtaaatgtagccaaaataacgcaattgagaaatcaagtggttgactcattctccgacgagcaaaagcaaaacgaggatgaggaatatcaaaaatttgtcgacgagcttgtcaaaaaggcaaaaatcgagtggaaataaattttttcaaaaagcctattgacaaagtcggtttaaagtgataaactttagtaaaccgttgaaaaagagtaagtagattataccgaacctctcagagagccgcaggcggtgggattgcggcagtttaagtattttcgaatgggcttttgagggcgagctgaaagggtttcccgagtatgcgagacggagggcgacgctccgtgacaaagggtcagcatatgaatgtatgcgcagagtgggtgatttttcaccaagcagggtggcaccgcaggaagaatttttctcctgtcccggcagttttgtttaactgcgggacgggagttttttattttccgctccgcaaagaaaaaagaaaggagacatacgttatgtcaaaagaaaaaatcccttacaaaatctatctggatgaaaccgagattccgaaggcatggtataacctgcgtgccgacatgaaaaacaagccggccccccttctcaatcccggcaccctcgagcccatgaccgccgccgagctttcgggcgttttttgcgacgagcttgtggcgcaggagcttgacaacaccactccctatatcgaaattcccgaagagatacgcggtttttataagatgtaccgtccgtctccccttgtccgtgcatattgccttgaggaaaagctcggcacgccggccaaaatttattataaattcgagggtaacaacaccagcggaagccacaagctgaattccgccgtggcacaggcctattacgccaaaaagcagggtcttaagggcgtgaccaccgagaccggagccggtcagtggggaaccgctctttccatggcctgttcctatttcggacttgactgcaaggtgtatatggtcaaggtttcatatgagcaaaagcccttccgccgcgaggtcatgagagtttacggcgcctcggttactccctccccctccaccgaaacggccgtgggaagaaaaattctcgaagaacatcccggaaccaccggcagtctcggctgcgccatttccgaggcggtcgaggtggccacgtcgagcgagggctatcgctatgttctcggcagtgtgctcaaccaggttctgctgcatcagtcggttataggactcgaaaccaaagcggctctcgataaatatgacataaagcccgacatcatcatcggctgtgccggcggcggttcaaacctcggcggacttatcgctcccttcatgggtgaaaagctgcgcggcgaggccgactatcgcattatcgccgtcgagcccgcctcctgccccagctttacgagaggtaaatatgcctacgatttctgcgacaccggaatggtttgccccctcgcaaagatgtataccctcggcagcggctttattcccgctcccaaccacgccggaggccttcgctatcacggcatgagctccaccctctctcagctttatgacgacggtcttatggaagccgtttcggttcctcagaccaaggttttcgaggctgcggaggaatttgcaagggtcgagggaattctccccgctcccgaaagcagtcacgccattcgcgttgccattgacgaggcccttaagtgcaaagaaaccggcgaggaaaagaccattgtattcggtctcaccggaacgggttatttcgacatggttgcctatgaaaaattccacgacggcaaaatggacgattatattcccaccgacgccgaccttgaagcctctttcgcaaagcttcccaaggttgataaataaacggtatcaagcaaaagacctgccttgcaaaacgcacggcaggttcttttttaactaaagaagggagcggcggaaattccgtcactcccgtaattttttgttgtccgttaactcaaaggatttatttggcaacaacggtgtagtaagtatcgctgccttttacttccgaaacaaccttatagccgtcggcaacaaagttggtatgtgcaccctcggcatagcaatctgcagggttaaagtttacgaaggtaccgccggtaacaatgatctttgcggtaccggcctcgcggttggcgtcatagcagttgagcacaaattcgtctgcctttgaggcatcgggatacttctgctgaaccgaatagaaaccgccctcgatgattgcggtgccctgctgaacataaacggcgtgaatgttgccgatgaaggttccgtccttaatggtgacggtggagccgtcctgaacgtcgacggcataacagtcgttttccttggccttgagagtgccgttaccgcttacggtaaggttggcaccgttctgagccgaaatcagcgaccaatcgttgggcttaacatcccaaacgtcgttggtgtttgcgacggtcttgccgttgagatcgacaacggcggttccgttggcaacaacggtctcatcgaggtcgacatctttagcaacggtgataacaccgccctctttggcagcgtttacaaacgcagcggcagtatcaacggtatattcgggatatgttgcgttagcgtcataggtgttgttaatgctgtcgctttcgacggtgtcctgagtggcgacaacggtgaccgaaacgccgctgagggtcttgttcatgtaatcgttgcctgcggcctcgtccatatgagccgaaagcttgaaggaatttgcggttgtctcaccggccttaagatggccgacaaaggtgtcgagagcaacggtgctttctccgcttatgaccgagaatttgatgaccttgagcaggccttcgtctccgtcaacgccgtttacaacgagcttgtatttaagagcgagagtgcctttgtttgcgaccttgaattcggtggtgttgaaggtcacgccgggctcccaaagaatgtcggtttttccgtcaacgtcggtgaaattaagagtgtcaactgtctcattggtcgttgcatccacaatatccacgtccaatttaccggactgaattttgttgaccgaggtgcttgccgtgtcggtgaaccatgcaaaggtggtgccgaccagcattgctacgcaaacgagcatagcgagagcgcttgacacaagtgctcttttggtgtttttgctgttcataaaattttcctccttgaaaatattgcaaattcctgcaatggttacaatttgcatatttattctaccaccaccctacctcttgtcaagagggacacccgaaaatttacaatttttttgccgatttaagttgttttataaacagaaaaaaacaaggccgaacctctcaaaagaaagattcgagccttgttttgattatcggtatatccgattaaattatttgcttacggtgtaccaggttgcgccgtcaacttcttcagaagtggtggtgcagccggtgccaatagcgatttttccggtataggcattgacagggtcaactactgttacaccggggttatagttcttaaagctgccgccgttgacggtgatggtgcagccggcggtggcgctgtcctgatgattgagaacatagtatgttccgttaagagcgcttgcagtctcaaacttaccgccgttgataacaactgtggctttggaacccgaagatctgcttgtcataacgaaaatgcaggaggtttcgtcgcttgtgccatagaaatggccgccgtttatggtgagctttccgtagttacccacgcgaacggcagaggtgaccttgttcaaatagctcttgtcggaaccgataacggcaccggtctgagccgcgcttgaatcgtttatagtgaggctcgactttttacctgcaacattgaacacgccgccgttgttgggctttacgtcatcggcatattcgagcttaaccgaatggccgttaaggtcaacaaccacggttttgctcgagagataaatctcgttggtaacaacaacatcgttaacaagtttaaaatatcccttggcatttctcatgttataagcctgctcgcctgtagcgataaggtaaggattggcctcggtgccgtcgccgccattgaaatcactgtcggaaataacaacggtgaagggagaaaagtcgtcggtggtgaaggtgataacgccggtcgcagcgtcataataatattggtcatttgcggtgggagctgccgtaaccttggtgagagcagcgccgttatgatagaatccgataacgttggcgttctttgcaacctgcatctgaagggtgaagaactttcctgcttttgcggcaaccttttcgccgttttgattgacgatcttaacgtcggcggtaacagcctcggtgccggtaacaacctcaatgcttgcgggggtcgcgcccttggtcttaataagggtgagggtatcggcggtcacgctgtcggcggggacggtggcggtcacggtaggatcggtctcgcggtccttaataacggtgtcctgtcctgccttaacctcggcatcggccgaaacattgtcgagccaggtgtcgaaagcgggagtgccgtcggcattcttgtcgtaatccttgccgtagctgtcgctttcaacggtatcctgaacggcatatacggtgattccgatgccgtcgatggactcgttcatatattcgttgccggcagtttcctgcatatggccgctgacggtaatttcatttgcggcaccgggaagaagatgatattccttgccgatgtcggctccgtcgacggtccagtcaatgacctcgttgagcttggcgctgccgtttataccggtgatggcgaccttatatttaagggcgaggttgccggcgtttgaaacgcgaagctcgggcagctcatatgtacaaccgggctcccaaagaaccgcttcgcctgcggcggcctttttgaattcaaggctctggtcctttgcgtctttccattcggtgggatttccgtctgcatcccaagaaacggcatattcaagcaaaacatccagtttacccgaaacaattttgttgaccgaggtggacgctgtatcggtgaaccatgcaaaggtggtaccgatgagcatggctatgcaaacgagcacagcaagagcgcttgacacaagagctcttttggtatttttgctgttcataattttcctccttaaaattatgcaaaccgatatgggttcacaatttatacacacattgtaaaccccttcccatagttttgtcaaggtggttttttgaaaaaaatcccatatttttatacctaaaaatcataaaaaatgacgaacaaaaaagcgatcatacctttgtctcttgaaatgtttttaaaatcgtgtataatatatgatggagtaggtttttgatttgcgcgaaaggaagaaagccgaaagcgcaaatttccatatatgaagctttaaagaacggaggaagaaacatgagaagaacaaaaataatatgcacactcggccccgcaagcagcaaccgcaaaaccgtggaaaaaatgattgaggccggaatgaacgtggctcggctgaacttttctcacggcacccacgaaggccaccaaaaatatatcgacatggtaaagaccataagaaaagagcggggatgtcccctcgccataatgctcgacaccaaaggtcccgaaatccgcaccggagtcatgaaggacggcccggtaaagcttattgacgggcaggacttcacgctgaccgcccgagaggtcgagggcgacgacaaagaggtctttatgacccttcccgagcttccttcccaggtaaaggcgggaaacataattctggtcgacgacggagcaatcaagcttagggtcaaatccaccaccgaaaccgacataatctgcaccgttgaggcaggcggaaagctttccgaccgcaagggcataaacgttccctatgtggcggtggatatgccctatttaagcgagcaggacaaaagcgatctgcttttcggaatcgaaaatgacgtggattttgtggccgcctccttcgtcagaagcaagcaggacattatcgaccttcgcaaattcataaactataacggcggacacgacattcgcataatcgccaagattgaaaatctccaaggaatcgaggccttcgacgacattctcgagctttccgacggaatcatggtggcgcgaggcgatatgggcgtcgaggtggaatatgagcggcttcccggccttcagaaaagatttatccacaaatgctatcaggccggaaaaatggttataaccgccacccaaatgctcgaatccatgataaagcgccagctccccacccgcgccgaaataaccgacgttgccaacgccgttttcgacggaacctcggcggtcatgctgtcgggtgaaacggcctcgggaaaatttcccgtcgaggcggtcagagcaatggccaaaatcgccgagcaggccgaaaacgacgcctttgacattgccaccttccgcagaataaaatatgacatggacacaaaggacaccaccaacgccgtctgcgacgccgcctgcaccaccgcaaaggacatagacgccgccgccataatcgcgctgacaaaattcggtcaaacggcacgaagaatgtcgaaattccgtcccgacgtccccattgtggccgcaacgccggtggaaaaaacctttcatcagctttcgctttcctggggcgtttacccggtcatcgcaagataccagaacaccaccgatcagctttttgtccacgccgtggactgcgcaaaacaaatcgaccttgtggccgacggagacagggtcgtggtcgtggcgggaatccccctcgacacccccggcaacaccaacattctcaaggtcgagcttgtgggaaatcccttaagataattattcttccctgcaaaatcaaaactgccgacaagtaagccttgtcggcagttttttatctttttcttttttgagggacaggagtcagcctgacaaggagcggaacaagcttttttaaaagctcgccgtcctcgatgtcaagaataaaatgctccttggcaccgtcataaggaaatccgagagagcaatccttcataagttcggccgcctcgggcagctttttgacaaaaaccgtgttgtcgcacaccgtgaaaatcggtttatcttcaacataaaccatatattccccgaacatttttcggcagcgaacattatcaaattccgaaaggcgctcaagcacaaactccgcatattcgacggaggtagccattatctgtagaaccttgcgggtctctcgcggtattccataagcaggctgccgggagcgctttcgagggtcacgttatagctcatgagctcggcgcccgagagaatttcggttttggccttttcatagccgtagtagaaatccacctcatatttcttcttggggtcgagacccttaagaccgatcgcagccacgggatagggagaattgtctcttctgaaaacaaagacgcagcccttgttctcttcgggaacgttatactgataggagcaccatgaatagggatcgtagccgtcgttgatgagacggtagaaatctccgaggaaatactgacggagtcttctgacctcggcataggctttgcgaagctcggccttgtcgaaatcgggctttctgagatccatgtttatggtgagaccgccgttaaagccgctgcggacggtgtagggatcatagttgcaggtggcgcagacggtgaagggaacaaaacggttgagactcatatttatggtctgattgagcacggggtggcggagcatatctccgagaacatgataccaaaccgagctgtcggttctccaaagagaataggaacgggagcaaagctcaaggtcaagtctcgtgccgccgccgcagcagttgtccacgataaggccgggattgcgctcgcgaattccgtcccaaagcttgtagagaccttcaaccaccttgatttcaagcacgccctcgcggttttcctcctcgttggcgaaaacatcgccccagtgaataccgtcgtcggttctgaaaatgtcgacgccgtaggtcttgatgcactcgtcaagatagcgaatcatgtaatcaagagcctcgtcgctcgccatgttcagcgtaccgcccttgcggccgggctcgtgaagaatatattctgggtgctcgttggccatggtgcagttttcgggataaaactcgggagagaaccacagcatgaatttatagcccttttcgtgggcaatgtcgccgaggattttaacacccttcggataacgctcgtggtcgacattcttctcgatggggaaggtatagtttccctgacctgcggggaagccgcccacatgccaccatgcgtcgtgccaatacatctcggcgccggtatcgtccatgacgttctgaacccagtttatttcattttcgccgttggtggcgttttcgtcggggcagggagaggaaatgggcgggaacataatttttccgtcggtgtctctcggggcgacatagtttatgtaggctctgcggaaggcgttgtatccgtcctccggctcgccctcccagtatacatacataactctgggcatacgaagcttttcgccgggcttcatatagaaattgcagcgcttaagaccgcccttgaaggacattacgccctctttaatgtggaaataggccttccaaaagccgctccaaccgagcgcaaggcagactccgccgcccggccaatcggttataaaatagggagaataatactcgccgcaggaacagccggtgcattcaaagctttcgtcctctttaagggtcttgaactcctcgctcatttcctcgagagtggcgaatttgcagccctcgttgccgcgcataaggtgaattacggggcgatcctcatctcccatgacatatttcgggttttcaaggtgagccgacatgttgaccgatcccttgaagggaggcttgaaattgaggtcataggcgttaatatcggtaatttgcttggtgttttcgccggtggtgttttcgaaataaacagtaaaatccaccacgcggttgtcataaaagctgcccttcatttcaaccgcaaggccgttttcaagcacggtgcggcggaaaattttctgattgttttcctctcccgtgacggtctcctcgcactttgcgtcgtgaagggaaatttcctctccgtcatacttaaagctgaccggaatacccttggggaatgcggcggcatgggagtttttttccccgccttcggtttctctgccctcaagcatgctcaggcagtcgtcgttacaaatcattgccataaaaattttcctccgaaattacagggttccgaaaattctgtcgccggcgtcgccgagaccgggaacgatgtatgcgttttcgttaagcttttcgtcaacggcggcggtgaaaaggggaacgtcgggatgagcctcggtgaaggccttgagtccctcgggagccgcaatcatgcagacaaacttaatgctgtggggatgtctctgtttaatctgggtaacggcgtcgatagccgagccgccggtggcaagcatgggatcgaccacgataacgtcgcgctcgggcatatcctcgggcagcttgcagtaatattcaacgggcttgtgggtgtcgggatcgcggtaaagaccgatgtggccgacctttgcggcgggaagcagggtcatcataccgtcgaccataccgagacccgcgcggagaatgggcaccacgaccagctttcttccggcgacgacctttgcggtggtcttttgaatgggagtttcgatttcgatgtcctgaaggggcagatcgcgggtggcctcatagcaaagcagggtggcgatttccgacacgagggcgcggaattccttggagccggtatcctttttgcggataaaggtcattttgtgctgaataagaggatgattgacaacggttacgttttccataattgttctcctttatttgaattacatttttccttcttcgatgtcggcgatcatggcgactcttttggcgtgacgcccgccttcatactcggtgtcgacaaaaaggtcggcaagctcgactcccactccggggccgaccacgcggccgcccatgcaaaggatgttggcgtcgttatgaagtcttgtgtatttggcgctgaagtggtcggagcagacggcggcgcgtaacggaagaatacagctaccgggtagagagaacccagcccgattccggttccgcagacaagaattcccctgtcgcattttccgtcggcgacggcatgagccaccttgacggcaatttcgggataatcaaccttgtgaagctcggtgataccgaaatcctcaaccgcaaaaccgcgctcgacaaggtggtttttaatttcgttcttgagttcaaatccgccgtggtcacagccaatggcaattttcatactatcatttcctttcagaaataaatttattttgtgtttttcttaagatttctgacggcctggggaggtctcaaatatgacggcataagctctcccgcggaaagggtctcccctctttgcaccgcgaaaagcgccgcctttgccacgctcgaggcgcgctgaaatctgacctgctcgggagcaagaaatgccccctgcaaattgtccttcatggtattataacacatttcggctccgtctccaacaaaaaaaaccgattttttttcatttttcagttcactttgaagctcgtccaccgaaatcgccctgtcatcgcacagtcttttaagctttcccttttcaaattcaaaaagggcgttatagacctgattgcagcgggcgtccataacggggcagataattccctctgccgtttcaaggttatatgcaagaccctcgagggtggagaccccgacgcaggacttattttcggcaaaggccatacccttaacggccgaaatgccaattctcacccccgtaaaggaaccgggtcccttcgacacggcaaaagcatcgacgtccgaaaggctcatttcggtacatttgagggcgctttctatcatgggggcaagggttttcgaatgctgaagccccacatttgtgtaaaattcggaaattatcttttgcccgtcaaaaaaagcgcaggaggcggcgacggccgacgtgtccacggcaaaaatattcactctgtatccgctccttcgacaacaaatttgcgcacattgtccgcattcccgcgggaaatttcgatttttataaaatcctcgggcaacgcctcaactatattttcgctccattcaagagccaaaattccgcacccgagatagtcgtaaaatccgcaggaataaaggtcctcggcatcggaaattcggtacatatcaaagtgataaaccggcagaaccccgccctcgtattcgtgaaccacggcaaatgtgggagaggacacctcgcctttatatccgactcctctgcaaagacctctcacaaaggcggtttttcccatgcccattccgccgaaaaaggcgataacggcaggctgtttttgctttgcaaccttcaatgtgaaggtcaccaacaccggcaaggttcccggcaagaccgccgcctcggtttcggcggcagagagggttataaatttctttttcacaaaaaactccttaaatcattccgagcgcaaggcgcacggctcggcagctgccgaaaaacgcatttttttcattgtatcacattttatttttaaagtgaagtatttttacttgaatatattaagaaaatccactataatgaaaaaaaacacctttgaggttttaacatgataaaatttttcgaaagaattgccgattacattcgtgaaaccgacaaaattcttattctgctctgcacctgtgcaagtcttttcggcgctgttatggttctttcggccacatatataggcagcggttttcaaaaattcgccgtccagctcatcggctttgccctcggcctttttgtggccattctcatctccatgatcgactatcagatttttttaaagcgatggtattttttcgccgcattcgccgtgggacttgtgctgctgacctttcagttcggatttgcccccgagggcaccgacgacaaggcgtggcttcagctccccttcggacaaaccattcagccctccgagcttcttaaaatcgccttcatcatttccttcacaaaacacgtttcttccataagacccgagcgtataagcgattttaaaaacgttgcgctgctgtgcatccacggtcttttccccgtcgggctcatacatcttcagggcgacgacggcagcgctatggtgctcctttttatattcctcggaatgctttttgcggcgggtgttcgggcaatctactttgcggccgcaggcggaattgccgccgtttcgcttcccgttctttggtttttcgtcatgaacactgaccaaaagaaccgtattctcgcccttttcgacccggacaatttcaccgacataatttatcagcaataccgcggccaaaccgccatcggctcgggaggccttttcggatacggtctttttaacggcccctatgttcaggacggaaaaatccctctgggatttaacgatttcatttttgcctcggtgggagaggagctcggttttatcggctgccttctcgcaatcggccttataacggcgatttgcttcagaattctcaaggttgcgagaaaatcgagagacaaagcgggaaaaataatttgcaccggcgtttttgccatgtttgccggccagtttatcataaacatcggaatggttttgtccttcctgccggttatcggcgtcaccctcccctttttcagcgccggcggaacctccacggtatgtctttatctcggaatcggccttgtgctcagcgtatattgccaccgaaatataaaacccatcgttctcggcgaatgactttcttacattattatatttataactcaggcctccgaaatttttttcggaggttttttataccgtattgtttttatgtttttgttgtgatataatttaaataaggacgcaccgcacccgctaggcgggagtttatcggtgcaaaattttcggccaagggttagcaaaagctaaccacataaaggaaggatattcatggaagaaaactcaaagatactaaggcttcgcgtgctgctttgttttttgaaatccaacgccgaggactgcaccgtcacgggcatttcaagaaccctcggagaggaaaaatattcggtcagccgagccgtttcttcccttgaaaaggacggttacatcaaccgcgacgatgtgagaaatcccataatcaccgaaaaaggctatattgcggcgcaaaaatattccgaaagactggaaatcacgctcaatcatctcctttacgagggggtcgacatcgaaagcgccaagcgagacgccttttactgggcgctttactgtaccgacagcaccatggaggcaatcagggccacagaggaacgctaccgcgtcaaatacgagcttcgcgacagaaagcaattcggcgggagccttctttgcaaaaagcttgccgacggatgctattcctttccctttctcatctttcgcgagcacataaaaaacggcagcaatctttccatggcaaacgagggctttgaacaccc

SEQ ID NO: 824 - DNA, 6878 bp, Unknown
  16S sequences of unknown bacteria
cagcagacagcccacaaacataatgccgatgaggatcagcagacagggagaagtgaaccggcccaggagatgggtgagtttttccggggacaggctgacataaaacgccacagcgaagaagagaatggaatagatcagctggatcatggttttggaagtgtcgccggagaggaagggagtcacagccatttcaaaggaagtgctggcagtacgggggatagccagacaggggccgatggagaggtagatgagcagagtaaacaccttcgcaaagaccggatggactcgcccggcaagttcatcaaggctgccggcatgagcgacagcgataacaccaaggatggggaatccgatggcagtgatggcaaatcccagcatagccagaggggttttggtaccagccatggcgccgagatagggcgggaagatcagattgccggctccaaagaacatggaaaaaagggtaaggcctaccagcatccggttacgggtggacagtctgttcataaaaaacctcctatttgatttttgtataaagccaagtgtgctctattaaaaaacaatcatagcataatccacaaatatttgcaacttacctaagaactgttgctttatcgcttaaaattttagcgatgtaaagcgataattttatttaatttttacaaaaattcctctttacaaatgaaatcggcggtgctataatagcctctggaattcaggaaggagagaattaaattatggatctatttgagcagaagtttgttgaactgaactacaccgacaaccgtccctctcacaacggtgatgcagccaaggaatgtgagaagctgatccgtgctgaggagagcaagggttggcaggctggtcaggtgctgatccccctcaacgaaaccatgtgcgctggcggcgtactgggctgtcaggtgatgtttgaccgtgcacctgagatgccgatgatctgttcttttggtggtttttgattttctcgtacaataacaaaaacaaagggctttccgagcagtcggaaggccctttttgttatacatttataaaggtatcagaatcagagcatcttcttgtggcggaaatagaagaactctgccaccacaatggaaacgctcagcaggatcacaaagaggtagccatatttccactggaacatgagcatattagggaaattcatgccgaaccatccggcgatgagggtcagaggcatgaagatggtggtgacgatggtaaggaaagtcatgaccttgttctgctggacctcaatctgggattggtacagttcccggatctgcagcagatattccttgagcatctccacatggctgtgcagacggtcgcagcggctgacaaacagcttccaaccagccagttcccgttcgtccagctcctgaccgatggaggcctgcatctggtcgccgatattcatcatctgctcgtagaaggcacgcagggaggtcagttcccggcgataggcaatgactgtggcatagaaggaatccggaatccggcgcagcaggttctcctcgattttccccagcttgtcctccaggcgttccagatccagggcatcgtcctcaatgagcgattccagcagggtctgtatcagataggagagggtgcagcgtcccaaaggcgtcttttccagcgacttcataaagggcagcaggaagccgctgtcctcgatcaggatcaggcggtccttgtccagatagaagccgatctgcttttccgagagattgccggaggtgcgccgcggcacccggataattccctgggtacagtcactgaatgcctcgagcttgcaggcagagtgatgctgcagattgcggataaagccggttttatggggaatggttttttcgttggagaactcctccagggtcatcacacagacctgacggtcactgggggaagatttgtccatttcccgggcatcccggatctgatgcaggtctcctttttccagattgagcagatactgctgcatgattactgatccctcactttatttgtcggttcaaagcccctgatagtcaaaggccgggataaaactctccgccgctgtaccgccctcctggataaaggcattttccacacccagggagagggcatagcggatcagacggtcatattcatggcgggtaactttccggttgatctccgggaagtccgcgacctggggcaggggagtatactgattcatcagactcagccagacccggtcgccataggtttcatagacatattttaccacagctttggcgttttgaacatgaccgggcagcaaaagatgccggacaatgacgccggaggtcatcataccggagtcatcatggcgggcttcgggctgctgccggaccatctcagccagggctgcctgtgcaacctccggataatccgccgcccgggagtaccgctccgccgcctcggactgcatatatttgaaatcggtgaggtagatgtccacaattccctccaggctgcggagggtctccacgctctcatagccgccgcagttgtagacaatggggatggtaagcccctttgtccgggcgagggttaccgcctcgatgatctgcggggtatagtgggtgggggtgaccaggttgatgttggcagccttctgctgttgaagctccaggaagatctccgccaggcggtccactgagatgggtttgcccacctgggcccgggcgatggagtagttctggcagtagacgcagcgcagcggacagccgctgaaaaagacggcgccggaaccggtctctccggagatgcagggctcttcccagaggtgcagggcagcccgtgcggcatagattcctggctctgccacaccgcagtagccgggagtaccgccggaacggtcagcgtcgcattgccggggacagagccggcagccattggacagttgggtcataaggggattcctccgtataaaatccccggaccagaagcagtccggggagaatggatcaaacgatcagcgtttattttcggggagaggatagcttctatccggggtttatgcctttttgatcggatgccggatcacagtcttccatttttccggggcaacctttctggcatccgagagatagatctcatggtgcagccggtccatgctcagatcattggcatagccatgctctttcagataggcgtccatctgtgcaaccgtagccggttcgtcatcaaaggggcccagatgcatgatctgtacgcacagcccctcctcgatggtgagatactcggctgccgagcagtccagcttcttctttttggtggctgtttccaccgcccagtcaaagtccgctttggaaatgaaatcgggcagacggatcacagagatccagttgaagctggatttgtccgtataatcgacgccttccatgccgtcctgccaccagaagccttccagcggaggaacaacatattcgatgaatccttcgatcttgtggtcggtcttgtaactcattttcagggtataggcaatggcatacagaatgctgactgcctgctggtatgccccgtcctcttcattcgggtcgccctttccccggacagcgatatagttcgccctgggaacattcacgatttccggctttttcccgggcatgtagaattccttgtactctttcttgaaatcaaaagccataactacctctgaaaaccttatttttcacatgctgcatctgcgaacagttcccgggttattgctccgttctggtcatcagagccacgcattccacatgcgccgtgcgggggaacatatccactgcctgcaggcgacgggggatatagcccagctccctgaggatagcggcgtcccgggcaagggtggcactgttgcaggatacatacaccagccggtcagggttcatctcagcgatggtgtgcagcagatccgggctgcagcccttccggggcgggtcgatgatgaccacattgggccggatgccctcctttgccagggtctgggccgcctgagccgcgtcgccgcagaggaaccgcgcattctcgatgctgttcttccgggcgttctgggtggcgttttccactgcctcccggacaatctccacgccgatcacttctttgacctggtgggccaggctcagaccgatggtaccggcgccgcagtagagatccagcaggacatcgtccggggtcagctgggcaaactccccggcaatgcggtagagctgctcagcgccgtcgtggttgatctgatagaatgccatgggagagatgtcaaaccgcacgccgcacagggtatcggtgatatgatcctttccgtagatcagccggctctttttgccgaggatcacattggtgcgctcccggttgatgttgagcatgatgctggcaagttccgggaactgttcggtgatgtggttgacaaactggctgcagtgtggcagttccgagccgttgagaaccaggcagagcatcagttctcctgaaacagcaccctgccgcagatagacatggcgcaccagaccggttccggtttcctcatcatagacggggatatgataccggtccaggaactgttccacaaagcgcaggatctcgccgaataccggcggctgcagggcacagtcctcataggggatcacccggtgggaacggctggcaaagaatccgccccggacaccggtttcggtctgggtcaggggatactgggccttattgcggtagccgtccacagcaggggagggcagcagtggatgctcctccagctcaatgccgccgatccggcgcatattttcatagacaatgcggttcttcagccggcattcctcgtcataccggatatggcgcaggctgcatccgccgcactttttgtagaccgggcagtccggttcgatccgcatgggagagggggtgaggatctcctcaatgatgccatagcagagatttttctgcaccttgacgatccggacgctgagcttgtccccgacagcgctcatagggacaaagacagccatgccctcatggcgtccgactcccatggcttccgcagtcaggtcgacaatttccagggtaatgatgtcatttttgctcagcatggtttcactccgtttctcttggctcccgcagaggatctggcggggggccgggactcaatttgtatattgaaattataccataaatccggctgtacttccagtccgtccgcctctggaaaacgaaaaaaccgcctgaaaaggcggttttctggtatatttccccgggagggggatattactttgcgtccgaacgggtaccgaagaagacaacggcaatggtgccggggccggtatgacagccgactaccggaccgatggaactgtaccggatctcgccgaccttgtagttcttcttgatggtttccgccagctttttggcctcttccggcgcgccggcatgggtgatgtagatcacatccagattgtcggcgtcctccagatgccgggccagtgccgcatagacattgttcttgccccgcaccttttcctgggtgatcagcttgccttcgctgttcagatcaatgatcggcttgatgcccagcgcagtacccaccacggctccggcagcggaaaggcgtccgccccggtacagatggcccagatcgtccaccgagatccagtggcagacccggcgtttgttctcctccagccagtcccgggcgtcctcaatggaacagccggcttcccgcatctttactaccggttcgatcagagctgccacaccgcagcaggcacagagggtgtccaccacaaacagcttctgtccgggatagcgctcccgcagatcctccgccaccagctgggccgaggcacaggtgccgctcagccccgaagtgaaggcaatgtacagcacatccttgccctggcgcagcagagcctccagggcatcttcgatccggcccgggttgggctgggaagttcccactacggccttggtgttgcgcagggtggcatagagctcctccgcggtcagttcccgctcgtccggataggagaggtattcttttccgtcaatggaaaagctcagcgggataaatccgtctatatgcatcgcgtcatactgctcctgagtcagatcggcgctggaatccacaacaatggcaaatcgctccataagttctcctttcagcatttgaaatctatcctgattgtaacacatgttacagggcttttgcaaatcttttcgaccatatctttcaaatgcaaacagacttactcctgaaaatccttccgccagaccgcttcacagagcatggctgaaaggcatcccgcccccagagaggaccaggaggcctccagcagtccctcggacagggccagatagcgcagatactgttccccggcggcgagatacccatagagggcggacaggaacagacagaccactgccagcagaaggctgcccagcaggatcagacgggtataggcagtaagggaatagaagcgttcaaggaggaatttcatggacagaacccctttccggatcaaatcaatacttctatcatagcgggaagtccggtccgggaaaagaggggagatgccggaaggaaaactggaaacagacggcaggagtgctgacaggttttacagctgtaaaccgcagagcgaagccggtataatggagaggaaagagggaggtgcatcaatatgcagaataccagttccagacggctgactgtcgaagtgacccatatccccggaaccgggtggaacggattgcgggtttctgacccattggggggacaggaggcatgctgggaagatctgaccgaggacgaaaccagactgctgaaactggcagcggatatggaacatatccaggcaacctccgtatgttccatatctgctgaaactggc

SEQ ID NO: 825 - DNA, 2173 bp, Unknown
  16S sequences of unknown bacteria
cgggcaggaggggggcgggcagtgcccgctgcctcttccggccaatctttctgtgctgctcactctaccatgccccggggctctttccctgtcttttcatcttctccctggccggacctgcccgcaggcgctcgcctgctcgcttccttttggcaaaaaaaggaaggatcttcgttcctctatacactgtagattgaatcaatgccgtaccccgcctctgctcttgccctatcctagcttctttcttccgctcttctccgtcaaacaaaaaaagagcccgcaggctcttttccgatgctcgtatggacagccgccttatcccaggccgatcttggcggccaccagccccagcatcagcagcgccgcccattgaaataccgcgtccatcacgcgctccagccggcgctgcggctttttttccaacgccttcaatcgagcgtccagatcctccatgcgctgcgccatgccctcgatcacgctggtctgctgcgcggccaagcggcttaaagcatccagctgttcgccatggcttttcaggcgctgcctatcctccaaaaatgcctggtctatgtgctcgtgctttagttcgcaaatctctgtggaaaccgtctgcatgcgttttcctcccttcccctgccgtataaaacggcgttttcacgcccacactacgcataagacggctttgccgccaaacacgaaaggaggacgtttccatggccaaagacaccaaaaagctggatattctgccggacagcgcctatgtcctcggcgatctgagccccgaagagctcaaagatcgcgtggacaacgaaaagaacctgtctcattacaagacggaccggatcaccaacccggatacccggaaataaccggccagggccgggcgcttagcaaaacgctaagcgcctttttctttagcctcgcaataggctgtcgatgttgctttggctctgtctttcggtatttttgatggtgtttatcgtgccggataccccgctgcccgcctgggtgccggccgcctggctgtatgtcttgccgcgtttgccgccgcctctttttctgcgcgcggatgccgcggcgcgttccctttcagcctgctcggccgccgccttttgcagcaaaagattctgccgctccaggttgtaatccgcttccagctcggatagcgccgcctgccgctcgcgttccacctccatcaagcccagggtgtacgccgtttcggcctggctgacctggctctggttttgctgccttgccgcttcgcgctgggccgtcgcgtttctcagcgcgctgcggtaggtatcgtacgctgcgccctgccaatattcgctaagccccccgccatagccgcgctccgccttggcgccaaaggggttgcggtctatcagcatggtgcgccatgcgtccgccccggtgtccgtctgggcctgctctgcctgggcctctgcggcggcagccttgtccttggcctgctgcaaggccagctgcagctttatccgctttgcctgggcctcggcctcggcacggtttttctgcgcctgccactgcgcctccaggctggaaagcatttggtcatactgctgtgctgccattgttttgccccctttctatacgcccgtggtatccgcctgggccttgtacgcctttttcaacagcgccaggcgcgccttggcataagcgtccatctgcttttccatcgccttggccgtttgggcgttctgctcggccttatgctgcgctgccgatgccaggccgctgctttccgcagcctggatggcggtctcggccgcctgctcggtatcgcggacaaaggcacggtccgcgccaaaggtattgtaggccgctgtctgtgcatactgcgtctgctccgccgagcgctgggcctgcaagcccaaagggttttgcgacaacagcatgtcgtgataggcgctttccgcctgctgggccgcgcgctgggccgcatccagccgttgctgcgccgcccgctgctcaatttcgcgcgccagcgcggcatacagcctgtccatctccgtttgctgcgccaaaagggcggcttgggcggcctcatacgcctccgtctgccccttcaacgccgtttgatagctgttcattgcgcgcctccttacaataccttaaagatatagttggccacgatgtagggctgtaggttgtt

SEQ ID NO: 826 - DNA, 1564 bp, Unknown
  16S sequences of unknown bacteria
gcaaaagccttcttttgaaccactcgcctagcgagtggttttctttatacaaaaatcccggcacatttcccgtgccgggattttttctgtctgtttgtctgtcccgctatgcttcccggaacagatagtgccgctgacccgcggagtcagtcaccgcttcggaggtgacgccgaacacccggtcaatggcatgggaatcaaagactgccgctgccgtatcgtgggtaaggagagttccccgctccaccaggcagatctcgtcgcagacctccagcgcctgtccgagatcgtgcataacgcacagcacggtccttccctgtccacccagtccccggatcagccgcagcagttcaaactggtggttgatgtccaggtaggtggtgggctcgtccatgaggatcaccggggtgtcctgagccagcaccatggcaaggtataccttctgccgctcaccgccggacagggcgctgagtgccttctgccggagcgcttccaccccggcctgttccatggcacgctgtaccgcctgccggtcctcggaacggggtttccgggggaatcccagatagggaaaccgcccatgcatcaccagtgattccactgtaatagccggaacctcccggctctggggcaggacggcgatctgtcttgccagctccttgggggcgtagtcaccgagggggcgtccgtccaccagcacctcgccgctcatgggacggagcagccctgccgctgttttgagcagcgtggacttgccgcagccgttgcgcccgaggatgccggtgatcttccccggggagaaccgcaccgagaaatcccgcagcactgcctcgccgccatatccggctgtgatgtgacacagttcaatcaagcgattttctcccctttcggctcagcagaagatagatgaagaagggcccgcccaggaaggacataacgattcccaccggcagctcaaacggggcgaacagcacccgggcgatgatgtcgcagcccagtgtgaacgctccgcccagcagcacgcacagcggaatcagataccggttatcctgtcccaccagcatccgtccggcatggggaacaatgagccccacaaagccgatcaggccggaaaagctcacggcgctgcctgccagcagagcgacagtcaccagaaataccatgcggtagagtccggtgcgcagccccagggaggcggcagtttcctctcccaacgccaggacattcatgtcatagctgagcaccaccgataccgccacgccaaagaggatatatccggcggcaaaccgcacctgatccatggacacaccggagaagctgccgatgagaaaggccatgcggttcatctgggtatcagggacaaaggtgaggatggcatcggtgaaggcgctcaggaagctggacactgccacgccagagagcacgatggtcatccgggaagcgccggttttccgggcgattccatagacggcaaacacggcaaacagcgctcccaggaaggccgctgcgggcgtataccgcaccgcgcccgggaaaaaggccgccagagcgatggtaaacagcc

SEQ ID NO: 827 - DNA, 17969 bp, Unknown
  16S sequences of unknown bacteria
tcctccgagatctgcgccgcagcctgggggaaatgcctctgctggccactttccgcacagaccgggaaggcggctcgcatcctctgtccgccccacactatatcgcgctgaacgaagcagtgttctcttccggtcaggcagacctgatcgacgtggaacttttttccggcggagactgtgttccgcacctggtggctgccgcccacagcgccggcgtccgcgtagtgctctccaatcacgatttcgaaaaaacaccgcccaaagacgaactgatccgccgcctgtgccgcatgcaggaactgggcgcagatcttttgaaaatcgccgtcatgccccgctgccgcagcgacgtgctgctgctgctgcaggccacggaagagatgctttcccaacacgcccggaagcctcttatcacgatgagcatgggcgatctgggcatggtcacccggatctgcggcggttttttcggttctgccgtcacgttcggctctgccgcccaggcttctgccccgggtcagctgccttcagagcacctccgcacccttttgtccttgatgcactttccttcctgaacaccccgccgtgtcctccgctttgcgagaggatacggctttttttatgtttgcggcgcgcagcgccccaaccggccggcagctctatttgcctcgtgcaaaacagcaggcattttgagatttcccgtttgtgccccgtcaattttctattttttacaatgaattttcttttattttttccaatatcgtctcttttaacaagttttcgacattatccacatggttttccacagcttgtttttctcgattccctttcattccgttttggaacgcggtttctatcttgttctcgtctgtcctttgcaaacaaacagcgctgcgaattgccttcgcagcgctgtttgttgcttttgttcactccacgcccagcatatcgcacagggagagcacatagatctgtccggcgttcaccacgtcttcaatgtccacattttcattgtaagaatggatcccctcagtattggcgggaccgtactgaatggtgggaattccctgggcacggtatgcccgggcatcggaagaggcccactgataagcaggaatcacttccagcccccagaccgcctcggcgttcttcttcaccgtctgcacgatcaccgcgtcttcatcggtgtaattgccctcgctcttccagtgcagatcgtaggtgatgccctccacgccgcactcggcaatgatgctgtccagcatgtccacgatctcctggtgatccacgccgataggcaggcgcacatccaccgtggcctcgcagtaatcgggcaccatattgggccgggtgccgccggaaattaaccccacattcgccgacacatggcgaatcacttcgccgctgcccggctcgcccaccttctcctcagtggagcggatggagttttccagcgcatggcgctggctgtccttgaaatggccttcgatggtggtcaggcggggcagtttgtccagcacctttgccattttcaaaatagcgttatcgcccttgaagccgcccaggctcccgtgggccgacttgcccgcggccttgagcacgatgtgcagtccgcccttctggccaatctcaatgtcgttgctggacgtcggttcggcaatcaggcaggcatcagctttctcagcatagccgtgttcacacagccaggtagagccgtactcgccgccgctctcctcatcgctgaccagatgcagccggatgttgccccggagctccgcgccggactccttcaagatcttcatggcaaacagcagccctgccacgccggccttcatatccgacgtaccgcggcccaggatctgtttgtcggtcaccgtgccgcagaaaggatcgaagtcccactgactgcggtcaccggcaggtactacatccagatggccgttcaggattacgctgaagccctcgtcgcttcccagcttggccacaatacaggggaactccggattgtttccggtttcctcataggggatgccggccgctttgaggtaattctctacaaaatccaccaccgggcgctgggagccagtggggttttcactgggaatctgaatcagctctgacacgagctgcaccagctcgccgctcttttcctgcgccatttggtgcagctgttcacgtgtaggatgcgtcataaaacctatctccttttttgaaatctgtcttagccggttgcttgccggaacggctttcactgttggaaatgcacaaagccccccacccggcgcagccggcggcgtcagcgcaggccgcgcgaagcgggaagctctacagtgttttaatgatacagaaaacaggccacctgatggccgtcgccaatgtcctgcagggtcgggatttcccgggtgcagcgttcggtgcagttggggcagcggcccgccaggggacagccgacctgatcgccgatagggctgggaatctcgcccttaagcacaatgcgttcctttttctggaaaggggactccggcggaatcgccgagagcagcgccttcgtgtaaggatgcagcggattttcataaatctgggctgcccggcacagctccaccacacggcccaggtacatgatggcaatgcggtcgctgacgtgcttgatcacgcccaaatcgtgggaaatgaaaatgtaggtcagattgtgctgccgctgcagccggttgaacaggttgagcacctgggcctggatggacacatccagcgcagaaaccggctcgtcgcacacaatgattttaggcttgagcgccaatgcgcgggctacattgatccgctgacgctggccgccggaaaattcgtggggataacgattcatatgctggatgtcgagacccacttcgcgcatcagttccagcacgcgctcctggcgcgctttgggatcggtgataatattatgcaccttcagcggctctgcgatgatatcttcgcaggtattgcggggatccagcgaggaataggggtcctggaacaccatctgaatatcttttttcagcgctttcagctctgcgcctttcagctcaaaaatatttctgccctgatattccaccgtgccggcagtagccttgtgcagctggataatcgtgcggcccagcgtagacttgccgcagccggactcaccgatgatacccagcgtctctccttcgtacacatccagcgacacatcgctcaacgcatgcaggatttgaggcttggcgcccagtttacggcttttgatcttgaattccttggtcaggccgcgaatcttcatcagcggctcccggcgctcgatctgcgccgccgttgcttcactcatggtttgtgacgccctcccctctcactaatttcttttcgccattttgacgatggcaggccacaaaatggcccggttccacttccaccagaggcggcacggatttccggcattcttccgtcatataggggcagcggttgtaaaaattgcagcattgccccgtcaggcgcagatccggcggtgtgccgggaatggtgcgcaaatcttccttcgccttgtccgacaagcggggaatggaatccagcaatccccatgtatacggatgcaggggattcgaatataaggttttggtgtcggcgctctccaccgtgttgcccgcgtacatcaccatcaccttgtcgcacatttcccacaccacgcccaggttatgagtgatgagcagaatggatgtgttcatttccttctgcagatccttcaaaagatccagcacctgggcctgcacggttacatccaatgcggtggtcggctcgtcggccaggataaatttgggcttgcagcacacagccatggcgatgatcacgcgctggcacataccgccggaaagctcatagggataggattccatacgcttttccggctcaggaatgcccacacgattcaacgcatccaccgccatcttccgcgcttcggctttgctcaccttctggtgggcgcagatcatttccaccatctgcttgccgatcttgaacaccgggtccagcgaggtcatggggtcctggaaaatggtggcaatctccttgccacggaattccagcaactctttattgctcattttcaaaatatcccgatcttcaaacaggatctctccggccacaatacggcccgtctgcggcggcaggaggcggataatggagttggacgtgacgcttttaccgctgccggattcgcccacaatgcccagcacttcgccccgattcagagaaaagctgacgccgtccactgccttggccacaccgctggcggtataaaaataggtcttgagtccgctgactctcagcaatgtttcgctcatagaaacctccttagccttcatagcgcgccttcatctccgcgaaagctgcgcgaatgcgctgcagcagagccggatcctgaaggatatccaccgccgtcatcgccagggcgcaggcccccacggcaatggcccgatggccttccgggctgccggtagacgccagaaattccggcgaatgggcacgccccgggccaacccgcacataggactgcagtcctgggaacaaatgggtcaaattgcccatatccgtgcagccaatgcccatttctttgtcccgaggctttacggtttcgcccagcgccgtgaagttgtttgccaaaagctcctccagcacaggattgttgcggatgtcctcgtaggacagggcaatgggttcatattcaaaccgcgtatgggtcaactccgccagatggcggcagatctccaaaaagcggtccaccagttccagcttgtatttcatactgaaggaacgaatggtaaattccgccgaacagtgatccggaatatagatcgcctgatcgccgccgtcgcggatgataccaaggattttgccccggtcggcaatctccaggcgcagcgcattaagggtattaaacagttccagcaccggcgtcagcgcactgatgccttcttcaggccaagtggccgcatgcgacttctttccgtaaaaatggacacgcaaatcggttttggaataggaaatatcattgaccaccgtgtcgcaggaagaatgaagcagcatgcccacgtccacagcgtcaaaggcgccgtgctcggccataatgattttgccgccgccgccttcctctgcagggcagccaaatactgtcacctttccgcccagttcgtcaattacgctgcgcagcgccgcaccggcgcccacggaaatggcacacatgatattgtggccgcaggaatgccccatgccttccaccgcatcgaactcaccgaaaatggcgatattcgggccttccttgccggtatcatacacgcctttcacactggtttccagtccgccaatccctgtttccacggcaaagccgtatttttccagcagcgcactcatggacttgcaggcaaaatactctttgaaattgtattccggattattccacaaatcatcggacagccggctcagctccggcagaatctcatccacccggcggcggattctctcctgatatgtctccatgtccgcccccatcacttcttcatcttgggatccagcacatcgcgcacgccgtcgcccagcaggttaaagcccagcaccgtgattaaaatgaacaggccggaataagtagcaatatagggataattgttcagccagttcttgccggtctgcagaatactgccccaggacgccgtcggttcgctgatgcccaggcccaaaaagctcagggcagcctcggaaatgatcgcgccggcgatgcccagcgtggcataaacaatcagaggcgaaatggtgttgggcaaaatatgagtcagaagcattcgtgtattggatacgccgatgacccgtgccgcattacagtattcctcatttttgataatgtgcacttcgccgcgcacaacgcgggcaaaactgggcacgttgccgatgccaatggccaaaattacgttgaaaatgccgctgcccagcaccgtcatcagaatgatggccagcaggatataggggaacgccagcatgccgtccataatgcgcataatcacactgtccacaataccgccgaaatagccggcgatcagccccagaataataccgatgatgccggccaccaccgtgccgccaaaggccaccagcagcgacacacgcgcgccgtagagaatacgggaaagcaaatcacggcccacattatcggttccaagcagatgcccgtccacgccgggcttcagaaaagcgcccaccggattaacggcagtagggtcatacggcgccagcagcggggcaaacacggcgataaacaccatgacgcacacaataatcagaccgaccatggcggtcttgtttcttctcagtttgctccaggcgctgttggcccggcgttcgcggcgcagcagttcctcgttggaagcagcgcccagaagatcggatgcagtggtctgggctgcgttcttctttttcatcatttgcttcctccctcatagctgacacgcggattgatcaacatgtatgcaatatccaccagcagatttacaacgacgaacaccagtgcaaagaacagcaccacgccctggataagcatataatcacggttgttgatcgcgttgacgatcatagtacccatacccggccaggaaaaaatgctttcggtcagaatcgcgccggtgaagcagctggcaatctgcaggcccagcacagtaacgatgggcggcagcgcgtttttcagcgcatgcttccagattacgctgcgctcgctgatgcccctggcccgcagcgccttaatggagtcattgtgaatcacctccagcatgctggagcgtgtaatacgcgcaaaagtcgccattggtatggtcgccaaacaggtacagggcaggatcatatgcgagacaaagtcccacagtcccacgtccagcgatccgcggcccaaagcaggcagcagcccccactgcacggagaactggttcaccagcatcatgcccagccagaaaatgggcatggacacgcccaccagggccagcaccatgaatacgtaatccatcacggaatactggtgcagtgcagaaaacattccaatggccacgccgagaatcagcgcaatcaccaacgccgttacagtaatctgcagagtgctgggaatgcgctcggcgatcaaatccagtaccggctgattatacatataagaagtgccgaaatcaccatgcagcacgttaccgatataatcgataaactgtgtcagcttcggctgatccaggcccagtttaatttccatggcctgaatgtccgccgcagacgcctggggacccaggatcgtcgccgcggggttgcccggaatcatacgagtcagtacaaacgtgaaagtcaccacgataaagagtgtgggaatacactggagcactcgcttcaaaatggtttttaacaactcaatctcaccgccatttttataatcacacaagcctctctcctgccaggcagagacgggatgctctggggttcaccgccgatcacagcggcggcgccgccaggcctggtggcgcggcgcacaggccatgccatcaggtccggcggcgctttcgaataaacgatccgaaaacaccgttttcagacagccccgggggcgcgctgcgcgcgctcccggggacataaataagtccgtgctgttccgaacagcgaatcagtccgttacagaagtgttgcgggtaatggtttcgccgtcgtcggaagtaatgaagaacagctggccgtccgctctgggcacgaagtcctgcacacggtcattgatgccagtcaactcataggggttggcatagtagataccggtgtagtcctgcatgatctgcttcatggcattgctgtagtgggctttgcgctcttcctgatcggtggtctgtcttgctgcggccagctcctgctccacatactcgttcacatagccggcgccattgccgatggccgtggtctccgtggaggagaacagcttatccaggaagaagtaaggatcgggataccagctccagctcatagcatacacatcggaattgccggagcagacggtatcggagaaggtgccccactcattgacgctgatattggccttcacaccgatctgctgccaatacgactgcagcatggtagccagcgtcttgcgctcttcggagttggaaacgttgatggtgatctcaaagccgtcgccgtaaccggcctgttccagcagagccttggcgtcctcaggatcatagctgggaaccatggattccagggacgcatcatatccccaggagccatagggcaagggcaggtaagcagcttccacttcgtcatactgatacagagccgtgcggacagcgtccagatccaccgcttcaatcagagccttgcggaccaggggatcggccgtggggcccttctgggcattgaagcggacataattgatcttcagcgcttccgtcttcagcagttcaatgccattgccggcattctgcacggtattgattgcttcgccggagagctgcgtggccagatcgaccgcgccagtctgcagggcattggccgcctggttggggtcggagatgaacttgaagaccagcttctgcagtgcaggagcgcccagccagtaatcggggttggccgacaggacagcctgctcgtccagttcgaacttatccatgcagaacgcaccggtgccgctcagatgatagccgaagtcttcgccccagccctccacttcttccttggccacaatggagttgcccgcatcggtcagcgccgtcaggaaggaagcatccggattcttcagggtgcaggtgacttcccagtcgccggtcacttccgccttgtccagcatggccagacggttgttgtccgaatgctgggcactgcggttcagggagtaggccacgtcttcagccgtcatttcacggcccttggcatactcagtgttctggaagtgcacgccctgacgaatctggaacacgtaggtcacgccgtcatcggaaatcgtccagctggtggccagagaaggcgcatactccgtcagcgtgtcgttgtacgccaccagacgatcgcagacctggttgatgatctggccctcatagctgccgctgtagtgaatggggtcaagcttgctgggagaagatgccagcgacacagtcagagtgccgctttcaccgccggcgctctcgttggtgctgccgctgtcgccgttgccgccgcagccggccagcagtccgaccgccatcacacaggcgagggacagtgcgagaatctttttcatcgttcatttctctcctattctttataatttgggttttatatgcaatggtgttcccgcagccagcggaatgcgctttcggcatagaccgccgccatcatcgggatcgcatcctcattgaatgtgacccggggatcgtgaacgccataagcatatccttgttccgtgctgccggttccaaaccagaacagcgcgctggggactttttgagaaaaaacagagaaatcctccgatccggtcatacgttcgatgtgataggtcgtacccgcgcccagcatatcgtcgatatacccgccgatctcttcggccagagcattgtcgttcaccatgggcgggataccgccgccgatgaaatcgatgtcgcaggtggcacggaaggtgctgcacacaccctcgcagatctcacgcatgcgctggcgggcaaattccttcacctgcaaatccatggtgcggatcgtccctttgagcacagcctctccgggcatcacattggccgccgagccggcgtgcagcgaacacacagtcagcacaatcatctgattgggattgatttcgcggctgttgatctcctgcagggccagtatgatatgcgccgccgcgttgatcgggtcgatattctcatggggcgcggcaccgtggccgccttttccatgaatggtcactgtgaacacatcgctggaaccgcaggcatgccccggcgtgtagccggcagtgcccagaggcgcatgcaccacatggagcgccagcgccgcatccacatggggcttttccaaaatcccggcgttgtatacgtctgccgcaccgtccatcgtttcctcggcaggctggaagagcagttttaccgtgccttccagctcgtcttcccactctttgagcaccttggcagcgcccagcaggctggtagtgtggaaatcgtggccgcaggcgtgcatacagccgttttgcgaggcaaatggcagccccgtttcctcagccatgggcagcgcgtccatatcgccgcgcagcagcagcgttttcccaccgccgcggcccacggtgcaggtaatgcctgcacggcccaccgtctgcggttcatagccgaattctttcagcttttccaacacaaaggctctggtctggggcagatcaaagctcagctccgggcattgatgcagatagcggcggtaacccaccagctcatctttcaattccagcatccgcgcatacgttttatgttccattgaaatcccgttcccgctttcctgggtcgtcctccacgggcgcacacatttcaagggcaatgtcgtccgcagaactgttataaaaatacatttttatttataatacgaccagtttatatcattgtaattttacattcagcataataatacaaattccacttttttgcaagacgtatcctgtctgaaatgcaaaacagttccataaaaattattatcaattctcacaaattttcccaccccccttttcccccataaaaaccggcgcgctccaccgggccgcagcagcggccggcagagcgcgttcttatgccttctatgcaggtttacgcctcttcgcccttcaatccgaagagatagtagcgatcatggctctccttttgggcaaactgcatccatgctttaaactctccctcgggatagtgctccatgtcacggtatttgcagtcctccgccaatgtagccagggacgtgcggaggatgcagccgttttcgatcactttgccttcacggccctcctcgtggaacttatcgggaagctgggaaggatcaagcacaattacggtctctccatcctcctcaattcccaccacagccacatagtgcccgccgtgggaaaacaggcccacatggctgtcttccggccggtcgccggtcacattggccacagccatgccgccgcgtttgagatgttcccgcagcagctcaggatcatcggtggccaccagatccagatcaaaccgctcggctacataaggagccagcagatccatgtccgtgcccgggctgtgattggctcccactgccagagacagctccaggcagtcgatcagggaaaattcccggccggtcaggttcgtcaccaccatagaagccgaacacaggccacagccggcgctgcgcaccgtactgtccgcccgcatcagctcaggaagatctgtcagcgtgggataagccacatgggggtaattggtttgattcagataatagtacataaacaccattccttcccgtcgttttcaagcccggtacagcgtataactgccccgaccgccatcctccacaaatgtggagtaaaattctttcatcgcccgggccagataaagcgtatcctgcacacccgcagtttccaccgccgagtgcatcgccaactgcggcaggcccacatctaccatattcagcgacacctgtgcgttggagagattgcccagcgtgctgccgcccaaaatatccgaatgattatggaacgtctgaacgggcacgccggcgcggctgcagatggcgcggaacagcgctgcggatacagagtccgtgccgtatttctgattggcgctgaatttaagcacgatgccctgattcatatgcggatggttcgtagggtcagccagagacaggtggttgggatgcaccgcatgagcgttatccgccgacaccataaagcccgaagccagcgcgcgcagataatcctcatggctgcggcccagggcctcattcacgcgcagcagcgtatccagcagcacggtgcccgccgcgccctgtttggtgccgctgcccacttcttcattgtcaaacaccgcgtatacagaaatcgtattgggatggccgccggccaaaaagccctgcagattggcaaacgtgcactgcaggtcgtccagcttgggcgaagaaagatattccccgttggccccccagacgacgccgcggccccggcagtacaaaaagagatctgttccaaggatatcctctttgtccacccccgccgcaccggccacaatgtccagaaacgtccccgccgcgcgctcgtcgcccagcagcgggagcatatctttttggacgctgtatttgtagccgtcattgacggagcggttcatatggatcgcaaggctcgggagcatcagcaaatcccggtccacattcaccagcctggattccaccccttcgccccggcgcaccacaattttgcctgccacagacaacgggcgatcgaaccagggcgcgcagagcattccgccgtatttctccacgttcagctccgtataggcgccatccacgacaatgtccatgttttccttgatcttgaaggtgggcgagtcgctgtgggaagcagcaatctggaatcccctgatttctccctcaggaattttgaaggccagcagggaggacagattgcgccggataaaatagcgcccgccgcgctgcaggcgccacagcgccccttcgctcagttccagaaagcccgtatcgcacagcgtctgtgccagattttccactgcgtggtagcagctggggcttttctggataaaatccaacagttcgttggaaagtttcatgctttcttccatcattgcatcgctcctgttcctttgcttgccgtcaagccaaaaattcgcacaaaatccgcaccgccagcgtacggggcagcaggacgctcagcccggtttcgtcctcaatggctcgtttcatggccacagagtaccccatgcaatccgtgcagagaaaggccagctcccggcccttgaaggcctttgccgcttccacgaccctatcaaaggcgccgtagggcgaagcgcaggcgatttccacatccacaccgctcttcccccagaactgatagccctgagcaatttgttcttccatcggtaccagcacgcccaccttgtgtccgtcggccagcttctgcaccgcagcgtggaacaggggctgcggctccagaaacagcttcttgtggcgaaacttcgggaacacacccgtgcagaacagaatcgtagcatccgccccttcggcctctgcctggtcgattttctgctgcaccagaggcgtaacgaaacgctcggcaaattgggcctgccgaccgtcccgcatccgggacaccagcacttcatccccctctgccggagcaaagcgcgcttcgatctcctccagtgtgaagtcgtccagcgcgccgtactcccgcagcgtcacgtgctgcgggagcaagggcagaatatccgcggtgatatccacccggggcgcctggccgatggtaatggccgccaggattttttctttcacagccttacttgcctttgccgaaagtctggaactggttcatggtaccgtacagttcaatcaggtggtcgaattccttctggtcgtagaaagacagtttgccctcgccgtaatctttggccacttccacggcaaagcgggccgcagtttccacatccatggcgtggctggcaccggtagcgcagcctgccacgggctgggtggtggtaatcgccacgcccaccaccggcgcgttggtggcggtcgccggctgcaggatgctgttcaggtggtgcaggtcattgccatagggcgtgatgtcctgctgagcgcaggggaaaatagccggcagctggccggtaacgcgggtcatgacatccatcaggtcgttgctgacttccaggatatagccttccttgatggtgttggaaatggcaatgccgttgagattgatcacccgattgcccttggtggtatcaatggacaaaatggcatccatgccctcatccacatccatgcggttgcacagctccatatcgataggggaatccatgaagggcacagggaaatgctcctgggtaggcgcatcggggcagatatgggtggacaggatcacgtcaccctccagcacatcgccgtttttatgcatctgcgccaacttcagtgccgcagccatagctgccagagcgccatcaccgtcagaggtgaaacccaccacttcagggcgcgcgcccaggccgcccaagcggccgataatacccaaagtcggcaccgtgccgccggcgtgctttccgttgcggccatagatccacactttgatgcagtccgtagacccctggtcgccggtgacggtctgtaccttcacttcgtccgcgcctgcttccagcagcatttttttcacggtttcaccgctggcctgaggcgtatccagcacttcaaaaagatccaaaacttgtttgagcagcatgtttgatttcctcctgttatgctcccccatttgggggcggcaaattctaataaacgtgttcagtttatcccaatcgcctcgcttcgtcaagagaggccttgcaaaaagtcccctctttccggattcacaataccattgcccccggcggccagtgctgtattctgctcagaaacaggcgtgaagcaggcccggtcccatgaagggatcgggcctgcttccggttttcctgctgcaatcaatgaatcacgccgcaaaagccgcagcatttcagtcaaatgcttccaaccccagctgctgccgaatggtatcccgcagtgccgtcatctccgtgtcgttccaaaagaacttcagcttctgctctgccacagtatcaccttccggctcgcctcccaaaacaaaaaccgcaaaggtatcggcgatgtcttcatggaaatagttggctccgtaccggctgacataatgagtggggttcacctcataatcgctgacagcagaatcgcccagatccttccaaaacgtctgataaaatgcatagcggaacgatccctccacgaaactggccggatcgtgggtgctatctcccttcgtcagatccacctgtgtttcatcttccagcaaaacatggccatattcgtggagaatcgtataggtcagcttgctccaatcccggcgggcgccgttttcatcgtatacatcatagtaatcaatgctgatgcagaagcgggagttatccgtaacgccattttcctccacgggcgacgtataagccagaatattactgtatccgtcgctgaacaaagtgaactgtgtaattttttgacgggcctccaacggcaggatcgtgcataaatactcccacacagccctgtcctttggatcggcaatctgcacctgcccgcctttgacctggtaagaactcagcacattggtgatacccacagagtagttgctcacagtaaccagcgcaccctgttcatcggtagaaagggtaatgtatttgctgtaaaccggatccgcccagctgctgcgtccctgctcttccgaggcaggcgcgccatacatcgcctcaatggccgcacgcacctgtgcctgtgtataaccagtttcctccggccgcagttcaatccgttcgagaaatccgttgcgatactgataataggtatggatgggggtctcctcatcgaaccaccgcattgcataacgatacgtatcatacacatcggtccagccttctcccttgacctcatgtgtatccacccattcgccggccgcaccgatatacgcttcagtatctgagcgggaacttccaaagtaaatcacattttgccgtgtctgacgataggtataattctgtccctgttcccgcgccagcgcccggtaggacggcgtatctgcagaaaggatttcctttaccgcagcccccgcgcgctctgccgttctggcaatggcatagggattgagctgttccaccgtatctgcggcagagtgataaaggtatccccggccattttgcatcagcagcaccgagggcacgccggccaactgcaaagaagcgtggtcgctggctgtttccctcccgcggcgcagcgcagaatcctgctgctgcagcaagtcgctgacccaattggcctctccatccattgtgcacaccagcgcgtcctccgttccgagaccgcccagcatatcaaactgaatattccccaccatccgatctttttctgcctgtgtgagagaggaagtatagaagcgggagccgtatttcccgttttcctcatcggtaaaactaataaagcgcacttccgtatccgttggaatatcctgcagcaactccgctacatacaacagagccgctacgcccgatgcattgtcgttcgcaccataggccgtaggcacactgtcatggtgggcagagagcaccagaatgtccgcattgggtaacggcgcagctttcacggccaccacattggttccctttctgccctgtccatcttcataagactgcagggtaacctcataacccatttcggtaaagcgttttttcaaatattgaactgccccgttctccccctgtgaaccaaccgggcgatgcactgcagtaagggcgtgcaaatccgcatggatcccagaaacgtccggcagctcggcagcacgtttcagcatcgtcagcgcttccgccaccgtaacaggatcctccggcgcaatcagatccgcactttttccacggacaatctccgtctgtacgcaccaaagcatgggacaaacagcccaagatgcgatttcctgccgatcctggtatttacccagattttggccgactacagccggcaaacccgcctggcggtatagaatagcagcaagttcctgacgcataaccgttcgatccgggtcatagtatccatcgcccacaccggttacatacccctgctttgccgcccaggccacagcgtccgcctctgcatccgacacatcggaaaacggacactctgcagatacttcaggctgtcctgccgcctcatacatcagacgtgccgccattcctcgggttacataggcatccggcgcatctaaaaaagttttatcaattgaggcctgctgcgcccaaatcagcgcatcgtttccccacgcaggccaaaccgccgcccctgcactgactgtcagcaagatagctcccaataaaaagataaaaatacgcttcataaaatcccccttactgctttatcgcacacagactgattgcactgcggaatatttagaacttagcacaaaattacatcatagtcgcatcaccggaagcagcaaaacaaaaaacttctccaaaagcagaggctctagggaagtggcaacaccctgtccccccggctaacatccctctcatttacatacattcattgacacgttggtgaaatccgctaaaggaatcgacgctgctaactggttactaacaaatagaaaataacgaaaaataagaaaatcccgctatcccttgcgggacagtgggattttttggagctgctgaccagatttgaactggtgacctcatccttaccaaggatgcgctctaccgactgagctacagcagcatatggcgaccgagaaggggctcgaaccctcgacctccagcgtgacaggctggcgttctaaccaactgaactactcggccgtacgcatcaagcggtgattattataacataactgaacaagtttgtccagtattatttcctggcaggggcagaaggacttgaaccctcggcacgcggttttggagaccgctgctctaccaactgagctatacccctatgtggtgggccttcggggactcgaacccaggaccaaccggttatgagccggccgctctaaccaactgagctaaaggcccatgaccatctggctaatcaaaaaaagaaaaggtgccgccacctttgtggcggcaccactggcgcctcttgttggactcgaaccaacgactgtctcttatacacatctccga

SEQ ID NO: 828 - DNA, 22979 bp, Unknown
  16S sequences of unknown bacteria
ccgctgtaccggctcgcgctcgagctcgtggcccgctacctcgagcaggcgcggcccaagctcatgggaaagagccgcaccgatgccctgttcgtgtcggtccggggcagggccatgtcggcggactcgctgcgcaaggcgttcaagaagcgcgccgcgcaggcagggctcgacccggcgctccatccgcacgacctgcggcatgcctttgccaccgacctggtggaaggcggggccgacctgcgcagcgtgcaggagatgctcgggcacgcgagcctgtcgaccacccagatctacacgcacctctcgctcgagcacatgaaagacgtctacatgcgggcacatccccgctcgtgaaaaatcgaaaagtccacaattgttggctccccaaaagcgtgacggtatgctatagttttgaactcgcgtggcatagctatgcgttgagttaggtaaaacacggcaaaggccgtttgtaagcaaggagttcgattatgtccaaggtatgtgaagtctgcggcaagcacccgtctgcaggtaagaacgtcagccattcccatctgaagaccaaccgcgtcttccgccccaacatccagaaggtcaccatcaaggaggccaacggcagggtgcgcaaggcaaacgtctgcacgagctgcctgaaggccggcaaggtcactcgcgcataaaggctcacctgccgcgtttcttaattcaagcataaaatgcactgttcagaaggcccgtcggggccttctgtgttttagactgtagacaaggcagtttctacgattggagtcagtcatgaaagatccattcgatcaggcttccaaggtattcgagaaaagcgtcaacgtcgcgtccgagatgttcgacaagagcatggacgtcgcttccaaggtgttcgacaaaagcatggacgccgcgtccgaggcgtttgacaagagcaaaagcgccacgtccggctttgcagactccgctgccgattttgccaagcgcggcaagatcagggcgcagctcgccgatgtgagcctcgagtacgaccgcctcatgaagcagctcggcacggcggtctacgagcgcgtcaaggacgacccgcagtacgccgatgcgcaccccgacctgttcgcggaaatcgccaaggtcgtccagcgcaggcaggacctcgaagaccagctgtccgaaagccaggcggcagacgatgcggccaagcccatcgacgtgacgccggtcgagcccgaggcgacggatgctcccgcgcccacggcacaagagaaggcggaggacgccgagtaatgcgctatcaggcaccaaaaggcacgcaagacctcctgcccgcccaggcacgcacgtgggcggcgtttcgccgcagggcgcaggaggtcttctccctctacggctacgagcccatcgagacccccgtgttcgagctctccgagctgttcacgcgctcggcaggggagagctccgacatcgcgagcaaagagatcttctcggtccgctcgatcggagcgctccagaagatggcggaaggcgagccgctcaaggcggaccagaagctggcgctgcgcccggagggcacggcgagcgtcgtgcgcgccatcgcgcagcacaacctcgtgccgcagggcggggcgccggccaagctgttctatgctggctccatgttccgctgcgaacgcccccagaagggtcgtttgcgcgagtttcaccaggtaggcgtcgagtgcctcggcgcgaccgacgcggcggcagacgccgagatgatcatcatgtgcatgcgcttcttcgagtcgctcggcctgaagcgcgagtccatgacgctgctcatcaactcgatgggcgacgagaactgccgtcccgcctacacggagcgcgtccgctcgtacctcaaagagcacgaagacagcctgtgcgaggactgcaggcgccgcatcgacgacaacccgctgcgcgcgttcgactgcaagaacgagtcgtgccgtaaggtggtcgatggcgccccgcgcttctccgacaacctgtgcgacgcgtgccgcgagcgcttcgaggccgtcaagggctaccttgacgccgctggcatcggctacaccgtcgacccgcgtctcgtgcgcggcttcgactactacacgggcaccgtgttcgaggtccaggtcaaagacggcctgggctcgcaaaacgccatcggcggcggtggccactacgacaagctcatgggcgagatttccggcaaggacctctcgggcctcggctttgccgtcggcttcgagcgcgtcatgctcgcactcgaggcggcgggcatcgagctcgacccgggtgcgccgcgcggcgtctacgtcgtgtgcgtcgacgagtcggtccgcccgacggccttctccctcatgcaacagatgcgcgacgccggcatcccagccgacggcgacacgcagggcaggtccgtcaagtcgcagttcaaggtggccggaaagggcaatgcgcgcgcgtgcgtcgtcgtcggccccgacgagctttcctcgggcaatgtcaccgtccgcgacatggacacgcacgacgagcagctcgtcgcgaccggagagctcgtcgaaaaaattcgagcgctctactagagacaaatccgtctcgtggtagcaatataggcaaggtctgtttataggatggcccgtcacagtctatggcgggccattatgaagaaggagggcatacagtgcctcaagattttctgaacgagtactgcatccacacggcgacgtgcggcgagctgcgcaaagacgacgtcgcgcgcgaggtcgtgctcacgggctggtcgtggcacaagcgcgaccacggcggactcatcttcgtcgacctgcgcgaccgcgagggctacacgcaggtggtcgtcgacccggactgcgtcacgcccgaggagttctcccaggccgagcacttcggccgcgaggacgtgctcaagatttccggcaaggtgcgcgagcgcggacccgagagcgtcaaccccaacatggagacgggcgagatcgaggtcctggcgagcagcatcgaggtgctgaacaagtccgtcacccctccgttctccatcgaagacggcatcgagaccgatgagaccacgcgcatgaaatggcgctacctcgacctgcgccgccccgagatgtacaagaacatcctgctgcgccaccaggtcgcgcaggcaatgcgcgccgccctcaacaagcgcggcttcctcgaggtcgaaacgccgatcctcgccaactccacgcccgagggcgcgcgtgacttcctcgtgccgtcccgcccgaaccccggcaacttctacgcgctgccgcaaagcccgcagcagttcaagcagatgctcatgtgcgccggcatcgagcgctactaccagatcgcccgctgcttccgcgacgaggacctgcgcgccgaccgccagcccgagttcacccaggtcgacgtcgagatgagcttcgtcgaaagcgacgaggtcatcgacatgatggaagacgtcatgaaagaggtcctcgaggccgtcggcgtcgagcacgagttcccgctgcagcgcatgcagtggaaagaggccatggaccgctttggctgcgaccgcccggacgtgcgcttcggcatggagctcgtcgacatcaccgaggccgtcaagggctgcaacttcaaggtcttcaccggtgccatcgagcgcggcggcgtcgtcaagtgcatcaacgccaagggcgctggcgactggagccgcggcgacatcgagaagctcgccgacgtggctgccgccaacggcgcgaagggcatggcctggattgcctacacgagcgacggcaaggagaagagcccgatcatcaagttcctgggcgacgaggtccacgaggccatcaagcaggccgccggcgccgagccgggcgacctcatcttgttcgccgccgacgactacgccacggtcagcgccgtgctgtccgcgctgcgtctgcacatggcagacctgctcggcatcgagcgttcgggccatgcgcttctgtgggtcgtcaacttccccatgttcaagtacgacgaggaggaaaagaagtacgccgccgagcaccatccgttcacgatgccgcgccgcgaggacctcgacaagatcgagaccgacccgctcaacatcggcagctactcctacgacctcgtcatggacggcttcgaggccggcggcggcacgatccgtatccacaacgccgagctgcagcgccgcgtgctgcgcaggtgcggcctgaccgacgaggagatcgaccagaagttcggtcatctcatcaaggcacttgagcacggcgcaccgccccatggcggcatcgcgctcggcctcgaccgcgtcgtcatgctgctcgccggcaaggattccatccgcgacgtcatcgcgttccccaagacctcctcgggtgccgacccgatgaccggcgcgccctccgaggtcacgcgtcgccagctcaaagaggtctctttgagcctcgacctgtaagcatcggctgtcccaagcggccggcgagccttgtctgaaaaaggagcgccggtcgctttatcacgttaaggattcaccatgaccattctcaagatgagcagcacctatgcgcccacgctgaaggaagacccggcgggagccacaggctcctgctccgctccggcatgatccgccagaacggctcgggcacctacacgtttctgcccctcggcatgcgcgtgctcaacaagatccagcagatcatccgcgaggagatgaacgccaagggcgcccaggaaatcctcatgcccatcctgcagcccgccgagctctggcacgagtcgggccgctgggacgactacggtcccgagatgatgcgcctcaccgaccgccacgaccgcgagatctgcctcgggccgacgcacgaggagctcatcaccgacctcgtccgcaacgagctgcgcagctacaagcagctcccgtgcaccctgtggcagatgcaggtcaagttccgcgacgagatgcgcccgcgcttcggcctgttccgcacgcgcgagttcatcatgaaagacgcctacagcttcaacgcgacgcgcgagagcctcgacgagagctaccgcgacatggaggtcgcgtacgcgcgcgtcaacgagcgtctgggcatcgactaccgcatggtcacggccgattcgggcgagatcggcggcaacgagtccatcgagttcatggcgcttgccgacgccggcgagtccgacctggtctactgcgactgcggattcgcggccgataccgaggctgccgagtgcggcgtcgtcatggcgcccgcgcaggagcgcgcgctcgagaagatcgccactccgggtgtgcacaccatcgaagagctcgcgacgttcctcgacgtgccggaaaacgcgacggtcaaggcgctttcgggcaagggcgccgatggcaaggtctacgtcatgttcatcccgggtgaccacgagctcaacgacatcaaggccggcaaggccgttgcgggctggcagctgctcacggacgacgagatggtcgcggcgggcctgcacaagggctccatgggaccggtcgacctgcccgagggcgtcggctgcgtgtgcgactcctcgctcaaggacgtgcacgcctgggcagtcggcgcgaacgaggacggcttccacttcctgggcgccgagcccggccgcgacttcgagcccacgctgtgggcggacctcgtcatggccaggccgggcgacctgtgccctgtgtgcggcaagaagctcaagggcgcgcgcggcatcgaggtctcgcaggtcttcaagctgggcaccaagtactccgaggccatgggcgccaccttcatggacgaagacggcaaggagaagcccttcatcatgggatgctacggcatcggcgtcacgcgctcgatggcggccgtcaccgagcagcgcaacgacgacaacggcatgttctggccggtcagcatcgcccccgcagaggtcatcgtcgttccgctcagcgtgggcgacgagctcgtcgacccgctggcgcgtgacatcgccgccaagctcgacgcggcgggcatcgaggtcatgctcgacgaccgcgacgagcgcgccggcgtcaagttcgcagacgccgacctcatcggctggccgtaccaggtcgtcatcggcaagcgcggcgcaaagaacggtgtcgtcgagctcaaggaccgcagcacgggagagaagcgcgaggtctccgtcgaggacatcgtcgccgaagtcgtgcgcgttgtggcagatgccaaatccgcactcgaggcaaagaccaccgatatcgcctaggcgcatgccgtctcgttcgcgttcgagaggcagttgagtctgttgggaagcgtcgcgtgtgcggcgcttcccgtctgcagtgccgaaaagccggcgcgatcggacgtcggcagtctcgataagaaggggaatctaagcacgcatgctgttcaatctcgtgatagtgggctgcggcggtttcatcggcgccgcgctgcgctacttcttgagctggctttccaacatcatcgccttcgacttcacgggtgcgcccgcgtttctgttcccgctgggaaccttcgcggcaaacctgctcggctgctttttcatggggtacttcgcgttcatgctcccgcacgcctttcccggccacgcgaagacgctgctgttcgtcacgacgggcatcatgggcggcttcacgacgttttccacgttcgcgctcgacacctacaacctcttctcgcgtggggagtgcctcatggcaggcgtctacctcgtggtcacgctcgcggtgtgcttcgcggggctcgttgcgggcatcgcgctcgcaaaggcgacatctgcgtaaataatcgctcacagacgcgcaatatgctgtatcatatcgatttgctgtgcgacccgtcatcgcactcggtctcaaatatgcgcctgcaataggtgcaggcgagtaatttgaaggagaagttttggtagttatccgtctggcacgtcatggtgcccacaatgccccgttttaccgcatcgttgttgccgaccagcgcaagcgtcgcgatggccgcatcatcgagcaggttggcacctacgatcctaagtgcgatccctctgcgattaccctcgacctcgagaaggtcgaagagtggatcaagaagggcgctcagccttccgatcgcgttgccaagatcatcgccgaggtaaaaggcgagcctcttccgaagaagattcaggcacgcgccgacctcaaggccgccgagaaggcagctgccgagaaggccgccgctgagaaggctgcagctgaggctgccgcaaaggccgctgaggaagccgccgaggaagaataagcatgacgcaggctcaagaagatgtagtggggctcgtccgcacgctcgtcgagcagctcgtcgacacccccgaatccgtcgaggtcactgggcgcgagtctgacaacggcgacctctacgtcgaaatcgacgtcgaggaagacgaagtcggaaaggtgatcggccgccagggccgcatcatcaagtccatccgcacgcttgcccgcgcggcggcgtcgcaagacgggttccgcgtcgaggtcgagctcgccgaataggcgcaaccgacgtgtcgcatctttcttacgaacttgttgcccgcatctccaagatgcggggtctgacaggggaggtcacggcaacatgtgcccgtgaccttcccttctgcttgcatgaggggctcgacgtcttcgtcgtgccccctttgctgtatgggccgcgccgcctgaccgtctcgtcggtgcgccgccttgacgactccaacgtcgcgctcgggttcgagcaggtgcccgacgcggacgccgcatccgagctttccgggcactggctgctcgccgccgaagacgacctcgagttcgaggagtctttcgacgagcagtgggcgcttggcttcgaggtggtcgacgagcgctatggaagcctcggcaccgtctccgagatcatccagacgcctgcaaacgacgtgtggtcctcgtccccgtcatcgacgagacgatcgtctcgctgccggagacagacgacgagcccatcaccaccaagatcatggacgggctgatcgacgcatgaggatcgagacgctctccgttttccccgacatgttcgaagggcccatgtcgctttccatcatcgggcgcgcgcgcaagaagggcatcctcgacttcgaggcatacgacctgcgcgattggacccacgacaggcaccgcagcaccgacgacgagccctatggcggcggccagggcctgctcatgacctgcccgcccgtcttcgaggcactcgacgagctgtgctcggaaggccctaagcccacggtcatcttcttcacgccgaccggcgagcccttctcccagaagctcgcgcaggagctctcgcaccacgagcgcctgctcatggtgtgcggcaggtacgagggcttcgacgagcgcgtcatgacgctcgcggaccgctgcatcagcctgggagactacgtcctcacgggcggcgagcttcccgccatggtcgtggcagacgccgtgacgcggcttttgcccggtgcgctcggagacgagaacagcgcggtcgaggaatccttctcagactccgggctgctggagttcccgcagtacacgcgcccggcgagctaccggggcctcgacgtccccgaggtgctcttgtccggaaaccacgctgccgtcggggcctggcgtcgcaaggcggccatcgagaagaccgcgcggctgcgtcccgacctgatcgactccgccgacctgacagacgacgagcgcgccttcgcccgcgatattgctgcagatagccacgcgcgaagcaccggcgacgcgctatcatagtcaaattacgttatcgccgactagcgaggaacagattgccagatatcgagaacacagatgaacgcctttcgagcacgagcggctcttcggtcttcaagaccctcatcgagctcatcgtcatcgttgcggtcgccctgggcctcgcgtatctggtcacgcactacgtcgcgcagccgtacgagatcccgtccggctcgatggaagacaccatccagatcaacgaccgcgtgctctccgagaagctgacgtactacaccgcaagccccaagcaaggcgatatcgtcacgttcatcgacaccgagaacccgacccggaccctcatcaagcgcgtcatcgccaccggcggccagaccgtcgacctgcgcgggggcgtcgtgtacgtgaacggcatcgcgctccaggagccgtatacggagggtaagccgagctacgagctcgacgggaacttcacctacccctataccgtcccggaaggttatatctgggtgatgggggacaaccgcacgaattccagcgacagccgccacttcggggcggttcccgtttcgaatgtcaccggccacgcgttcatgcgctactggccgttgaacagcattgggttactagagtaggcacgaaagaggcagataggatagataatgctgacgtttcaagacattattctcaccctgcaagactactgggccaaacagggctgcgtgatcttgcaaccatacgactctgaggtcggcgcgggcacctaccacaccgcgactgcccttcggtccctgggcccgagcgactggcgcactgcctacgtccagccgtgccgccgtcccgccgacggccgctacggcgcgaaccccaaccgcatgcagcactactaccagttccaggtcatcatgaaaccgtccccggacaacatccaggagctctacctggagtcgctgcgcaccatcggcatcgagcccgagaagcacgacatccgcttcgttgaggacgactgggagagcccgacgctcggcgcgtggggccttggctgggaagtctggctcaacggcatggaggtcactcagttcacgtacttccagcaggtcggcggcatcgagtgcgacccggtgcccgcagaggtcacctacggcctcgagcgcctcgccatgtacatccagggcgtcgactcggtctacgacctcgtctggtccgagtctcccgacgggtccaagttcacctacggcgacgtcttctacgaaaacgagcgcgagcagagcgcctacaacttcgagttcgccgacaccgacatgctcttcaagcgcttcgacgcgtgcgagcgcgagtgcaacaggctcatcgggctcggcttgccgctgcccgcctacgactgcgtcatgaagtgcagccacgcgttcaacctgctcgacgcccgcggcgccatctcggcgacggagcgccagcactacatcctgcgcgtgcgtaccgtcaccaaggcatgctgcgagtcctatctggagcacgtcgtggagaagggcggagcctacatcgagtcgcaggacggcccgcgtcccgcagacgatacgtgtgacgagaagggggtctcccatgaataggcagaagctcatcttcgagatcggcacggaggagatcccgtccggcccgctctacgacgccacgaaaaagctcgtctcccagaccgaagccgcccttgacgaggcgcgcatcgcccatggcggcgtgaagacctgctcgaccccgcgccgcatcatcatcgcggtcgaagacgtcgccgacacgaccgaggcgctcacgcagcgctcgaaggggccggcagcaaagatcgccttcgatgcggacggcaacccgacgaaggccgagggctttgcccgtggcaagggcctgacggccgccgacctcatccgcgagaccgacgagaagggcgtcgagtacgtctacgccatcgtcgagaagcccgcagtgccgacgctcgagctgcttcccgacatcctggccggcctcatcgccggcatcgcatggccgcgctcccagcgctggggccgagggcacgtcacgttctcgcgtccgatcaggtggcttctcgcgctgctcggcgagacggtcgtccccgtcgagtacgccggcctcacggctgggcgcacgacgcgcgggcacaggctcatggccaatcgcgagttcgagattgccagcgccgagaccttcttcgacgcgttcaaggacatgaaggtcgtcccctccgccaagaagcgcgcagagatcatccgcagccagatcaacgccgtcgagtccgagaccggcctcaaggccgacacccccaagaagaccttcgacgaggtcgtgaacctcgtcgagtacccgaccgtgctcgtcggccacttcgacgagcgcttcttggacgtcccgcccgagatcatcaccgacgccatgctcgagcatcagcgctacttcccgatgtaccagcccgatggcacgctcgacaacgcgttcatcatcgtgagcaacggcgacccgcagtactccgacacgatttgcgagggcaacgagcgcgtcgtccgcgcccgtctggacgatgccgcgttcttcgtggcagaagacctccgcaagccgctcgaggcatacgtcgacgggctcgattccgtcgtcttccaggaaaagctcggcaccgtgcgcgacaagaccatgcgcatcgtcgagaacgccaaggctatctgcctcgacgcgaggatcgacggccagcagcgcgaggatgcgctgcgctgcgcgtacctgtgcaaggccgacctcatcacgagcgccgtcgttgagttcaccgtgctgcagggcatcatgggcggccactacgccaaggcggcgggggagacctccgacgtcgcgctcggcattaccgaccactaccgtccgcgcttcgcgggcgacgagctgccccgcaatctcgcgggcaaggtcaccgcgctcgccgataagatggacaccatctgcggcatcttcgcgatcggccagggcccgacgggctcttccgacccgttcgcgctgcgccgtgccgccatcggcatcatcaacatcctgctctccggcgtcgaggtctcgctcgagaccctcatcaaggccgcgctcgataactacaaaaacgtcgtcgagttcgactacgccgaagtgcacaagacggtgcgcgacttcttcgtcacgcgcctcgaggtcatcgcacgcgacaaggggcttgcgcccgactgcatctccgcggtgacgtcggtcggcatgttcgagcccgtcgagacgatcgcccgcatcgaggcgctcgtccaggcgcgcacgaacgagcccgagaccttcgacaacctggcaaccgcctacacgcgcgcggcaaacctcggcgatcccgcgctcggctgcgacgtcgacgagtcgcttctgggcgatgcagagcgcgcgctgctcgacgcggtcaagaacgcttctgccgaggtcgcgtccgcacttgctgccaacaaccacgccggcgccgtcgaggccctggcggcgctgcgcgagcccatcgacacgttcttcaacgacgtgttggtcatggacaaggacgaggcgctcaagaacaaccgcctgcgcctgctcaaccagttcgtctccgtcttcggcaacgtcgcggatatcggaaagctcgccaagaaataggagtgaccatgatgcagcagccaccgtttccgaccatacacatcatcagcgattcggtgggcaccacggccaagaccgtcgcacgttcggcagcaagccattttggggaactcgaccccaacttcgtcgtgctgccctatgtgcgctcgttcgaccagatacgcgcgttcctggaaaaggagcaggagtcgcaccgcaagctctacggcgacgacaaggtgctcgtcttctacacgctggttctcgaagacctgaaagaccagctcgacgcctaccttgcagagcatcccaacatctacgccaccgatgtgctgtcggattcgatcgcgaccgtcgagcgtatgagcggcaggcctcacaaccccaacccgggcgagcagcacaaggtcaacgagcgctacttcgagcgcatcgaggcgatcgagttcaccgtcagccacgacgacggcctgctcacgcgcgacctgcccaaggcggacatcgtcatcttgggcgtctcgcgcacgagcaagacgccgacgtccatctacctcggacagcagggctacaaggtcgccaacgtgcccatcgtcgacggcatcccgctgcccgacgagatctaccaggttgagcgcgagaggctcttcggcctgatcaccgacccctctgtgctcgtcggcgtgcgcaggacgcgcatgcacacccagctggggcgtgcgtcgaggtacgccgacatcgactccgtcacccgggagctcgaccgtgcgcgcaccatcatgcgcgggctcggctgcgtcatcatcaacacgagggaccgggccatcgaggagacggcgcaggagatcttgcgccactacaacgccgcgttctcgcgtatcccttccctttagctgccgtttcgtccctcctcggagggtcgcaggccataggcgattcaaataacctataatgacgaacattggattcggaggctcgattcccgtgccgcaccgcttccactacgagaagaaagaaaggacaggcaagatggatcgtgacaaggcatatgttctctggttcgacgagctccgccgcgaagatgtcgagatcgtgggcgggaagtcctcgtctctgggggagatgacctcaaagaccgatgtacccgtgccctatggcttcgcgaccacggcatacgcgtatcgtcagttcatggaacgaacgggtctggacaagaagatccgcgatgagctcaagaagctcaccgacgtcgaggactccgcgctgctgcgcgaggtgaccgacaacatccgcgctatgatcgtcgcagaggaaatgcccgaagatatcgtcgaggatatcaagaacgcctacgccgagctcggcaagaagatgaaggtggacgaccccttcgtcgccgtgcgctcttccgccaccgcagaagacctcccggatgccagctttgccggccagcaggacacctacctcaacgtccatggccccgagatggtcgtgcagaagatcaaggagtgctacgcctccaccttcaccgaccgtgccacctactaccgtgagaagacgggcttcgaccatctgtccatcgcgctttcggcgacggtccagatgatggtcttctccaaggccgccggcgtcatgttctcgctcgacgtcaccaacggcaacgacaaggtcgtcaccatcgaaggctcctacggcctgggcgaaatggtcgtgcagggcgccgtcacccccgacaacttcgtggtcgacaaggccacgggcgagatcacgcgccgcatcatctccgacaagcacatcaagatgatccgcaagcccgaaggcgacgtcgaagaggtcgaggtccccgccgacgagcgtaaaaagcaggccatcaccgacgagcagatcaaggagctcgcgggctacgcgaagcagctcgagaagcactatggctgctacatggacatggagtggggcatcgacgagcgcgacaacaaggtctggctgctccaggcacgccccgagacggtctggtcccgcaagaagaacgagaaggctgccgccgacgaggcagaagaggccgtgaccgaggacctcgacgtcatcgtctccggtctgcccgcatccccgggcctggtcgccggcaaggcgcatgtcatcaccgatccagcccgcatcgacgagttcaaggacggcgagatcctggtcacgaccatgacggcccccgactgggtccccgccatgcagaaggcgctggccatcgtcaccgacgccggcggaatgacctgccacgccgctatcgtcagccgcgagatgggcatcccctgcatcgtcggcacggcgagccgctcggccgaggcgacctcgctcatcgaaaacggccaggagatcaccgtcgacgcctccaacggcacggtgtacgccggcattgtcaagagcatggtctccgagcccgaggctcccgaggcggctgcagtcgccgctgctccggcatacacggttccggcaacgggcaccaagatctacatgaacctcggcaaccccgacctcgccgagaagcacggcaagctcccgtgcgacggcgtcggccttatgcgcgaggagttcatctggaccaccttcatccacgagcatcccctgcacctcatcgagaccggccgcgccgacgaggcggtcgacaagctcgccgagggcatgcgcaaggtcgcgagcgcgctcgccccgcgtcaggtcgtgctgcgcctttccgacttcaagtccagcgagtaccgcgggcttgtcggcggcgagaagtacgagcccgaagagcccagcgcgttgctcggctggcgtggcgcgtcgcgttactacgaccccaagtacctgcccgccttcaagctcgagctcgaggcaatcaagagggttcgcaacgagtacggcttcaagaacctgcaggtcatgattccgttctgccgcacggtcaaagaggccgaggtcgtgacgggcatcatggccgaagagggcctggtgcgcagcccagacttcaagatctggctcatggccgagatcccgagcaacatcatcctggcagaccagttcaacaagttcgtcgacggctactccatcggcagcaacgacctggccatgctcatcttgggcctcgaccgtgacaacgacatcatccaaagcgtcgccgatggccgcgacctctccgtcaagcgtgcgatccgccacctcatcgaagtcgcccataaggacggcaagaccgtctccatctgcggtcagctcccgagcatctatccggagttctgcgagttcctcatcaagagcggcatcgactccatctcggtcaaccccgatgcggtcgtccacaccaagcaggtcgccgcgcagatcgagcacaagatgattctcgacagcctcaccggacgcggtaggcaggagggcgaggacctgacctggtaggccacctcagtccagcggttagacgaaggggcgcagctcgagtccgagttgcgccccttcttgcgccccgagacggcaacgccccgccgcatgcgccccgccgcttggtacttttgtgcaaaataacgcaatgattaggcatgttttcgcatctgtcatacaatatccgaatgtcaattatgtgagccagtaaggagctagcacatggctgaaaccattcccggcgggctgtccgtcgcaaatgacgttattgccgacatggctggatatgccgcgttggagagctacggtgtcgttggtatggccgccccgaccctttcggacggcatcgccaagctcctgcccgcttcccgcctgcgtcgcggcatcaaagtcgagatgaccgacaagggcgttcaccttgacctctacatcatcgtggaacacggcaccaacctcaccgaggtgagccgcatgctcgccgagaaggtggcgttcgtgctcgaggattccgccaagctgcccgtcgacggagtcgagattcacgtgcagggcgtcaaggtccgcaactagatagacaagccaacagtaggggatttaccacatgaacatccgcgatctgcgcgttcacatcgcaaccgctgcgtctgctctcgacgctcgcaaagaagagatcaaccgcctgaacgtctttcccgtcccagacggtgatacgggcacgaacatgtccctcaccttggcttcggtggcaaaagaggttgccgccctccccgaagacgccgatggcgcggcgctgcgcaaggcggtcacccacggctcgctgatgggcgcacgcggcaactcgggcgtcatcaccagccagatcctgcgtggtctgtgcgagggcctcgccgacgcaaagcagttcgatgcggccactattgcccacgcgctcgacaaggcggtcgaggtcgcgttccaggcggtgcgcaagccggtcaagggcacgatactcacggtcctcgaggactctgccgctgctgcggaaaaggcggcggaagaaggcctggatgtcaacgacgcgctcaaggccatctccgatgaggcgctcgcatccgtcaagcgcacgcccgactttctgccggtcttgaaggagaacggcgtcgtcgactcaggcgggttcggcctcaccatcctcatccagagcttcgtgtcctccgtgacgggaagcggtgtggaaatcgcgtcctctgccgatttcaccaaagcagaggcaaaagtcgccatcgagcaggtccgtgactgggcgggctcgaagtacatgtactgcaccgagttcctgttccacagcgataccgtcgacacgggcgccgcgctcgagttcctcgcgtccctcggcgactgcgagctgctcgtcggcagccatcccgacttcaaggtccacgtgcacaccgacacgccgggcgtcgtcttgaactacatgaccgaccgcgggcaggtgtccgaggtcttcatccacaacatggtcatcgagtccgaggaccgcgcggcgggcattgccgcagacgaggcggcagaggaaaagttcgagcacaagaggctcgcgttcgtcgccgtcgccgccggctccggcatggcgagcatcctgaagtcgctcggcgtcgactacgtcgtctccggcggccagaccatgaacccctccacggcagacctgctcgcagctatcgagaaggtcaacgccgattcggtcatcttgctgcccaacaacaagaacatcatcatggcgtcgaatgccgccgccgaaaacgcggacattcccgtcggcgtcgtgcccacgaccaacgtccccgcgtcgttttccgcgatgttcgccgtcgaccagagcgcgtcgatggaagagaacgtcgaggcgatgaccgaggcgctcgaagacgtccactgcggcgaggtcacgacggcggtcaaggactccaagacctccaagggcgagcccatcaagcccgacgacatcatcggcatcgccgacggctccctcgacgcggtcggctcgaccgtcgaggaggtcacgctcgagctcatcgacgagctcaacgacgacctggacacgctcacgctccttgccggcgaggatttcgacgacgaggcacttgaggcgctctccgcgcagatcgaggagaaataccccgacctcgaggtcgacgcccagcgtggcgagcagccgctgtaccccatcgtgttctctatcgaatagaaggtgcgcggactgtggctctgaatgagagaatcgcgctcgtcacagacagcgcttgcgatgcatccgatgccgagctcgcggagctcggtatcgagtgcgtccacctcaaggtgaccatgcccgacggatcgatgtttcccgaggacaatacggacgcgaacaagggcgtcttctacgatttcatcgccgattgcgacgagctgccccacacgtcgatgccctcgccggccgatttcggcgagctgtactcgcgtcttgccctcgagggctacacgcacgttatctccatgcacatcgcctctgcccagtcgggcacctgcaacgcggcacggctcgcctcgcagtcgtctccgctcgagattgcggtcatcgacacctgctgcaacacgatcggccagttcctgttcgtccgccgcatcgcccagctgcgcgacaagggctacacgttcgcgcagctcgtcgacacggcccacaagcttgtcggcaagacgagcgtcgtgttcatgctcgataccctcagatgcctggtcaagggcggccgtacgggtagggccgtcggcctggccgcgtcgctgctcaacatcaagccgatgctcaccgtcgaagccgatggcgaggtgaacatgtggggcaaggtgcgttcgcccaagaaggccatcccgaagctcgtcgacaaggcgcgcgagctgaccgaggcgttcgggccgatcgaggcatgcctcgtgcacgtccgcgaccttgccgacgtcaccgcgctcaagcacgccctggaagaaagcgggcttcccgtcaccattaccggcttgatgcagacgggtcctgttatcacgacccacgtgtgcgtcggatgtttcgggtttgcctatatcccgatggaagcctagatgccgccgcgcgcggattgtgacaagctgctcgacgagccggtcgtgcgcgttcgcgccgtcagcgcgaaccgcgcgaagctgctgtccaagatgggcatcgagtccgtgcgcgacctgctcacctgctttcccaaccgctatatcgacctgactgcggtctacccgatcgccgctgctcccctggggcagaccgtcacggtcatcgggacggtcgacgaggtcacgcgcaaacagccccgcccacgcctggacattctcgaggtcgggctcgtcgacgagacgggcgtcatgctcggcgtctggttcaggcagccgtggatggccagtcgcttcgagaagggaatgcgcgtcgcgctgtcgggcaaggtaacgttcgattacggcttcaagcgcatgaactcgcctttcgtcgaggtgctcggccccagtggggagagggaaaacgtcggcctgataccggtccaccccgcgaccgaggggctgtcgagcacgtggatgcggcgcttcatcgccaacgcactcgagcagtgcgccgactgccacgatccgctgcccgcctccctgcgtgctgcccgtggcctcgtcaaccgcaagtgcgccttgcgcgacatccactttcccacgaccgcacaggcgcgtgagcaggcgcgccgccgcctcgcctacgaggaggccctcaggcttcagctcgtcatgctcgcccgccgcgcctccgagaccgcaggcgccaagccgttcatgcagcgggcaggcgcctatgcgcgcgcgctcgacgagcatctgcccttcacgctcaccgacgagcagcgtgccgcgattcgggacatcgcgcaggacatggccgcggattgctgcatgaaccgcatgctgctgggcgatgtcggcacaggcaagacggcggtcgcggcatttgccctggcaatcgccgctgatgcgggacatcagggcgcgatgatggcgccaaccgaggtgctcgcgcgccagtacgccgcaaagctgggcccgcttttcgacgcatgtggcatgagctggggaatcctcacgggctcgaccgtcgctgcagagcgcgccgagcttctcgatgcgctttcgcacggcagcgtcgatgtcgtcttcggaacgcatgccctgattgaacccgacgtggtcttctccgacctgagcctcgtgattatcgacgagcagcatcgcttcggcgtcaggcagcgcgcggcactgcgcgagaagggcccggggtcggacctgctcgtcatgacggcaacgcctatcccgcgctcgcttgcgctcacgctctacggcgacctttccacgagctatatcagaacgcgccctgtgagccgcccggagacgacgacgcaggtcgtgagccgcgatgcgcgcggcgtcgcctacgatgcgattcgcgcggcgctcgcgcagggcaggcaggcctacatcatctgcccgcttgtgggtttaagccgcgagcagcgggcgcgccgctccgagaacggcgagatgcagctgtctttgtcggggagaggcgacatctccgatccgaaggcggccgaggaagaggcgcagttcctcgcacgcaaggtgtttccgcagtatacggtcgggctgctcaccgggcacatgggcgcgacggagaagcgcatggtcatggacgcgttccacgaccgcgagatcgacgtgctcgtcgcgacgacggtcgtcgaggtgggcgtcgacgtccccaacgcgacggtcatgatggtcgaagacgccgagcgcttcggactgtcgcagctccaccagctcagagggcgcgtcggcaggggagagcaccaagggcaggtgttcctcgtggcagatccgggcaaagacgacacggatacccaggcccgcatggacgcgctcgtgtccaccaacgacggcttcgcgctcgccgaggccgacctcaaggcgcgccgggagggagacgtgctcggcagcagacaacatggggcagagacgctcaagctcgtgaacgtcgtggacgatgcggagctcatcgcgctcgcgcacgacgacgcgctgcgcatcttggcagacgacccggcgctttcccacgacgagcacacagcgcttgcacgcgagctcgagacggtgttttccagatacgacgattcggcttcggaaggggcataggcatgagagtggtagcaggagagttcgggggaagggtcatcgactccccaagcgagaagacgacgcgtccgacgaccgaccgcgtgcgcgaatcgatgttttcgtctatctactcgcgtctggctgacctgagcgggacccgcgttctcgatgcctttgccggcagcggggcgctgggcatcgaggcgctgtcgcgcggggcgcagcgcgccgtattcttcgagcgcgatgcgaacgctcgcaaggtgctggagggcaatctctcatcgctcggcctcaggcccccgcgcgccacggtggcgggacgcgacgtcgtctccgatgccgccgcgggctccgtgcttctcggcggggccccgtacggcctcgtgctcatggacccgccgtacgcgctcgagccctccgaggtgcacgcgttcgtgcgagacctgctctccggaggcgcgctcgccccaggtgccgttatcgtctacgagcacgcgatcgccaacagacaatcggctgccgacgcttttggcgcagacgcggcgttcgaggtcaccggccagaagaaatatggcaaaatcggcgtcacgtacgtgaagtgcctcggcgcatgagcgtcgggcacagtcaggagaaaggcacgagaaacaccatgcgcaaggtgctgatcccaggaacgttcgatcccatcacgtatgggcacctcgacgtcatcaagcgctcctcgcagctgttcgaccaggtcgtggtcggcgtcgctgcatcggagaacaagggcaaaggcccgctgttcacgctcgaagagcgtgttgagctcgcccgcgaggcgacccgcgggctccccaacgtggaaatccggcagttctccacgctgctcgtgagcttcgcgaaagaaatcggggcgacggcaatcgtcaaggggctgcgcgcgacgaccgatttcgagtacgagttccagatggccatgctcaactatcatctcgattcttcgctcgagacgctgttcgtcatgtcctcgccggactacatgtacgtctcgtcgtccattgccaaggaggtcgcctcgtttggcggcaaggtcgacaatatggttcccgcgcacgtcgaggaggcactgcgcagaaagtttcacattcgttgatttgacaggtggattggtccattcggcgtcttggggttcgtatataatgggctaatctgtacccatttacaggtatctgaagcgacacgttcgcaacttgagaagggaaggcggtagatcgtgagaccgttgtacatcatggatacgaccttgcgagatgctcatcagtccttgtgggcgacccgtatggagaccggggacatgctcccgattctgtccaagatggacaaggtcggctactggtccttggaagtctggggcggagcgacgtttgacacgtgccttcgcttcctcgacgagaacccgtgggagcgcctgcgcatcatcaagcagcactgcccgcatacccctctgcagatgctgacccgaggccagaacctcgtcgggtaccaccattactccaaagacatcgtcgaccacttcatcaaggcctccaagcgcaacggcatcgacgtcttccgcgtcttcgacgcgctcaacgacattcgcaacgtcaaggacagcgccgaggcgatcaacgagtgcggcggccacttcgagggcgccatctcctacaccttgagccccgtgcacacgctcgacagctacgtcgagtacgcgctgcagctcaaggagctcggtgccaagacgattgccgtcaaggacatggccggcatgctcacgccgtaccgcaccgagcgtctcgtcaaggccctcaac

SEQ ID NO: 829 - DNA, 2332 bp, Unknown
  16S sequences of unknown bacteria
ggacacagaacctgtacacctacacctccaacaacccagtgaactatatagacccaacggggcactattatgaacaggtattggggggaataggagaagcattggactggatgtttggagtggtaggcgctaaaacgaatttcagagagaatatgagtaccaaagggaaagaactggatgaaaaatatgatacacatgaaacaccggaagaaatggtagagttggcacagaaacagaggaagattaggaagtcgaagaagagcggcgtattcggagcgggatacaatgaacataaagcaaacctcatgatggaattgatgataacattggcagctgatgaggagggaaggaacatagaacacggagcgtttgtatatcagagggaagatggattgtactatatttccaatgtgctggaagacaaaatgttgaacgtttctgaagaagcatttttgaaagaagcaaaaaatctaggcctattagaaggtggaggaacggtagagttatcgtttggacatacccactcactatcagatgggaaggtagctgaccatccatattggagttactatccaaaagaagaggcagatgatgctatagcattttattatggttctgatacagatgccaaaactgtctacgaagggagtatggggcaaggaaggatgaagataaaaaattatgtcatatattcacctcataaaataggggatggatgggacgtggaacgatggccaaaagttccgacatggaagtagaggaagatagagatgaggggaaaaggactaaaaaaatggggatggataggcatagcgatatgcctattccttcccgcatcagggtatgcaaagaacgatgccgaaaactatagttcaacgaaatttaatagatatccaatggagacaatacttacacagccagaaaaaatagaaaatgaattggtaccgataaaaggttatgcaaagtttgaaaaagatggggttatcttatattacacaaaacaggattaccaatatgatacaaaagagaatgcggtttggttaccggaaagaaaggaattaagtatagaagaatattttcaagatgcatcgatatacagggatataagcgggtgtgttgatggagcattttaccacatttcaggagttattcaacaaaaaaatcaagaacttccctatgcggcagtggcattgtattacatagataacgatgatgggaataagataaattccatgccggaaacaatggagagatacaacagagacaatgaaagtcaaaaagcagaggaagtatcaatttataggcttttagctgatccatggaggtatgatgggaaaaaagtaagtacagaggtttgtcatttccaagagttagagatgtgccccaaccatgaaaacacattttctctaatgatatttacaccagatatatatggggatgaggtggattgggaatctgcgtggcgagatatgacaaatcgatatagcgatcaggaattgcttagaggtctgcctttggaaaaaaaacaattttttgtggaatgtgcagcatacaatgtgcaggctcgctttcagatagaaatgatgttttatatgcatggggttagtcaatatgaaaagtgccctacaatgacacaatatacgtattggccgtttaagatagaggttcataagaaggatattgaaagatatgaacaggaaatggagcgcctctatgagtggtataaagaaagagggttattagacaagtgaataagcggatatcaatatggtgtattttggtcgtatttagcctatgctttttagtgattggatgtaaacaagtttccgagggcgaacggatctccctgatagcaattatcacaaagccggaagagtatgatggagtgagggcaacggtacggggcatattgagagcagaagaagagggcatagcgctgtatgtgtttgcggaggatgcggagtacgaatcgcatatctcggcgctgtggctggggaagtacgaggagataaagacgttaaccaaagaacagctgcaagcaatgaacggaaagtacgtaggcgtaacaggcagcatcgcagcgacgaaatatgggccaacaggggattacaactgcgaaatgacaaacatagagaacgtagcagaggtggaggaagttaacccgctgccaagcgaaagtccgggggaatgagaaaagggcacaaggatgtgccctttttcttttgtagtttggtagaatgaagatgaaaaggtgatacgctgacgcagacgcaaaaaggcctgggcacggcggacagcgtggcaaactgggtcaacgaagagctgtatacgt

SEQ ID NO: 830 - DNA, 1646 bp, Unknown
  16S sequences of unknown bacteria
gtaaaacccttctcgaacacgcgcggcaggtctgccgcacacacgccgcagccgttgtccgcgacggtaagctcgatgcgctcgcttgccaggccctcgtccagcaacgcacccgaaaacgtgatcttcgcaccatcctcacgcgcatatttaatgctgttctggatgagctggcccaagataaactcgagccacttctcgtcggtaaacacctcaaagtcgaggttctcgcacaccggggccacgtgcgccgcgatgagttcgcgcgcgttggccttaatcgcgcccgtcaccaaggtcttaagatcccagcggcgaatcaggtagtcgcgctccacgacttccgagcgcgcgtagtacagcgcctggtcgatatagcgttccacgcgagccagctcacggcccaggtcatccacacgtgacaggtcgtcttcgccgccatccagattttccaaaattagatgggccgccgccaagggcagcttggcctcgtggacccagctctcgatatagtcgcgatagtcatcggtctgacgccggccttcggcaacctcgtcgcaggcggccttgcccacgcgacgcaagacctcgtactcgagctcgccctcggcatacgtcgggcactggaccatctcctgcacccatgcggggctttccagctcctcggccgcgcgctccagctgatgcagaaaacggcgacggcgagcgtactcgatcacgatgccgagcataccgaagataaaggacacgccaaccgccacgaccacgatagaaacgggtgcgccggcgaccgtcagcacaaagcagctcagcagcacgccgcaggtccacacggcgacgggaagcagcgcgtctttaaagaacttggcaaacgacatagccggcccctagaccgaatagccctggccgcggtgcgtcgtcaaataccccttgatgccgattttttcgagcgtggtgcgcaggcggttgatgttgacggtgagcgtgttgtcgtccacgaaggcgtcggagtcccacaggtcctgcatgatggccggacgcgagacaatcttgcccgcgcgacccaagagcagcgagaggatacgcagctcgtttttggtgagctcggtactgtcgccggttgccgtattggtgaccatggagcgggcgaggtcgagctccagccccttgtggacgagcgtgctgcgctcgcctgccgccgcggtgcgacgcagcaaggcattgatgcgcgccacgagcacacgggcgctgtaggacttgggaacaaagtcgtccgcgccgagcgtcatggccatgacctcgtcgatctcggtcgtgcgcgacgtgaggacgatgatgggaacctcggattcgcggcgaacctcgtggcagatatgctggccgtccttgacgggaagtgtgaggtcgagcagcactaggtcgggcgcggcggcgagaatatcgcgcgagacatgctcgaatgattcgcatgcctcgacctcaaaacccgcacgggcaaggatatcggcaagctcgcgacgaatgggctcgtcgtcctcaacgatatagatcagcgccatggattccgctccccccttggttgtcttgccaccattatggctgcggagccgcaggtgcgcgccttgcgcgtcaccaaggtgacagaa

SEQ ID NO: 831 - DNA, 2894 bp, Unknown
  16S sequences of unknown bacteria
tcttcacggtagtatagttctcgctgacaatgcagtccgagtgcttggtgctgtacttgttgatgtgggcgatggcctcttcggcgctgtccaccaccttgacgctcagttccagcgccaggtattccttgtagtagtcctcctcggcggcgggcaggatgcggctgtcccaggtccgggcagtttcatcgccgtggatcaccacacccttttccagcagagccttcaccgctgcggggccgaacacatctgccacagcacggtggatcagcaggctttcgcaggcattgcacaccgaggtgcgctgggtcttggcattcatcagaatgggcagggccttttccagatcggcgtccttgtccacatagacatggcagttgccggtaccggtttcgatcaccgggacagtggcgttttccactgtggagcggatcagaccggcgccgccccggggaatgagcacatccagatagcccgagagcttcataaaggcggtggcagtttcccgggaggggtcctctaccagagcgatgcagtcggggtccagcccggcttcggtcagagcctggcgcatcagcttcaccagacagatgttggagcggagaatatccttggagccccggaggatcaccgcattgcccgatttcaggcagagcacggcggcatccacggtgacattgggacgggcttcatagatcatgcccaccacgcccaggggcacccgcatctgggatacgatcagtccattgggcagggtctcggcgtggagcacttctccgatggggtccttgagggcagccacctggcgtaccccttccacgatgccagccagacgcttttcgtccaggagcatccggtcgagcaggttgggggcgatgccggcagccttgccggcggcaatatcttccgcattggcggcaaagatttccgcggcgttttcttccagggtgcgggcaatggcttccagggcggcattcttggcgggagccgcagccaccatcagagcacctgcggcccggcgggcattttcgcccaggcggatcaggtcagcgttcattattctgcctccttttcggcggggacaaacagggtgccggtgaagtccccggacagtacgtcatagaggatcgccgggtcagcgccattgcagagcgccaccgggatctgcttttcaaaggcgatctccacagcatggagcttggtcaccataccgccggtgcccaccttggagccgctgccgcccgcgatgtcatagagggcgggatcgaagccctccacccgttcgatgagggtggcatcggggtgatcggcggggtttgcggtatagaggccgtcgatgtcggtgagcagcaccagcaggtcggcgtccaccaggctggcggtgatggcagacagggtatcgttgtcgccataggcaatttcgtccacggcgatgctgtcgttttcattgatgatggggatcgcgccatagcgcagcagggtttcgagggtattctgtgcgttttcccggaggttttcgtgggtggtgacgtccttatggaggagcagctgggcgatggtctgaccgtactccgagaagtacttgtcatagatgaacatcagctcacactgtcccaccgaagcggcggcctgtttttcctccatgatacgaggtcgttcacgcatgcccagttttgccataccggcgcccacagcgcccgaggtcacaagaatgacctccttgcccatattcttgatgtcgctgaggaccatggcgatccggtcgatcttgcggaagttgatgccgccgccggaatgggtcagcgaactcgagccgattttgactacgattcgtttgatgtcagaaaattctttcatgttctttcgtcctttctgggatgcgtgaaccggacagtgcgtgaaattctgtcagtacaggaaaggctgtaaaaaatcagccattcatgccggtttcctaacagtttaccatggaaaaggacagatgtaaatagctgccggacaaaagaccggcgtaaagaagaaaagccgctctcccacaccggggaaagcggcagaaactggataaaaacggcttcagttccgattccagccgaggatatgcaccaggatctgatcggtgtacccatagaggctggcgggatagtcctggaggttggcggtgttggagtccaccaggtaatccaccacctgaccgaaaccatcggagaccggctgggtgattaccaccgtgtgacgccagtcgctgtccactcccatgtggatcaggtcgccgggctcgccggtgtcatagggagcgtccacctcagctgccagcccatagccggtattgccggcggcatagtcgatgaactgcttgacccccgaccaggagctggagcgtccccaggccacaccccggttggatacggtgtcatcgtaccatttccagatatagtccccctggatgtccatggggattcccccggcatacagcacctgggaggcatagttctggcagttgccgcccgagccggtgtagtctgcccagtctccgctgcgctcctcgatccactgatccgcataggccactgccgcctcccggtcatagggctcctcagcggcctgcgctgtggtctcctctgccgcctgctgctgacgcagttctgcctgttccaccacctgttccagataacccggcaccgcatcgatgtagtcctgggtgaaatccagcccccggaaccgttccgggtcccactgtccgtcggcgtactcctccatataggcatagagcagggtggacaccagcgggtcaaactgggaatggctgcggatcagccagccgtcgccctcctgctgcatcacaaaggtgtggctggtgtcaaaccgcttggaatccacaccgggcagggccgcaa

SEQ ID NO: 832 - DNA, 2557 bp, Unknown
  16S sequences of unknown bacteria
cgaagcgctttgcgcgtaggaagatctggacgctgaagcagacatcctcaaatcccttccagtcagtcgagaaacgcagatcgccgatcaatgttcgccgatacagcttggcccagacaaaattgttgacttcccggtttcgcaataacgcatgcagcgcctcgatgtgatcccatgcccgatccttgggcgccttgcgacgcaagacgccgaaacggtaatccatgcgataggcgcactgcaccagatctgcctgttcgcgctccatcacatccaccatccggctgaccatgtccgcatcgatatgatcgtcgctgtcgacgaacatcacatattccccgcaggcgcgttcaaggccgaaattgcgcgtggcgctgatgccctcattctccttggcatgataggcgatctgcgcatgcctctgggcatatgcgcggcagatctcgccgctgccatctgtcgagccatcgttgaccacgatgatctcgatgtgttcatacgtctgatccagcaaagaatccagacaacgggggagataaggctccacattgtatacgggcacgatcacgcttaccagtcccgccatgttatccctcctgtctatttgggcacagccatgccaccagacgcttcatcagacggtcacagactgcgagcacgatgatgatccatcccgtccaggccatcacctgttccagctcaaaattcagccgcgcaagctgcatctgccggcctaccccataaggcacctgtcccaggatctcggacatgacgcccaccttgaaggccatcgcgatgcctgtgcaaaggctggcggtgatggccggccgaagcagcggaagatagacgtgaaaaaagacgaatcccgcaccccgaggatagatgcgcagcacattgagatatgcgcggtcgatgtcccgccacgcctccagcagattctgatagatgatcggaaaaaggatgagaaagctgatgatcaccgaagagatatcccgggagaaccaatataagatcagcaggatatacgaaatgttcggcacgctgcgcatgatcatcaacaacggagaaaacagatccgcgaacagctgtttcttccaggaaagccaggcagccagcgccgcgctgacaaacgcgaggacaagcgcgagcagcgagcggacgatggtagcagagagcgcagaataaaacgaggcctccttgagcagcgcgagcatggcagagatgacctgaagcggagcgggcaggatgaaggaatgccccacccacatggccagcagttgccacaagccgatcaggaccagcgcggagatcagcacgcgccgctgacgggcactcatcgctcatccgcgcggcacgcacgcagccgcgcattctgtgtactgacctgctgtctgccttgcaaataatccctcatcccctgctcatccagcagcagcggcatccggtcatgcaccttgcgcagccagccttcagccggcatggtcagcacgacagcctcattcgcatcattatagatgccggccagaaacagccgcgtcttctgcggatgatggatccacagcttgaccttctgctcgccctgtgtcatccattcgatgtatccatcacacgggatcacgcaccgccagcgcagaaacgggcggaagagcgctttttctcccagcgtctccagacgggcgttgatcacgcgcttcttctgcatcgtaaagccccaggaggccgtctgtgccgccagtccctgtgccccatgggtaatgatcatgatcgcctcgctgggaaatatctcctgttcctgaaactgggcgaaacgaaggcggcattcctcggcgcaccactgcgcatccgccggctgccagctgtatcgaaaccgtccgcacatctcacccgttctcctgggcctggcattgttccagcgccttcctgatccattcttcatcaaagccctgcgccagcgcagaaagcaggcgctgccgggcatcctggaggttccccctctgcagctcacaccagcccagcatggcttcgcaatacggatcaggatgcatcaccgcggcctgctgaaagaaatgctcggcctgcctgtaagcatccagctggatgaggttccagccgcattcacacaacagccatggatcgtccggatgacgctgctgcagctgttcaaggagcgcgagcgcctcctcatgccggttcagcctgcccaggacgtatgcgcgcaggtaatcaaattcctcgccatattgcgcttcgtccgttccttcgatgagggcgagcgcttcctcatatcgttcgctgtcgctgagatgaccggcaaactgcagacggatccatccctcttcaggaaaagcggcgagcgcctcctgcagcaccccctccaggatagatggatcctgcatccgcatcgcgatatggatcatctcctgatacagccagcgatgatcgtcgttgagatcaaacgcagagcgatagtaagacagggcgcgcgcgaagcagcggtctgcctcatcccgctcatgcaatgcaagaaagacgctgcccatggtgcgaaacaaaagcg

SEQ ID NO: 833 - DNA, 2088 bp, Unknown
  16S sequences of unknown bacteria
atacgagacaggaaagagcagccagaacgttaggctgtttttttagtagttaggaggcatatatggaagaaaacagagaaccgcttagtgcgatagcaatcgagaaaaaattgcagcttctccgaaataagcattttagtgaagatacgattgctcttgtaaaaagtgattatgaatatggactgaaagaggaggagatcagcctttatctaaataagtcatacgacattgaacagatgaagattttatcggaatgtctgcacaaggatgttccaaaagatatgattgatattatcaagaataccaagtattcggttcatcagatgcaggtgtcccttgaattttatgaaaagggtgtacctattcagacaattaaggaggttatggacaaaggggaaaaacctattaccatgcgacgattatatgaggaagttctggaacagctgaataacgtcaagaaacagattccggaagagtctgagtatgtgaaagcactcatttctcagatggatgaagtggttgtaaagatcaatcatcagaatgaaaggtatgatgccctgaataagaagctttctgaaatagagacttccaaagatgatgagggagtcagggagcgtctggtcaaggagaaccaggataaggacgctcttatcaacagtcagcagaatgaactgaataaggcaaccgagctttatactcactacgacaaggtggagtcatctgtcagggagcgttacgagaaagtgcagaagcagcagaaaaagaccacacagaagaaaactgttaccacaaagaaagcgaggtagcagcctatgcagacaacaaagaaaaagccgtcactgatattcattcttgtgggtgcagtgttagccggttatcttggttatctgataaatggtgcgtggatagagggaatagcatttaatgaatttatggacagattcaatgaagtatgtgcggttccctttgccaactattacaattccaatacagtaaaagcagtagccgttgcattaggtatctatgcgatggctattgtcatgtattacaccagtcagagaaactatatgcccggtaaggaatttggtacggcaagatttgaaaatccgaagcaggtcaacaagatacttgcagatacttgttttgcagcaggtacaggtacttccgcagtaacacagccgcttgagaacttaaagacacttatcattgcagtcattggtgctgttggtgtcatcattcttgcaaagaatgtcatggagttcgcacaagcctatcagcagcaggattcatctactatgaactctgcactgaaaggaattgtagcaggtgtcatgatggctggtatttcaacagttctgacattcttaggcttctaagatggggaaaaagagttccccttttagtaaaaggaaagaggtgaataacaagtatggatatttttaagcttggtgataagatccttgcacttcttgaggcagtgtttgggttttggaacaatcagatatccctggtctttgcaatgcttggacagtcaccggtcagtttcaagggcggaggtccctgggcagtcattgaggggatagagccggtttttgtagcggtcggctcttccctcgttgtgctgttctttgttatcggtttctgctcggaaagcatagatgtaaaagatgagatgaggtttgagtctatatttcgtatgcttatccgactgggacttgcagaatggtttgttgcaaataatgtcacgattatgaaagcgttttttacttccataggaaatctggtgggacttatatctgccgggacaacgacgcagcttgccattgacagtacacaggcagacatcattaagggactcggatttggtgagagtctggtaatgctgatacttacagctttgcttgcaatcatcattattatctgtggattctttatcatttacacagtgtatttcaggttcttaaagatactgattattgtgccgcttggtgcgattgcatgctccacaatggcaggaaacagaatggtcagtcatacaatggctacctactgcaaatattttctttcgtgtgtattcgaggcagtaac

SEQ ID NO: 834 - DNA, 9852 bp, Unknown
  16S sequences of unknown bacteria
ctgaaaaacgtatctgaaatatttgagcgtggagaggacaggatttgctgccgtctttccaagaccgcacagcgccgtcttcgacaccgtctccgcaatttcttcaagcagctccacatcttccatcgtaccgtttccggctacaattttctcgagtacctctctcatgcgcttcgtaccctcgcggcacggcacgcactttccgcacgattcgttctgtgtaaaattcataaagaaacgcgcaacttctaccatacaggtatgctcgtccatcacaacaagtccgcccgagcctatcatagcgccaacctttttaagcgaatcaaaatcaagggtaaaatcgagctgatcctttccaaaagtcaggcacccgcccgaaggtccgcctatctgcacggctttaaattcctcgtcgttctttattccgccgccgatatcaaaaattatctcgcggagcgtagcgcccataggaatttccaccagtcccgtattctttacatttcccgttatggcaaatgccttagttcccggactcgtctcggttcctatcgagcggtaccagcgaacgccgttttcaatgataagcggtacattggcaaatgtctctacattattgagcacggtcggcttgccgaacaagcccgcctctacggtgcgcggcggcttcacgcgcggcattcctctgtcgccttcgatagatgccgtaagcgcgcttccctctccgcacacgaatgctcccgcaccctgatttatgtgcatgcggaaggcaaaccccgtaccgagtatattttcgccgaggataccgcatgcttcggcctgctcgatagcatttttaagcctttttacagccagcggatattcggctcttacatatatgtatccgtcgtgcgcgcctgtagccacgccggcgataatcataccctcgagcattctgtgaggatttccctccataatgctcctgtccataaatgcgcccggatcgccctcgtcgccgttgcacactatgtatctcacttcttctttctgacggcgcacctgcccccactttctgccagtaggatatccgccgcctccgcgtcccctgagaccggattcttctatgtcgctgcaaatctgttcgcccgtcatatcaaagagcgctttttcgagcgccgtatatccgccctcagctatgtactctcttatcgaatccgcatctatctgaccgcactgtccgagtacgactctcgtttgtctttcataaaaaggaatatcgaactgcttttcgtatgtcctgccgctttgtgtataaaacaggcgctccacaggttctccgtgcataacggtcttttcgacaatttcttcgcagtcgccggttttaaccttgagatacagccagcccataggctctatcttcacgagcggtcccatttcacagaatccgtgacagccgctcttttttatccctatcgaatcgtgatcgacgtgctcttcaagctccacgctcacagacagcttattttcattgcagaggtctatgagtctctgatatacgtcaaggcttccgcccgctacacagcccgttcccgcgcacacgagaatgcgtattttctgcgcggaaagtgcagccttgcagtccgcacggaacgccgcaagttcctgtcttgatgtcagcatacctctttgccctccttaatgtcatttataagcgtctccgctttttccggcgtcatcgaagggaacaccttgtcgttcaccgtcatcaccggcgcaagtccgcacgcaccgaggcacgataccgtctccaccgtaaacatcatatcgtccgtagtcggcttgtcctcgctgagaccaagaatctccctcacttttgtcagaatcggtattgatttcctcacatggcatgcggtgccgtcgcagattttaataacatactgtccttttgcattaagtgaaaaattctcataaaacgtcgctacagaaaaaaccttggcaacacttatgtccattttttctgcaatatactccataacctccgtcggcagatagcgaagctccgcctgcacaccctgaagcacagttatgagattctttgcttcacagccgcagctgtcaattatcgcatcgattttctttaaatcaaattccattaaaacagcgttcctctcttaaaatatttctgaacttttataaaaaatacaatttataattttgcaaaaagtcacttttcaattatatcaagcacacagcaaactgtcaataaaattgcgcaatataattaccaaagttgttaaaaaatatccaacgatgaaaacagaaaagccgtatgcatgcaagcctcattaacaggctttcagcgacaatgtcagtgccgcatatgcacgcatacagctaatatttgttttcagcaatattttattctgcctaccactcacaggcttcaggtctttcctgtcctttaagcagctgcactctttttccttcaagacactttttatggtgtctgccgatgccgatggcgcagataatgcccagtatacaatcagccgcaagaaacataaatatgtatgtatatcccgtgctgccgaacttgtcaatccagctgccgaagagtaccggccatactccgtctacaaaaccgccaagcagtcctgccacagcaattgtctttccgagaattgcaggattgatatgcagttctctcaagcacgaatttgtgattgagtaaagcggcattataataacggcagggagcaaagaatatactgccgctatcatcggatttattcccggtttaaaaagcagcgtgcccgcaagcaagacgaatgaaactgcaaacagcggaatgaatgctttatatgtcgccttaaatactttatctgcaagcactcctccaattgggcagaataacataaacagatatgttcttatcgtcgaaaatgtcgatgaaagcgtgctgtcaagccccattacatttgtcagccacggattgtaatatgagatctgtgcgtagatagtataagtaaaaagcccgataattccaagataccataaaccaggccacttcatcataacccaaatatctgaaagcgccatcttatgcttttcgggcttaggcgtatcggcaagccttacgcctccttcggcaagcattctctcttccctcttcttatcgttttcaaggagaaatatatccagcagcgcacatataagcgtaacactgcctataacaagtaccgttcctctgaaccccaccatatttcctatcgcaatttcagccacatttacacaggcagcaaagattccatatatggcataataaatcgaaaatgacttagcagcgttttccggtcccgcaagagtatttatgaatttcataagcgacggccaataaccgaggccggtcgaaaacgcgagtccgcaccatgttatcagcgcggatgtataacccattctgcccattgatgccgcaaagaagaacgagcagcatgaattaagcacaagtgcaagtacaatcagtttcttggaatcaaatctgtcagccattactcccttaggaactacaaagatccagcccgttaccgtagtaattgtggtgagcgctccaagctgggcgtttgtgcagccgagtgcggcaatcatcgggtcatagaacacatatcttacgtacataagaagatagatcgacgatcctcccatactgagagcaagaagcgataaaaaataccttgctttattgttcatgataaaactctcctcaaaaatataaaatatagaacagaaaatataatatattatatagcaactataattataatatgaaatcgcttctcttgtaaattaagtttggctatgttttttataaagacaattttcctaacacctaaaaaatagaaaaggcggattcgcacatgcaaatccgccttttatcaaaattatttctacgatattaacttgatcactctttttaccagtcgacaacttccggtctttcctgtcccttgagaagctgtactctctttccttcgaggcactttttgtgatgtcttccgattccaagcgcacagataataccgagtatacagtcagccgccaggaacataaatatatatgtatagccgccgttaccgaatttatcgatccagtgtccaaacatcaccggccagagtccgtcaacaaatccccccataagccctgataccgcaatggtagtaccgaggagggcaggatttatatgaagctctctcagacacgaatttgtaatcgagtaaagcggcataatgaatatcgcaggaagcagcgagtataccgcagcaaccatcggattcattcccgacttaaagaaaagcgttccggcaagcaaaacaaatgaaatcgcaaacagcggaataaacgccttatatgtagccttgaacaccttatctgcaagaattcctccgagcgggcaccagagcataaagagatatgttctgacggtcgagaaagtcgaagacagagtgctgtcaagtcccattacatttatcagccatgggttatagtacgaaatctgcgcgtataccgtataagtaaataaatagataactccgatataccaaaagcccggccacttgagcatagtgatgatatcacctgccgacattttcttcttttcaggcttaggctcgtcatccagcttttccgcgatgacaacacctccattctccatagcaattctcttttccctcttctcctcgttttctaaaaggaaaacatcgagaattgcgcaaaggagtgtcgtaacaccgattacaagcaccgttcctctaaagcctaccacatttcccacggcaatttcaacaacatttacgcacgccgcaaatatgccgtaaaccgtatagtaatacgagaatgattttcccgcattttccggacctgcaagcgtgtttataaacttcatcagcgccggccagtatccgaggcctacagagaaagcaagaccgagccaagtaataagcgcgctcgtatatcccagtgagcccatcgtcgccgcaaagaaaaacgagcagcatgagttcaaaacaagcgcaagcacgataagctttttcgagtcaaatctgtccgataaaattccgttaggtaatgtaaatacccagcctgcaacggtagtaatggtcgtcagcgcaccaagctgtgtatttgtacatccgagtgcctcaagcatcggatcgtaaaatacatatcttatatacataagaagccaaatcgttgacccacccataccgagagcaagcaaagacaaataataccttgcttttttgttcatagtaaaaactctccttaaaaaatagaatattgcataacagtttaattataatacagaatcagggcctttgtaaatatatttacttatttgtttaaaaaaatcataaaattctgaacaataaattccagtttaccgctttgcagttttcctgctcttttattagctgcagccgcttgcaagctataatattttttataatttgtttcagttataaccacacagagtgcctctcctacttgtatcaatgcaatgcaagtttatgaagagccacgtagttctgtccaagagcgatgccgccgtcattcgggcttaccgatacattataatacgtttcaaagccgtcttttctgaggagttcaagcgtgagctctgtaagtattctgttctggaacacaccgcccgtaagcacaactttattcacatctttgccagagatcaccgcggcgtttttacatacaccgcccgcagatgcagctccggcaatatcgtttgtacagtttgtttcatcttccgcaaaatcatactcacctgctcttattgcacggcagttttccgctatcatttcggctatgcgaatgtgaaagctgagggcgaggtcgtcacgctccgacacccccggagttttctgcgcgcgcgcagctgcatcctcgagcattattgcgcactgtccctcgtaatcattataatcctttaccccaagaagcgcggctaccgcatcaaacattctgcccatagatgagctcagaattccgttgattcctgattttaacgcagccgtaatgatcggcagttccgcacgctccgagaccgttttatttttctccgcgtactcatatatatcagaaagatcaatttttatttgatgcgtgttcgcatttaaaactttagctttattttgtgctttttcaatcttctctgttttatctgcaaaaaatacactgcgctcattttcataatctatcagatagcaaagcgccgacttccacgcctctttcatcgaaccgtctccgcctatcatatttacatattttatatgagccgcacgtgtaaattcgcctccgcggcagacaagaaactctccgccccatatatttccatctgtgccatagcccgtaccatccatcgacacgcctatcacggtatcttctatatgatgctccgccataaccgatgccacatgcgcgtggtgatgctgcacgcggattactggcagagactccttcccaccttcaatgcctttattctgcgcatgttctgacgcatagcgccaagcaaactgagtcgtatagtaaagagggtgcagatcgcaggcaacggcgttcggctctatcctaaacagagctttcatacgttcaacattttcttcataaagcgccctgttctccgcgctgtcgagatctccaaaatactgacttacatacgaaaattgtcctttgctgagcgcaaacgaatttttaagctgtccgccggtagcaagcaccatcacggacttatcaataccgtcggcgctaacggtgccgcgcgcatcagcattcttttccgcttttcctacagcttcctcagtttcacgcgccgccgatatgaaaagcggcacgggtgcataacctttacttcttcttatcatctggggttgaccatctattacgcgcaccacagaatcatcaactcgcacccttatatctctttcattgtagaggcaggccgcaattagcggcttttcgttcatcattgcaaacatttcttcttcatcttttattatcggcatatcggaaagattagcgctcgtcacgataagcggacctgcatacatcttaagcagcatatactgcgcgcccatactcggtagaaatgaacctataaaacgactcttttcaatgtccgtaaaatcaatctccgcaaatcccgccgacgaatttgccaaatgcacatcaactttttcatagtccgcagtcctttgcatctcacttctcatcttttctgcggccctgcgcatttcagatgcagcttttctcatttcttccacattcctgtgctcaagcaaaattatcggttttgccgatgatttcagcagattttcctctgcttcgttcatatagcaaaacttttttacttcgtctgcatctttaaacatcaccgcaaacggtttttgctctctcgcttttatttctcgcagcgcgcgcaccgcttctttggaaagcgggtctgcaagcagattatagccgcctactcccttcatggcgacaaccttgccgctttgcagaagctcacaaactttatgcagaatactctcatctgcaaatgcgtgcgacccgatccttctgctttttccttccgtttgttctatagcatctatacccataaaatgctcatccgcctgcgaacgcatgcagtcgcatttactatcatcagcttctgcacaaacgaacgtttccgtattttcgttcatcctaagccgcagataaggaccgcagtcgtggcaggaaatagtctgcgcgtgataacgccggtcatttctatccgtatactcaccctcgcagaaactgcacatcggccaatctatcatcgccgtgttttccctgtcataaggtatcctatctataacagtatacctcggtccgcacaccatacagcttataaacggatgcctatagcgcggattatgctcatcctcaagctctgcgagacaatccgggcatatcgaaagatcggcggggatcatagctgcttcatcgtctccgtcgtcacttcttaatatcgtaaaagcattaaattcacgaaagcctgcaccctgtgcattgctttcagttccgcaccccacttcctcattttttgtcctgcacgccttctctcttccgagcacttcgcgctttatatgcactatttcagcgggcacaggcttttctctctttatcgcttcaacaaaagcgtctatacgctcttccgtgtccgtcacgatgatatcgacaagtccgccgatatttaaaacctcacccttcattccgtacttgtcagcgcacttagcaacaaagggtcgaaacccgaccccttgcactattccccataatttaattttttccgtgattctgccgcccattcgcttttcctttatctatatacctgcagcacaatagctgcccgccgcactcgcttatttgtttaactttttcattattcatgatgatggtgatgatgttcatcatcgccgtgcccgtgatgatgctcgtgtatatcgagagctgccgctctgccctcgagccacgccgcaacctcagcatagccctcgccagtcttgcccgatactttaaataccggcgcagtcttgttaagtgcgcgcacgcctttcataaaaaattcttcgtcaaaatcaagataaggtatgagatctaccttgtttatgagaataatgtcggctttttcaaacgccagagggtatttatacggtttatcgctgccctcagttacggtcgcaatgagcatcaacacatgttcgccgattgtaaattcggccgggcacacgagatttcctatattctctataaagagaatcccgcgttccttatcctcgagatcaaaatccatttcgtctattttatggtctatcatcggtgcatctaagtggcatgctccgaatgtatttatctgatatgccgcaatgccgagtgaattcaaatccttagtatcgagatcagactcaatatcgccttcgattacaaacggtttggcaatctgcagcctttctattatatttttgagagtagtagtctttcccactcctggcgcatccatctcattgactatcagcactccatgcgctcccatatgttctctaacatgctcggcaatatggtcgttttcgtccattacgttttccattacattaagttttcttatatcgtgcatctttagcctccatatatttttatttatttatctattatttctcgattattttctcaagctccgctttttgcttttccattttacagaagtgcgcttctttatcctttacgttactccacttcgatctcttctatataaaactctttgccgatttcagtcggctcgccgtccacaccgcacttcggacaggcaaatgacatcggcgcgcgctcgaagaactcgccgcatgcaggacacttaagcttcggcttcacgcgctttatcttgagtttggcactctcacacggtgtgccctcgcttataatatcaaaatacatctgaattgactcgcccacgcagcctgagtaatcacctaccacaagactgacactcaccaccttgtccgctttggcttcggcacaatgctgcgaacatatttttattatctgctcagtaatcggatattcatgcatataatttaccgctccgttttttatttcatattatattattatacttctttttactttttcaatcaagaaaataacgattagccccattcacactcctgcacatcttccattcacatgtgcaatttttttaatccttctattacgcacggcaaaacgccttttttcagctttcgcattttcggcacaatcaccttgaagaaattcaaaatcaaaaattct

SEQ ID NO: 835 - DNA, 14532 bp, Unknown
  16S sequences of unknown bacteria
gcgcggtcggcgtgaagaaggagccgggcagtgtgaatgcgcagatcgattttctgcggagccgcaggatatacattgactcgcggtgcgtgaatacggtcggcgagatatcgcagtggtgctggatgcgcgacggggagagcggagagcttacagacacgcccgcgttcggatgcgacgatgcgatggcggcgctgaggtattcggtcgagggcatgaggcgcggacgggcgcggaccgtcgatgcgagttcgctcgggctttagccgggtggaaaaagactgaaagggcgggagggaacgaacccggatgggggttgatcggcgcgggtcacggcgccggagcggacgtattccgcggagactgtgacggatttaagaaaggggataaacttggacagagacgaaataatgatgcactttgcgtcattccggaaattcgagaggccgcggcttgtgcggctcggtgattactacggcggaaagcacgacatactgaagggtcagcggagcacgctgaagcccgacaacaggctggtcaacaatttctgccgatcgatcacggactgcacggtcgggtactttctcgggattccgatcacatactcgtcggacgacgccggcacgctgcgccttgcggcggagatatcgtcatataacgatgaagcgtttcagaacagcgcgcttgcacgggatatgtcggtctacggacgcgcggcggagcttatatgggtagacggcgacggcgtgccgaggttctcggcgctcgatccgacgtcggtctttccgataatgtcggattcgctcgacgaagaggtgcgcgcggcggtgaggttttacgttccgcgtttctcgtcggataccgtggtcgaggtatacggtgaagaggggatcgaaaccttccgtcttgacggcggaaagcttgaaaaaacgggggagaaggagcattacttcggcatggtgccggtgaacttttatcggaataaccgcgatatgaccggggatttcgagccggtgctctctctcgttgacgcttacaaccgccttgaaagcgactgcgtgaacgactttgaacttttcgcggacagttatctcgtgatatcgggaatgggaggcgccgaccgggaggatattgagcgcttccgccgtgagagagtgctgcttgtggatgagggcggagacgcgcggtggcttacaaagacgacgaacgatgcgtacatcgaaaatctgaagaaccgcatagcgaaggatatctaccgcttttcaaacacggtcgatatggcggaggagactgtcgggcactcagcgctgtccggtacggcgatcaaatatcgaatggcgaatttcgacaaccgcgtatgcacgacggagcagtatttccgccgatctctgatgaggagatgggaggtcgtatcgtgcatatccgcaaagctcggcggggtgctcgattggcaggcgctgcgcccgcagttcgtgcgcaatctgcccggaaattacgagagcgcagcggcggttgcaaaggagcttgacggaatcgtgtcgagaaagaccatacacgagcttctgccgtttattgcgaatgcggatacggaggctgcgagaatggcggcggaaaggaaggaggcgtgacggacatgacggaagaaaagaagaacttttcggcagcggaaagcggtagtgcgccgggcggcgcgttctgcgattcacccggcggcaaagctgataccggaggaggtgcctccgtgggatacggtgcgcaggacacgggaaatgaagccgatcgcgcgtccgacagcccgcgtggagtcatcgggcgaggatcggacggagaaacacgaagcaaagtcggagaggtcatgcccgacgctctgaaaaaggagagcgagggggctgcgtcgggcggagaagttccgccgtccgacgggcagaagagcggagcgttctacagtgccgaggaggtgcgcgcgcttctccaatccgaaggagatcgaagagtatcgggcgcgcgccgtaaatgggagaaggaggcggaggaggcgatcgccggggaagcctcaaagcgtgcggcggagcttaccgcgtcgctcgaggcggagcgcgagaggctttgcgccgagcttgaaggggagcgcgaacgaagcaggcagcgcgaacgggagcttgagatagtgcgccttctcggcgagcgcgatcttcccgcgacccttcttccgcttatcatgcctgcccgtgactgtgccgaagcggtcggcgcgcttgcggataccgtagccgtactagcgtcgagggagacaaaacgccgtctttcctcggatgcgccgaaggcggcggagaaaggaataaaattcacgtcggaggagcttcgcacgatcccggtcgcgcggctccaggagatgctcggcgcgcagtgacgcgccggggacggaaaaaatttttttaattacgaaaggaaaaaacaaatggctaataccgtatacgaaaatacagtacttgaatcaaagcttaccgaactcgtagattccaaaatcgaggtgcgcgctctcatgagcgttgacaagagccttgaagagggcgcgggacttacgaaggtcatcaaccgctacacctaccgcggcagtgtcgagactctcgacggcggtcaggcgaacacgaacgtcggagagcttaccttcaccccgaaggagtacaaggtcaagagatatcagcagaccttccgatacaacgacatggaggcgatgcaggaccccgcgatgatcgatattgcgctttccggaatcgccgacgttatggcaaatcaggtcaggggcgagtacttcggcgagctgaaaaagacgtcgaaccgccacgcatacagcggcaatgcgctgtcatacggagatgtggtggatgcgcttgcgtctctcggacgcgaggtcgaggacgggctcttcatcatcatgtccgccgcctgccgcgccgcgatccgccgcgattccgattttatcgcggctcattccggcgagatcgtttacacgggacagttcggcacgctctgcggagttcccgtgctcttctccgctctcgttcccgacggtatggcgatcatcaccgatcggaacgcagtgaagttctttgtcaagcgcgaggcgtcgcttgagcaggaccgcgacatcgagacgaagataaacactgtcgtttacgaaagatgcggacttatcgcgctcgttgacgacacctctaccgtgatcctcggaaagaaggctgccgatatcacggcgtccgtatcgtccggcacgcttacggtcagcggaaagaagacaagctccgacgatatctattggagaaaggcggactttgccgcgctcggcggagaggacgtttcatcgtggaacaagtgggacggctcatccaagctcgacgctgcggcgggcgagagaatttcggtcgcggaggcgggaacggacggactctgcgttgcttccgccgtggtcacggcagcgtaaagaggcgtgcgcatgagggatatttcaaagctcaaagcgctcctcgacatctcggcggaagatgaatcgcgggacgagcttctttcgttcctccttgattccgccgaaagatacgcgctttcgtattgcaggcttcccgctctcggcgatgagcttgaatgcgtcgcagtcgagatggcggcgcaggattacggcgcgctcggcggtgagggaatatcctcgcgcagcctgtccggaatatcggagcattaccgtccggattacagcgaaaagatcaaggcagttctccgacgtgcgcgcaagccgggggtgatatcgtgaggagagcggagaagacgtacgatctgttttcaccgccgcgcaccgatatgttcggcacgcggagcgcgccctcgccgctcggtacggtgagatgcgcgatgtcctatctttccgaggaggaaagctccgaggacgacgttgaacggacgaggctccgttttaccggagtcgtgcgccgcgagcgcgcgccgctcggcggatttgtccgcgggatgagcctcgtttcggataacgcgcggtacacggtgtgctccgcacggtgcgtggggaggctgtgggtgatggcgcttgaaagaatcatgtttgagggggacggcaatgcttgaagctgtgcttatgaagctgaaggatgcgcttccgggcgcgaggataattcccgcgccgtctgcttttctcacggatacggcggtataccgttatttcccgggaaaatcgggcggcagacgaaagagcggacgccttgaagtgcggttcgtttcgccgagccttgccggagccatggcgatgtacggcagcgcgcgctccgcgcttgtatcggaggcggacttcgaccgcgtcggaacggggattcgcgccgttcacgtcgaggaggttgcggagggctcctcctgcggatacataagaaagtcgggtctttactttgtgaagtcgggatttcttttgacggggtactgattgtcagatacgccgcttgtcgggggattcgccggggagattttcttccccggcggcgccctttgccgaaggaaaaacggaaaaaacgtatgccgaaggcacatcgtgctgtgcggaccgggcatctcggcggtacggagcgtcaggatgcggaaacggaaggcttctccgtgaatttcaaaagaagggaagctttcgccaagcgaaagccacggtcgaatttatgactgaaggaaatgaaacggtaagtgaatttgcactgacctcgggagagctttatcttgcgtcgggagcagtggaaaagaaggatatgcgccgcccggagaattatgccggaccgacaagaggcggcgttaaggtaaaatatacggcgagagtcagcgagatattcgatgaggacggcaatgtcgcggctacgctgagatacggggagcgcacctgcgtgagcgggacgcttgcgaggatatctccgcgtctgctgtccgtgctgataggctcggatgcggaaaatatcgtaccgtcggcagacggcttgtcggcggacggctcggcggtgcttgcgctttccggagaacgtgcgcatcgaaatacgctcagctttcttctcatatgtccgctcgacggcggcgaggagtttcagctttatctccgctcgagcgcgccgagcgaggcggtcatggagctcggaacgtgcagcgagaacgggatatcgttctccgtgacaagcgagagcgggcttacaggcaagcgcgcgtcggtctcgttctcgcctgcggaggtgagcgcgtgagggatgtcaggctgatttcgccgcgtctcggcgagtttaccttcgacggagcgcaggcgattctttcgtccttttcgtgctcgtatccgagactcacgagaaaggcgatcgcgaaaaacgccgcgctcggtgtcgaactgctccccgccgcagtcggcgaagggcggatcgtgatcgagggataccttatcccgtcggagggtgcgcttttcgacaagaagcggctgctgtgcgcgatcgcctcggtcggcggagagtttacgctcaccgttgacggtctgcggcgcacggtcgagaccgaaaagctcgaatttctcaccgagggcgcattcggcaggggcaggggagatcactttgtgcttacgcttatttccgcgtctccgtttttcgagggggatgagatgacgttttacggtcggtacacggttgatgacgcgctttatttcccgcacgcgataagtgcagccggtgacagtgtcggcacgatctcgagccgcggctcggtcacggtctcaaactgcggtgacgcgccgtgcggatttgtcgcgcgttttcactttccgtcggcggcgacctcgttcattctgaaatcggacgcatattcggacaacttcgccgtgacgcggagcattgatgcaggcgaaacgctcactcttgatacgcgctatgggaaaaagtccgtggtcaatgcgtcgggagaaagcgagctcggcaatctcgacaagaggtgcgcgttcttcattctgccgccgggggaaaacgagcttacatggtactgctcgtcctcgtcgccgccggatgtcagcgtgcggatcgtgccgcagtacatatttgcatgaggaggtcgttatgaaagagacggtcatacgcttcctcgggaaggatcttaaaataaagtcggtgtgcgacgatttcgtgcgccttgaatattccgaggagtttcgcgcgccgggggagttttcgtgtacgctttcgcttgatcgcgcgtacatcccggcaatcggcgaatacgcgctcatcggcgagagcgcgctatatgtgatcgagggtgtcgggcgcgacaccggggcaggaacggcgcgcatttcgggacgcgggatactttcgtttttctcccggcggatactgcccgtcaccgtgaagaattcgtgcccctttgattcggcggtgtacggtcttgcgatggcttacggcttgtccgcatttccgaaaagcctcacggtaaagcaggggagcgcaggcgagagtgcggttatcgttcatgagcccgggaatcttctttcggtgatgacggacgcggtgcgcccgttttcggcgggatttcggacggagtacgatttttccgcggagaagttcgtcttttccgtccgcaccttccgcgatcggacgctcggctcgggtgcggatgagtgcgtatttctcagtgaaggctttgacaccgcggcggcggtggcgatgaccaccgatctcacggactaccgcaattatgtgacggtgcgcggagcgcagaaggaagacggctcgtactacacggtgacggtttcggcgggcgcatactcgttcggcgacagctttgtcgatgtcggtcaggcgcggcgcgagatctatgtgaaaagcgggatcggcgtggggatatacacctcggtgaacgagagcggagcgaaggtcttcgatgaggcggggtatcttgcggcgctcaggacgagaggcaggcaggagcttgccgcacaccgcccgaagcgcgggatctcggcgcagataatgcagtccgccgccgaagggatcgaggtcggagacatatgcacgcttttctcgcccgcctcggatataagcgccgttcgcgtgatggggaagatgcacgtcaccgaaaacggacagagtgtctgctcggcaaggctgagcatataacggaaggagtaaatttatgaacaaatcgttttttttcaacgccgatacctcgtcgggctcggcggatataacctacagcgccgccgatcttgcggcggagaaggctgcgtatttctcggacggcgtgcttgcgcccgacgatttcaaggtgagtgcggtggattcgcttacggtcaagatcgcgcccggcggcgcggtcctcggcgggtatacatatgtgaacagctcgatcggcgtgcgcgcgatatcgagcgccgccgcgacgaaggcgcgcagagatctctgcgtgctcaagcttgatctgtcgatacgcgccatgaccgtcgttatcaaatcgggaatgccgtcggacgatccgcagcctcccgcgcttacctcgacggacagcgtaaaggagcttgcgcttgccgaaatctacatgcccgccggggcttcgtccgtgaatgaggcgaccgtgaccgaccttcgggtgcttgcgtcgctgcgcggagcgagtgcgctgatcgaggcggggataaaagcgcatgaggcggagacggacgctctcacaaagagcgaaaacaccgaggtgcgaaaggtctgcggcgcggtaaaaacagacggcatctcgggcgaggtgctctgcggagacggaaagtacagaaccgtgctcccgtacaggagaacgctcctgcagatatacaaccgtgcgggggaatatgagtttgatacgtcgaaaaatccgtcggacgcgaacagatacgactttgagatgatcggcggaggaggtgccggaggatgctgcggacattccgattcacgcggaggcggcggcggcgcaggcgcttatgtaagtgtatgcggggtcacgctgtctcacggaacgcataaaataaagataggagcgggaggctcgggcatcgccgaaagaagcggaggcgacggcggcgaaagctcgtttgcgggatatcacgctccgggaggctccggcggtgtcggcggcacatgggcagaaggtatgtcgtttcccggcgggaaaggcggtgctgtcggcgcgtatatcggagagcgcggcggcgacggagggtattcccttccgtccgacaaaatcgcgtcctgcggaatcggcgcgccgtctccgttcggcgcgggtggtgccggagtctcgggttcttcatcctccggaaagaaggggataggcgccggatcgggcggatcgggcggcggctgcgtgagcacctcgttttccgcctcgggcggaaacggcgcggacggctgcctcctgatatacggatatcatacgacggcattcggcaccgccgccgaatgaggacgcttctctatcctgcggacggcagacgacggagcggtgaggggaagtgaaaaaataggctgggaaacggttgcgggagccgtcacgcttatcggcgcgtttatttcggtgatgacggttgttgtaaaggtaaacgggacgatgacaaggcttgaggaggcggtgcgtcagctccgtgaattcatcgagaatcaggatgaacgcaacgaacactttgtaagcaagcttgcatctcacgaaacaagaatatctcttcttgaaaacagaagcagggacaaaaaggagtgatcttttgaaggaggaaaaaacactgaaatcgtgccttcgccgtgcactgcgcacgtttgtgcaggctgcggcgggatacgcatcggtaaacatcgtttacgcggtgtccacgtcggcgcagaatttcaatgcgctgaagagcgcgcttaccggagtcgttatctccgcggcggctgcaggcttctcggcgataatgaatctgccgtgtcttacgggcaaatcggaaaagagcggcggagacggcggcgaggaaagcacggataattcaaaggaaggaaaataaaatgggatacaaaaaggcataccgcggaatcgacatctcgctgtatcagggagagccggatttcagagcggtgaagaatgcgggcatggatttcgtgatcctcaaggcatcacagggacgcacggcggaatacaacgctccgtttgaggatccgaaattcagaaccaatataaagcgcctctcctctcagggcggtctgtacgccggagcgtatcattatttctgcgcgcggaacgaaaaggaagcggacgaggaggcggatttttttataaagcttgtctccgagtaccgtttcgatcttcagctttgggcggcgctcgacgttgaggattcgggatttctcccgtccgataaggcgaagcttaccgcgcttgttgcgcgcttctgcggcaaggtgaaggcggcgggactgcgcccgatggtgtacgcgaattcatggtggctcgacagtcggtttgactctccggcgggcgttcccgtatgggaggcgaattggagctcgggtaagcttcccgagcgctgccgcatgtggcagtattcctctaccggcagagtcgtcggcataaacggaaatgtcgatatgaacgtggctttcgatataatcggagacgcgaattcggacggctcggtcgatatgaaggacgtgatccgggtgatccggtcggtatccggatgggacgtgaagatcgacgaatcccaggcggacgtgaacagcgacggatacgtcaacatgaaggatatcattcagacgatacgcacgctcggcgaggacggaaagtaagcgatgcggactgtccgacggtgtttgccgtcggacagtccttttatccgtgccggagggactccgcacgaaaacaaaaaggaataccgtgaggtattccccgttcattgtgcggattactccgcctttgccttttcggcatccgcgagcttgtcgaggcgggtatttctgaaatagagtgcaacgtcgatcgagatctcgacgaagttgagaacatagaagaagaagctgaggaaaaagatgaatcccgagctgcctccggcagtctggatgatctttctgattatgccgaacatatatccgatgagaagaaacacctcaaagaagaggctctttcccttcgcggtgcgtgaaatgtaggatttgcggatcgagatcggccacgaaagaccgaagcagaatatggtcagcgcttcaagaagatctgttataaatggcattggtttgtaccgttccttttaaattttgattctgtccggctgtgccgggaaacatccgcattcgcggtttcgccgccgcgctcggtgcgcggcggcgaaagaaggagaaaaaactgttgctttcagtttgcgcggcgtgcgtaatcggggagaagccgcggtgataccgtatcgtcggtgattccggcggtatcgcgctccgcgttgaagcggtcgagatggctgagggtaagcgctccggtctcggtatccttcgacattgcggcggcgtgctgtccggcgcttctgccgaatacgatgatgtcaagaagcgagttgcccatcagacggttgcgtccgtggattcctccgactgcctctccggctacgaagagaccggggactgcggacattccgtcgggggtgatatcgattccgccgttctgatagtggagcgtcggatatacgaggatcggctcgcggcggatatcgatgccgtacttgccgaacatgcggagcattgcggggatgcgcgcttcgatcgtgccttcgccgttcttcatttcgatcatcggggtgtcgagccatacgcccacgccgtccgcagtgcggatgccgtttccgcggtcggagcactcgcggatgatcgaagcggcggacacgtcgcgcgtctcaagcggatgcatgaacgcttcgccgttcacgttgatgagcttcgcaccgagagaacggaccttttcggtgacgagtgcgccgaagatctgctccgggaaagccgcgcccgtcgggtgatactgaagggtgtcggggtagagaagctttgcgcccgctctgtatgcgagtacaagtccgtccgccgtcgcaccgtagtggttcgacgtggggaagccctgatagtggagacgtcccgcgccgccggttgcgattattacggtctttgcgcgtgcaacgagaagctcttcggtctccatgttcatgagaaccgcgccggacgcctttccgttctcgtcgaggatcagctcgatcgcggaggtgaagtcaaccacgggaatctgacggtttagaacctcatcgcgcagggtgcgcatgatctccgcgccggagtagtcctttgcggcgtgcatgcgcttgcgggaggtgccgccgccgtgggtggtgatcatcgtgccgtcgggagccttgtcgaattccacgccgagctcgttcagccatttgatcgcctcgggagcgagggtgacgagcttctcgagcagctcgggctttgcggcgaagtgtccgccgccgaaggcgtcgaggtagtggattgcgggggaatcgccgggcttgtcggctgcctggattccgccctccgccatcatcgtgtttgcgtcgccgatgcggagcttggtgacgatcataacgtcggctcccgcctcgtttgcctcgatcgccgcggacgcgcccgcaccgccgccgccgatcacgagcacatcgacgtcgtaatcggggtcggagagatcaactccgtccgaggtgatgcggctctttccctgaaggagcgcggcaagctcatgaggtaccttttcgcccttattcgcgccgatcaagaggctttcgaactcgtttttcttatagtcgggatgatacgacgcaaggagagcgtccttctcctcagccgtcatacgtcgtggctcaagcacggcgttctcggcgcgctttgcctcgacctttttcattgattcaagcatttcggcagtatacatatgtatttgtgaccatgcctttctttaattttcggatatcacgggtaaattgcgccgtatcttatttttcgatttcgcggttgttgtaaagctccttgagctcttcgatcggcttgttcatgaggctctcgataagctccttgaagtcgccgttctcgatctcgcggacacgctcggtgaggtggagtgattcgggagcaatatattttccgttgaggcggcgcgcaaggagcgcgacctgcgggtgggaaattccggcggggcatctcgacgagcatacgccgcacataacgcagtcgaaggactcctcggcgcacttctcaaaatcgccgcgctgcgcgtatgcgatgtactgcatgacgttgagtccctgagtgcagctcttggtgcaggcgttgcagccgatgcaggagtagatctcgggataaagctgcatcatgatctgctcggagggggatatcttttcgatatcgtatacctgcttgacgagcgggaagaagggcagagtcgctatgtacattccctcctcgacctgagtctggcaggcaagacatgcgtggagcgccgtctctccctttatgcggtagatcgtagcacaggcgccgcagaagccgttgcggcagccgcagccgcggacgaggcggtagcccgcgtattccatagccttcattatggtgaggcttgcgggaacctcgtatttcttacccataagaaagatatttaccatgttttccataggttcgtgaccaatcctttctttgcggtctttttcaaagccggaaagcttgtctccggaaagcagaaaagccgttttttcggaggaggcggaaagccgatccttcgtgatttcttttttcggcacgcacgggacgcgccgtcgcgggatcaatattcgtccggaagctcaccgagctcgtcgaagcggaacacgggaccgtccttgcagacgtacttcgaaccgatgttgcagcgtccgcacttgccgactccgcatttcatgcgaagctccatcgtggtgtagacctgcgtctcggagaagccgagctccttgagccctgcaagagtgaactttatcatgatcggaggaccgcacatgagaactgtcttcttgagatcgggagaaagctccttgacgtagttcggaacgaatccgacgtgaccgtcccagccctcctgctcgcggtcgatcgtaagattgacctcgatgccgggatcgttttcccattcgttgagaatttccgcgtaatcgacgagatcgtccgcggagcgcgagccgtagatgacctgcacgctgccgtagttttctctctttgcgcggacgtagtttatcacggagtgaagcggagcaagtccgataccgcccgcgataaagaggaggtccctgcccttcagcgctccctcaacggggaagccgttgccgtagggaccgcggatcgtgatctcctgaccgggctccatcatgtgaagccagctcgtgagacatccgcatttctttatgctgaattccatgtattcctctaccgtcggggaggacgtgatcgagaacattccctcgcccacgccgggaacggagagcatggcgcactgtccggggatgtggacgaacggctttttgccgtccgttccgacaacacggaaggttttgacgtcgggagtgtctctccgtatatccgtgacgactccgacgagaggtatcaacgtttctttattcatagtaatctccatttcgccgcacggcggcacaaatagtaacgggtccggacgggcgctgccgaagcgcaggcgctcatgtccgacggcatccgtcattctgtctgccgattttcggggcttactctccgtccgcctctccgaggcacttcattaccttgacgatgttcatcgagattgggcatttcacgaggcagcggccgcatccgacgcagccgaatttgccgtcgttgtttgcggggtagtagacaagcttgtgcatgaagcgctgtctgaaccgctcaagctgcgtaagacggggatttccgtgagccatcttcgtgaagtcggagtacatgcagctgtcccagcagcggaagcggcggatgccgtgtccggtgtcgaagtcgcggatatcgtagcactgacatgtgggacatacgaaggtgcatgagccgcatccgaggcatgactcggagagggaagcccacttgtcggaggagaagtatttgttgagcgtatcgccgccgaaagcgtccggtttcagctttgcgagcgggaggcggtcgaggatctcgttacatttttcagcctgcgcacggacgctttcgccgtcggactcggcgagcatatcggacaccgaggagacgagggcttcgcccttttcggtgacgggggtgaggtagagcccctcgtccgtcattgcgcaggagacatcgccgccgggcgcggtgggatcgatgccgaaggtgcggcagaagcagctttcggcgggagacgagcacgccacggtcattacggtgccgtgagcgcggcggtctgcatagtacgaatccacgggct

SEQ ID NO: 836 - DNA, 3654 bp, Unknown
  16S sequences of unknown bacteria
cggaggaagaggtcgaagcggtcgaggcgttcggtgagggggcggtagcgggggagttggaagaaacggcccagcttttggcgctcgcgttggaaggcctgcatatcgacgatggcgtcgatctcgttggccttgcgccgcagcagcgtgcccaggtgcatactgtagccgcagtcgatgaggaagatgccgaagatcatccccacggtaaacgacgagaggggatggtgcacgaaccactccacgaaccgccgcagcggcggatagagcagcagataatagaagatcgagagcgcgccccagatgagggtgaacttcgggcagatgatgccctggatattgccccactggccggtgtaatcccagagcttgacatggaagcccttgatgaagatcaggcccgcgatatactcaatgaccgtcatggccagggccatgacgaaaaacaggatgccatagagggtgatgccatgccccagagcgccgaagacggcctcctgaatgctggacagggcaaagagcgcgacggtacccgtcccgtacagcggcagatacggcccgatcagaaagccggggttgagccattgccggtccgggtttgcccgggagataaagcgccggaacagcagctccagcccccatccggcgatggagccgaagaagaacaggtaaagtaggatgaggaaggtctgaaagcctgacagcaaagcgtcccacctttctgggtcagccgcgcagctgggcgatgccttggcggatacggcgcagcgtctcgtccttgcccagcagggcggcaagctctgtcgcgccgccgggggtagactgcaggccggagatggcgacacgcaccggccagaggatcacggaatttttgacctcccggcagcttgccagggcggtcaaggcgtcgtagagcccggcatttgaccagtcggaaagaccttccaggacaggcagggctgcttccaagctctccaggctattttccaggttcgtcttggattttttgtggatataaagggcgttgtcatacgctggcagggcttgcaaaaaggcgaccttctccggaatatcccccaggacctcgcagcggggctggatgagtgctgccacggcccgcaggtcgatggacggggtctggatggcctggcgcagccagggctccgcctttgcgaagaacgcctccggtgacagctttttgatatactcgccgttcatccagcgcagcttggcaagatcaaagacggcgggggatttggagatgcccgcgatatcaaatgcctggacaagctccggcagggtgaaaaactcctgctctgccaattcgccccggggcgaccagcccagcagcgcgacatagttgaggacggcctccgtcaaaaagccctgggcgagcaggtcctcaaagctcgggtcgccatggcgcttggacattttatgctgtgcgtcccgcatgacgggggagcagtggacatattccggcaccggccagccgaaggcctggtagagcaggttgtacttcggggcagaggagaggtactcgctgccgcggacgacgtgggtgatgcccatgaggtgatcatccacaacattggcaaagttataggttggcaggccgtcggacttcagcaggacctggtcctccatctctttattctccacggtgatatcgccaaaggtgatatcgtggaacgtcgtcgcgccggtgcgggggatcttctggcggatgacgtagggcgcaccgctcgccagcttttcctggatttccgccgggctcagctgggggcagctgcaggtatgcttggtgacggcggcgccgccctcgggggcagtgccgtcgtcacttttctggcagaagcagtagtacgcgccgccttttttgacgagaagctctgcgtatttgccgaagagatcctgccgctgggactggatataggggccgacggggccgccgacatcggggccttcgtcgtgatccaggccgcactgggccatggtgttgtagatgacgtcgaccgcgccttcgaccaggcggccttggtccgtatcctcaatgcgcaggataaatttgccgccggcccggcgggcgatgagccaggtatacagggccgtgcgaagattgccgatatgcatatagccggtggggctgggcgcaaaccgggtgcggacctcgccccgggggatgcgcgcttccatctggtcaaagaaatccatgtacttggtacctccgtaattttacgttctgcggttattttacatttctttgcgggtttctgtcaatgctttgttgcgatactttgcaaaatgtgttagaatacgtgggagtcaaatttaaactaaagaaggtatttgcctgatggaagagaaaaaacgtatttttagcggcatccagcccagcggggagctgaccctgggctcttatatgggtgcaatcaaaaactgggtcgatctgcaggacgattacgactgcatctattgcatcgtggatatgcacgccatcacggtccgccaggtcccggcggagctgcggcggcggagcctggcgcagctggcgcagtatatcgcctgcgggctggacccggagaagaacatcatgttcatccagagccacgtgccgcagcatgcggagctcagctggatcctgggctgctacacccagttcggcgagctgagccggatgacccagtttaaggacaagtcgaaaaagcacgccgataatatcacggcgggcctgtttacctaccccgtgctgatggcggcggatattctgctttaccaagcggaccttgtcccggtgggcgtggaccagaagcagcatgtggagctctgccgggatatcgcccagcgattcaacggcgtctattctgacaccttcactctgccggagcccttcatcccgaagctgggggcgaagatcatgagtctgggcaatccgacgagcaagatgtccaagtctgacccggacggctgcgtctatctgatggacaagccggaggatatcctgcgcaagttcaagcgcgccgtcacggactgcgaggccagcgtgcgttatgataaggagaacaagcccggcatctcgaaccttttgacgatctactgcgccgccaccggcaaggcgatggccgaggcggagggcgaatttgcgggccagggctatggcgttttcaagcccgctgtcggcgaggccgtgattgagaaaatgcgccccatccgggaggaggccgagcggctgatgcaggataaggcgtacctcgaatccatctataagcgcggcgcggagcaggcccagtacctggccaacaagacgctgcgcaaggtgcagaaaaaaatcggcttcgtggccaagtaagcagctgccgctgcgggaaaggacgtgacgatacttgtcatcccaactccattttgtgctttttatgctgggcgcggtgctcctggcggcaggcgtcagctttttggccacgcccctggtgaagctgcttgcctataaggtcggtgcggtggatgtgccaaaggacaaccgacgtatgcacaaggttccgatcccccggctgggggggctggcgatctttatcgcgtttatgttcagcgttctgatcttcgcccagatcgacacgcagaccaagggcatcctgctgggcgcgacgatcatcgtcg

SEQ ID NO: 837 - DNA, 10843 bp, Unknown
  16S sequences of unknown bacteria
tctgggacttgtgggcgaaagcggttctggaaagagtgtaacggcaatggccatcagcggactgctgccccggcgcaaaacggagaccgccggctctattctgctggatggccgggagatgctcaatgccgaccgggaagaggtgcgcaagattcagggaaaagacctgagcgtagtgtttcaggagccgatgacctcgctggacccggtgatgcgcatcgggccacaggtggaggagagcctgcgcatccacacccgcatgaatgctctggagcgtcgggccgctgcattgtctgcgatggaagaagcggagctgcgagatccagaaatcgtttacgaaaagtatccccatgagctatccggcgggatgctgcagcgggtgatgattgccgcagccatcgtgtctgagccgaagttgctgctggcagacgagccgaccacggcgctggatgtaacgattcagacgcaaattctggaactgctcaaaaaaattaaccgggaaaaaggaaccactatccttttcatttcccataacctgaatgtagtgcgcaagctgtgctcccgcgtggcggtgatgcacaagggaaagatcgtggaagagggcacggctgaggcggtgttttaccatccgcaggacgcctatacccagcggctgattgctgcgattcccacccgggataaacgcctgcgctgaatggcgcggaaggtatcagaaaacagacaaaggaggggcggcaccgatggcagaaaacaaaattctggaagtgaaggatttgtgctgttcctatcagaaaagcgtcggcctttttggaaaaaaggagacccggcaggtacttcagcatgtgacgtttgacattcacagcggcgaagtgctgggacttgtgggagaaagcggctgtggaaaaacaacgctggcccgggcgatcctaggtatgctgggaggttacagcgggcagattatccatcattcccggcggccgcagatgatttttcaggatccgttcagtgcgttgaacccggcccgcactgtaggctggattttggaggaaccactgcggatttatggaaaatatgacgcggcagaacgccgctgcagggtagaggagatgctggaacaggtgggcctttcagccagctgtatgtcccgtcgtccccatgagctgtctggcggccagcgccagcgcgtgtgtattgcttcggcattgattgtgcggccccggctggtgattgctgatgaaccggtgtcggcgctggatgtgaccattcaggctcaaattctgcagcttctggcagatctgcgccagcagtatgaactgagttacctgtttatttctcacgatatgaatgtggtatatcagctttgcgatcgggtgatcgtgatgaaggaggggcagattgtggagcaggctgctgtggatgagttatttgcccatccccagcacgaatatacccagcagcttctgcgcgcggcggaataacctgcgtaaaaagctgcataaaagcgcaccgaaacggaacgccgtttcggtgcgctttttggtatgcgttatttggtgaagcgttgtttcagtgcggtgaaccatatgtgcggataaatgagggcgttatttttccacggtaaatatttcctcaatcgtagtatgaaaaacatgagcaatgttccatgccagcaccagagatgggttgtatttccctttttcgagatggccgatcgtttcccggcgaacgccgaccagttttgccagatcttcttgtttcatatcgtattttgcgcggtattccctgatcctgtttttaatcattggaagcacctgtggaatctttccattcaaaataagttgcagtgcaggaaaagacaatcagggaacatgcaaagccccagccaattccctgacgcagcgcgttttccgccgtttgcccgaaaagggccagacagcaggcgcccgcagtcgtaaccaaaagactgacataaaaggcccaggaggcggctttccgcatgttttcaagaaacatctcatccggtttaataaagaaatattcaaaaaacaggacgaaagcaaaaaacggataaaaagcgggttcttcgattataaggcccactacgccgatgagcgataaaaaaccaagcaatccgtaccgatatcgcatgtaaaattttctccttcaatatgatatatttcacacttcatgtgataataatatcacatgaaaataaactctgtcaagtgattgaaccggaacgcctttcgtttgctccggcagtgcaggcaatgctgtttgtgcttttgtttgccgggaaggagaaaaaagcgatccttgggtttggaacccaggatcgcttccttgtgttcaacagaatgccgaaagcaacaggaactccagacagaaacccattgccgtcagttgaactgtacgattttgtgcgccagccaatagcctttgaggcccaggctgcggcccagagagccaggcagattggtggcaaaattcaaaagattgtaccgcatttttctggccatgatgggatcgctctggtagcagtgttcccacatggccttaagctgccgctcggactcctccgtgcggttcaaccgggtgaataccgtggcgatgaccagcataaaacaggcctcatggtacatatagcgccccagttttgggttctccttcgaaataacgttcagatcgtgcagatcaaagatacgctgggcgatttcgatctggtggctgcaacgtttcatcatcacttgctcggagacggactgaccttcccggccgatgagatagcggtacaggtcttcgttgagatacagcagctttttcgtcagcggcagcggtgcgtaaacaaacaggttgtcttcataaaaaatgtgtttgggcaacacaatgccgctctggcggatcacctcggtgcggtagatggcagagtgcagagtgagatactggtcggggcggaattttccggtttcctcccagccgatcaccttgttttcgggaaatacgtttttatagcggatggtggacaggaggctgcggtcgtcatgctcgtagacataattgcacaccaccagatccacgccgccgctttcttccagtgcttccagacggttcagcacatgctgcagcgccacggcgttgacccagtcgtcgctgtccactactttgaaataagggcactgggcatgtttgagtccctgattaattccctcgccgtgaccgccgttttcctggtggattactttgatggtatccggatatttggcggcgtaggcatcggcgatggcgccggtctcgtcgctggagccgtcgtcgacgataatgatctctacccggtcgccgccggtgagcaaagagtcgatgcagatgtgcatataggcggcggaattgtaacagggaacggtaaatgaaatcagtttcatgcaagaaatcctttcagaatgcgctcctcagcttcttcttccgtcaagcccagggtcatcagcttgagcagctggtctccggcgattttaccaatggcggcctcatggatcagctgggcgtcagtattgttagcggtcagcgcagggatagactccacatgggcttcgtccatgataatggagtcgcattgcacgtggccaaagcaggcgctgttgcccaccagattagggtgaaacacctgacgagaagcgcctttggctacactgcgggacgtgacgcggcctttggcgtcctttccgttgagcacgatgtccatatcggaatgagcgctctggctgccatgggtcagcagacgttccataaccacagcttcggcccggtcggcgcattcaaagcgagtatagcgtttggtggagtcgatgccgccgatctgggcagtgtccatctgcatggaagcgccttcagccagataaacgacggtttgagggttcattacgttttggccgttgccgtcgccttcgccgtaatgtttctcaatatagtgcacgcgggagtttttgccaatgtggaaggtatgaatgccgtcgtgctgtgttttgccgcagccgttgttgtggatcccgcagccggccacaatggtgacatcgcaatcctcacccacataaaaatcattgtatacagcatctgtgagatctgtcttggtcatcacgacgggaatgtggcaggtctcgcccttggtaccgggcaggatatggatatcgatgcccgcgtggccgtcagtgcggggatcgattttgatgtgttcagtgctggtgcgggcggcacagccgccatttttgcggatattcagcgcacctaccggcttgccaaccagatcggcgattttttccagcagttgtgcgtccactgcgtccagtgcatcgatttgcttgtccagttcgctcatttgatggagcactcctttccgagggcgcagccgcccgttgtgttggacaggatcagggggaggatggtttcccggtcgccgcgatggcggatgcagccgccggcgattacaacgatttcgtcggccaggccgatgatgcgttcctgatgggaaatgataatcatagtggcttcgcgcttgctgtgcagtgcgctgaatgtttcggtcaggcgggcaaaactccacagatcaatgccggcttccggttcatcaaacagcagcatggaacctttgcgggccagcacggtagcgatctctatgcgcttgacttcgccgccggacaggctggtgtccacctcgcgttcgagatagtcgttggcgcacagacccacctgcgtcaggtaatcacagcatacgctctggggcagcttttcgttccctgcagcaatacacaaaaggtcgcgcacgcgcatgcccttgaagcggggcggctgctggaaaccatagcaaataccaaggcgggcgcgctcggtgatgcccagatccgtgatgtcccggccgttgtaaaaaatctgcccggaggtggggcggatcagccccatgatggccctggccaacgtggttttgccgccgccgttcggaccagtaaagacaacgagcttgttatcttcgattgtaagactgatattgtttagaatagtaaggtctgtgccgtcctcgttgcggacacagtagctgagatttttcagttccagcatagaacgattctctcctttgttagttgtaactgacaaaaatcatcgaaggattgcttcgaacacagttcaaacagtttgcgcagaataaaatgagacatactcctctaacttacatataatagcagaaagcggaaaaaattgcaatgcgcaaaagaaaggataccttttgccacttgaaccggttctgggtatagcctttttttgtcgaaatcataaaagggggctatccaataaactgaatgttaataagtaaaattttcaacatactgtttttatcgattataacgttatatctatcagacaatacatgatcaggctcataccgtatcatgtttttctgtttccatcgcttgcagctttaaaagtaaaaaagaacaatcgggcaaaagatttgtatgcaccgggcgccacggcgcccggtgcatacaaatctttttgcgcgatttacacaaaaccgtttccccatacataaaatgccatagaagggaagtgtttactatggcaaatgcaacatattctcaaaatgatcctcttggaggcgcgccggattacgcgcggtatgaccgaatctggcagcgggttgctccggcgctggatccttatccgcaggtgcgtgcagccaatcagaaggctgtgccagctatggctatgacgatgcagcagagcgcggcggtgggagagacagagcagacggtgcagaaccggtatacagcgcctgggggacagacagaagggcagactgcggcatctgtcacgcagacgggggggacagacgcctctgtggaggcgcaactgcagctgcccggtgcgtccgccgatccctgctgcatgggctcggaggcccgagacctgaccatggtggtggaagggtttgcccaggaagaggcggcggatgcggccagctatacccaacttgcccgcctggcgccggggcgcaatcaggccatggcgctgcgccagatggggcgggatgcccagcgcagggcgcaggaactggcggctgcttattacttgatcactggtgcgccgctgcagtatggagcggcgtcggtggtgctgccgcggctgccctatcgggagctgctgcgccgcagctatcatgcggcggcctgcaatgggctgaattatgcccgggctgcagatgccaccatggatatatgcctgcaacggcttttgcagcgcttcagcaatgagagctacgctgcggcggatcgactgcttttgctgctctcgcagctttcctgactcttgtatttgagcgcaaaaggggtataatagcagtacattccagtgatacaaaagaagaagcgaggtacatattttatgacgccgacgatgaccagagaagcagcgctggagctgctgtgcaagtacaataaagagccatttcatctgcttcacgcgctgacagtggaaggtgtgatgcgctggttcgcgcaggatcaggggtatggcgcagaggcggatttctgggccatggcgggtcttctgcacgacattgattttgaactttggccccaggaacactgtcggaaagcgccggagttgctgcgcgcgggcggggcggatgaagcactgatccacgccgtctgcagccatggttacggcctttgcagtgatgtggcgccggagcatccgatggaaaaaatcctctttgcctgcgatgaactgaccggcctgatcggcgcggcagcccgtatgcgcccttccaaaagtgtgcaggacatggaggtatccagtctgaagaaaaagttcaaggataaaaaatttgctgccggctgctcccgcgatgtgattcgccagggagcggagcgcttgggctggacgctggaggaactgatggaaaaaacgatcctggcgatgcgttcgtgtgaagaagcggtggccggggagaccgaagcgctgtgccatggctaagaaaataccttttgcgcagagtaagcataaaacggatgtggtggcctatttaacgctggtcggctggttgattgcctatttttgcgggaatcgggctgcgtcccgcttccatttgaatcaggcgctgtcgattctgctggcagatctggggctcaatgcggtgtttatgatggcgacttttgccgacaccgccgtggccagtgtgctggtgcggggcgtgtgcggactgctgagcttttgcgtggtggtactctgggtcatcggcctggtgcgcgccgccaagggaaatgatacgccggtgcccattttgggcgaggtgaagctgctgaaatgagctgaggccggcatgccggcaccggcggttttcagccttgacacacctgctccggcatgctaagatacataccagaatgcaatgatcggaaagagtagcatgattttccaggctaagagagggtgcgtcaccggctgcaagcgcgcctgctgcggagcatgtgaagtgcatccgggagcgcgaggggcaatgccctccgtccgggccgcgttacaggcccgtaatgagtacaatgcaggagtggaaccgcggtttgccgcctcttgcgccctcgcgggcgcgggaggcgttttttccgcttttgtttcgtttgataaggagatgcgaatctatgacaagacttggtgaaatgttgggcgcttatcaaaagcgcgatccggccgcccgcagcaaactggagatctttttgctctatcccggcgtcaatgcgacgatccattatcgcgtggcccattggttttataagcacggcttcaaatttattgcccgggtcatttcccagtgggcacgttttttgactggtattgagatccaccccggcgctaccatcggcaaacgctttgtcattgaccacgggatgggcatcgtgatcggtgagacggcggaaatcggggacgactgtctgatttaccacggcgtgaccctgggcggcaccggaaaagataaaggaaaacgccacccaactttggggaataatgttttggtgggcaacggtgcgcgcatcctaggccccttcacagtgggagacaatgcccgcgtggcttccggctctgtagtgctcagtgccgtgccgcccaactccacggtggtgggtgtgccggcccaggtagtgaaaatcaacggaaagcccgtggaaaatgcctatgactgcaccgacagcgtggatcaggttcacatcagcgacccggtggaggatgagatcggcgtgctgacggcccgcatccgggagctggaagcggacctggctgcctgccgtcgccgccatccggatcatgtgcttcatcggtgcgatgccgatttctgccgctgtgatgaagacgcagcagaacatacagaagaaagaacaaaagagtgaggtacgatttatgcagctttacaattctttgacccataaaaaagcgccctttattacccataccccgggacgggtggagatgtacacttgcggcccgacggtgtaccattttgcccatatcggcaatctgcgcagttatatcatggaggatgtgctggagaaattcctgcgctatgaggggtatgacgtcaaccgcgtgatgaatatcaccgatgtggggcatctggccagcgatgcggataccggcgaggacaagatgctcaagggcgcgcgccgggagcacaaaaccgtgatggaaattgcccagttttacaccgatgcatttttcgaggactgccgccgcctgaatatcaaaacgcccgatgtggtgcagcccgccaccggctgcatcgatgagtatatcaaaatcgtttccggcctgctggataaaggctatgcctatcaggccggcggcaatgtgtattttgattcctccaaactgcagaaatattatgtgtttaacgaccacaatgaggaagatctggctgtgggcgtccgcgaaggcgtggaagaggacagcaataagcgcaacaaaaacgattttgtcctctggtttaccaagtcgaaatttgaagatcaggcgctgaaatgggattcaccctggggcgtgggttatcccggctggcacatcgaatgcagcggcatttctctcaaatacaacggcgaatatcttgacctgcactgcggcggtgtggacaatgcattcccccaccacaccaatgaaattgcccagagcgagagctacattggccatccctggtgccagcagtggttccatgtgcaccatctgaataccaacagcggcaaaatgagcaaatccaaaggggagttcctcaccgtttccttattggaggaaaagggctacgatcctctgagctatcgtttcttctgcctgcagagccattatcgcaaagctttagtgttttcctgggaaaatctggacaatgcgcagggagcgtaccagaagctgattgccagaattgccgccctgcaggaggacggcagcccggcagacgaggcggtgcgtcagaagtaccgggaaacgttcctcgcccaggtgggcaatgatctgaacacatctatgggcattacgctgctttatgatgtgctgaaggccaaaaccagcgataccaccaagctggcggttttgggtgactttgacggcgtgctgagtctctcgctgctggagaaggcggcggcacagcgggcaaaagtcgctgcagccaaggcggcggcgcagacctctggcggttataccgtcaccggcgagggcgacgcagcgattgatgcgcgggttctggctcggggcgaggccaagaaagcgaagaactttgccgaggccgaccgtatccgtgacgagcttaaggcgcagggcatcgagattactgatgtgcccggcggtgcggtgtggaagcgtgtataagcggacggagcgcgcgtggggccgctgcctcagggtatactaaggggaaaagaaacggcgtgcgccgtgaaggagcgttttatgaaatccattcgagaactctacacgatcggccgcgggccgagcagttcccacaccatggggccggcccgggcggcggcgctgtttcgcagcgagcatccggaggcagatcacttccgggtggtgctctatggttcgctggctctgaccggacgggggcatctgactgatcaggcggtgcgggaagccctggacccggtagacgcggagatcgtatttgacagcaggaccggtgatctgccccaccccaataccatggatttgtttgcctgcagagacggcgcgcagacaggctttttgcgtgtgctgtccaccggcggcggggctatcacgctggtggggcggcccgatgcggctttgccggaagtgtatgcggaaacgtcttatgctgaaatcgcggcctggtgcaaaagcaaccatgcccgattgcccgattatgtggagcgtaacgaaggaaaacatatttgggatgatctatatcgcgtgtgggaagccatgaagcggagcattgtccatggcctgtccgtatccggcgagctgcctggcgggctgcatgtggagcgcaaagcgcagttcctttatgagcagcgccacattgatgagagccaggctacccgggaaaatcggctggtgtgtgcctatgctttcgctgtggcagaggagaacgccggcggcggtgtgatcgtcacggcgcctacctgcggtgcctgcggcgtgcttccttcggcgctgcggtatatgcaggagcagaaaggattttccgatgaacaggtgctgcgcgccttggcagcggcaggggtggtgggcaacctgatcaaaaccaacgcttccatttcaggcgctcagtgcggctgccaagcagagatcggct
